United States Patent Application Publication US 2018/0126003 A1 - sequence listing, part 99

SEQ ID NO: 179599 - DNA, 13740 bp, Artificial Sequence
  derived and/or modified sequence
atggagaccaaggagaaccggtgggtgcccgtgaccgtgctgcccgggtgtgtggggtgccgcactgttgcagcactggcgtcctggactgttcgtgacgtgaaggagagaatcttcgctgaaacaggctttccagttagcgaacagcgcctctggcggggtggaagagagctgtccgattggatcaagatcggcgacttgacctctaaaaactgtcatctgttcgtcaacctccagtctaagggacttaaaggaggaggtcggtttggccaaaccactccacccctggtggacttccttaaggacattttaaggagatacccagagggaggccaaattttgaaggagttgatccagaatgctgaagacgctggcgcaaccgaagtgaagttcctttatgatgaaactcaatatggaacagagactctgtggtctaaggatatggctccataccagggaccagccctgtacgtttataataatgcagtgtttaccccagaagattggcatggcatacaagaaattgcgcggagtcgaaaaaaggacgaccccctcaaagtcgggaggtttggaataggttttaacagtgtttaccacatcaccgacgtgccatgcattttcagcggcgatcaaattggcatgctggacccccaccagacactcttcggtcctcatgaatctggacagtgctggaacctgaaagatgactctaaggagataagtgaattaagtgatcagttcgctccctttgtcggaatattcggatctacaaaagagacctttattaacgggaattttcctgggaccttctttagatttccccttagacttcagcctagtcagctcagcagcaatctgtacaataagcaaaaggtgttggaactcttcgaatctttcagggctgacgcggataccgtgcttctgttcctcaaaagcgtacaagacgtaagcctctatgttagagaggctgacgggaccgaaaaactcgtgttcagagttacttccagcgaatccaaagccctcaagcatgaaagaccgaacagcattaaaatcctcggtactgccattagcaactattgcaaaaagaccccttccaataacataacatgtgtgacttaccatgtgaatattgtgcttgaagaggaatctaccaaagatgctcagaaaacgagttggctggtgtgtaatagtgtgggggggcgggggatatcatccaaattggattctttggccgatgaactgaagttcgtcccaatcatcggtatcgctatgcccctatcaagccgcgatgatgaggcaaagggtgctacctccgatttttcggggaaagccttttgcttcctccctttacctccaggcgaagagtcatctacaggcttgccagttcatatcagcgggtttttcggtttgactgacaatcgccgcagcattaagtggcgagagctggaccaatggcgggaccccgctgcactgtggaacgaattcttagtgatgaacgtggtccccaaggcttatgccacactcattctggatagtataaaaaggctggaaatggagaaatcttctgactttcccctgtctgtggatgtgatatataagctgtggcccgaggccagtaaagtgaaggtgcactggcagcctgtgctcgagcccttgttctccgagctgctacaaaacgccgttatatattctatttcctgtgattgggtaagactggagcaggtctatttctctgagttggatgaaaatctggaatacacaaaaacagtgctgaactatctccaatcctcaggcaaacagattgcgaaggtgcccggcaacgtcgatgccgctgtacaactgactgcggcgagtggcaccactccggtgagaaaggtgacccctgcatgggttcggcaggtactccgcaagtgcgctcatctaggatgcgctgaggagaaactgcacctcttggagtttgttctgtctgatcaagcatactccgagctcttgggcctggagctgctgccactccagaacgggaactttgtcccattctcatcatctgtatccgaccaggacgtcatctatatcacatccgcggagtatcctcgtagcctgtttcccagcctggagggcaggttcattctcgacaacctcaagccacatttagtagccgccttaaaggaggcggcacagacacggggacggccttgtacacagctacagttgctcaatccagaacgctttgcaagactgatcaaagaagttatgaacaccttttggcccgggagagaactgattgtacagtggtaccccttcgacgagaatagaaaccatccatcagtgagctggctgaagatggtgtggaagaacctgtacattcatttctcggaggacctgaccctatttgacgaaatgcccctgatcccgaggaccatactcgaagaggggcagacttgcgtcgagttaatccggctgcgaattcctagtctcgttattctggacgatgagagcgaagcccaactgcccgagtttctcgccgatatagtgcagaagctgggcgggtttgtactcaagaagcttgacgcctctatacagcacccccttatcaaaaaatacatccattcccctctgcccagcgctgtgctacagataatggaaaaaatgccattgcagaaactctgcaaccagatcacctcactgctgccgacacacaaagacgccctccgcaaattcctcgcctccttgacagacagctctgaaaaggaaaaaaggattatacaggagctcgctatcttcaagcgcattaatcacagttctgaccagggtatctccagctatactaaattaaaggggtgcaaagtgttgcaccacaccgcaaaattacctgcagatctgcggctctctatcagcgtgatcgatagctcagatgaagcgacaattagactcgcaaacatgcttaagatcgagcaactgaagaccacatcatgcctcaaacttgttctgaaagatattgaaaacgctttctacagccacgaagaggtcacacaactgatgctttgggttctggaaaatctcagcagtctaaagaatgagaaccctaatgtcctggaatggttgacgcctctgaagttcattcagattagtcaggaacagatggtgtcagctggagaactgttcgatccagacatcgaggtcctaaaagatctcttttgtaatgaggaggggacgtactttccaccatccgtatttacatcccccgacatcctgcactccctaagacaaatcggactcaaaaatgaggccagtctgaaggaaaaagatgtggttcaggtggcaaagaaaatcgaggctctgcaggtaggagcatgtcccgatcaagacgtgctactgaagaaggccaaaacactgctcctggtattgaataagaatcataccctgctccagtcaagcgaaggtaagatgaccctgaagaaaattaaatgggtgccagcctgcaaagaacgccctcctaattaccctgggtctctggtgtggaaaggcgatctttgcaacctctgcgcacctccagacatgtgcgacgtgggtcacgcgattctgattggaagttcactgcctctggtcgagagtatccatgtgaatctcgagaaggcgctgggtatttttacgaagcccagtttgagcgcggttctgaaacactttaaaatcgtggttgattggtacagctcgaagaccttttccgatgaggactactatcaatttcagcacattctgctcgaaatctatggatttatgcatgatcacctcaatgaaggaaaagattccttcagggccctgaagttcccatgggtgtggaccggcaaaaagttctgtcctctggcccaagcggttattaaacctattcacgatctggacttgcaaccctaccttcacaacgttcctaagactatggccaagttccatcagttgttcaaggtttgcggctctattgaagaactgacgagcgaccatattagtatggtaattcagaaaatctatctcaagtctgatcaagatctgtcagagcaggaatcaaaacaaaatctgcatttgatgttaaacataatccgatggctgtactccaatcaaattccagcctcccccaatacaccggtgccaattcatcatagtaagaacccatcaaaactgattatgaagcctatccatgaatgttgttattgtgacataaaggtggatgacttgaatgacctcctagaagactcagttgagcctatcatactggtgcacgaagatatcccaatgaagacagctgagtggttgaaagtcccctgcctcagcacgagactgattaaccccgagaatatggggttcgaacaatccggacagagggagcccttgaccgtaagaattaaaaatattctggaagaataccccagtgtcagtgatatctttaaagaactcctgcagaacgccgatgacgctaatgcgacggaatgctctttccttatcgacatgcgtcggaacatggacattcgagaaaatctgttggaccctggcatggccgcctgtcatggtccggcactctggtcatttaataatagccaattcagcgacagcgatttcgtcaacatcacaaggctaggtgaatcgttgaagagaggtgaagtcgataaagtgggcaagtttgggctgggatttaactctgtctatcacatcactgatatacccattataatgtctagggagtttatgatcatgttcgacccgaatatcaaccacatctccaagcacattaaggacaagtcaaatcccgggattaaaatcaattggtccaaacagcagaagaggctgagaaaatttcccaaccaattcaagccgttcatcgatgtctttgggtgtcagctgcctctaactgtggaagcaccttacagctataatgggaccctcttcaggctctctttcaggactcagcaggaggcaaaggtgagtgaggtgagcagtacgtgttataataccgctgatatatattctctggtggacgagttcagtctgtgtggacatcgccttataatctttacacagagcgttaagagcatgtatctgaagtaccttaaaattgaagaaaccaaccccagtctagcccaggataccgtcattattaagaagaagtcctgtagttctaaggcccttaacacaccagtgctctccgtgctcaaggaggcggcaaagttgatgaagacatgcagctcttccaataagaaactccccagtgatgaaccaaagtcatcttgcatactgcaaataaccgtcgaggaattccaccacgtattcaggcgtatcgctgacctccaaagtcctctattccgcggccctgacgacgaccctgcggctctctttgagatggcaaaatccggtcaatcgaaaaaacctagtgatgaattatctcagaaaaccgttgaatgcacaacctggctgctgtgtacatgtatggacacgggggaggctttaaagttctcactatccgagtcaggaaggcggttgggactcgtcccctgtggagctgttggcgtccagctgagcgagatccaggaccagaagtggactgtgaaaccacatatcggcgaggtgttttgttacctaccactgagaatcaagacgggactccctgtccacatcaacggatgttttgcagtaacgtccaatagaaaagaaatttggaaaaccgacacaaaaggccgatggaacactacatttatgaggcacgtcatcgttaaggcatacctccaggtgctgtcagtgcttagggatctggcaacctccggcgagctgatggattacacatactacgctgtgtggcccgatcccgatttagtgcacgatgattttagcgtgatttgccagggcttctacgaggacatcgctcacggaaaggggaaagagctcacgaaggtgttttccgatggtagcacctgggttagtatgaaaaatgttagattcctggacgatagcatccttaagaggagagatgtgggctctgcagccttcaagatctttttgaagtatttaaagaaaaccggtagcaagaatctatgcgccgtagagttaccatcaagtgtgaaactcgggttcgaggaggccggttgcaagcagatactattagaaaatacatttagtgagaagcagttcttctccgaggtcttttttccgaatatccaggagattgaagcagagctgagagatccactgatgatcttcgttcttaatgagaaggtcgacgagtttagcggagtgcttcgggtcaccccgtgcattccttgcagcttggaggggcacccgctggtcctgccgtcacgattaattcatccagaggggcgggtggctaagttgttcgacattaaagatggccgctttccttatggctcaacccaggactatctgaacccaattatccttatcaagctggtgcagttaggcatggcaaaggacgatattctctgggacgacatgttggagagagccgtaagcgtcgctgagattaataaatcagaccacgttgctgcctgcttgaggtcctctattttgctgtctcttatcgatgagaagctaaaaatccgagaccctcgtgcaaaggacttcgctgcaaagtaccaaaccattcgttttcttccattcctgacaaaaccggcaggcttttcactggactggaagggcaattcttttaagccggagacgatgttcgcggcgaccgacttgtatactgccgagcaccaagatattgtgtgcctcctgcagcctatccttaatgagaattcacactcttttcgcgggtgtgggtccgtaagcttggctgtcaaagagtttctggggctcctgaaaaagccaacagtggacttagtgatcaaccagctgaaagaagtagcaaagtctgttgatgacggtatcacactgtatcaagagaatatcactaatgcctgctataaatacctgcatgaggctctcatgcaaaacgaaatcacaaagatgtccattatcgataagttaaaacctttttctttcatactggtggaaaatgcgtacgtcgattcggaaaaggtttcatttcatctcaattttgaggctgccccctatctgtatcagttgccgaacaagtacaagaataattttagggagctgtttgaaaccgtgggggtccgccaatcgtgtactgtggaagacttcgcgttagtgctcgagtcaattgaccaggagcgggggacaaaacaaattacagaggaaaactttcagctgtgccggagaataattagtgagggcatttggtcactgatccgcgaaaagaaacaagagttctgcgagaagaactatggcaaaattctactgcctgacacgaacctcatgctgttgcccgctaagtcattgtgttacaacgattgtccttggattaaagtgaaagacaccaccgttaaatactgccacgcagatatacctcgcgaggttgctgtgaagctgggggccgttccaaagagacataaggcgttggaaagatacgcgtccaacgtgtgctttacaacactcgggacggagttcggccaaaaggagaagctaacttccaggataaagagcatactgaacgcttatccatccgagaaagagatgttaaaggaactcttgcagaatgctgatgacgccaaagccacagagatctgttttgtttttgaccctaggcagcacccagtcgaccggattttcgatgataaatgggcccctctgcaggggcctgccctatgtgtgtataataatcagccattcacagaggacgacgtcaggggtatccagaacctagggaagggtaccaaagagggcaacccatacaagactggacagtatgggattggatttaacagcgtgtatcatataacagactgtccttctttcatctccgggaatgacatcctgtgcatttttgatcctcacgctcgctacgctcctggtgccacttctataagcccaggccgcatgttccgcgacctggatgcggacttcaggacacagtttagtgacgtcctggatctctacttgggaacacattttaaattagataactgcacaatgtttcggtttccactgaggaacgctgagatggccaaggtgagcgaaatctcatcagtgccagcctctgatcgtatggttcagaacctgctcgacaagctgaggtccgacggggccgaactgctgatgttcttaaatcatatggagaagatttcaatctgcgagatcgataaaagtacaggagctctaaacgtcctgtattcagtcaaagggaagattacagatggagataggctgaagaggaagcagttccacgccagcgttattgactccgttaccaagaagcgacagctgaaagacattcccgttcaacaaataacttacacaatggataccgaggacagtgaaggcaacctgacgacttggctcatttgcaacaggtccgggttcagttccatggaaaaggtatctaaatccgtcatctccgcccataaaaatcaggatattacattattccctcgaggcggcgtggcagcatgcatcacccataattataagaaaccccacagagccttttgttttctgcctctgagcctggagacaggactgcccttccacgtaaacggacacttcgccctcgattctgcgaggcgcaacctgtggagggacgacaatggtgtcggcgtacggtccgactggaacaatagcctgatgaccgctctcatcgctccagcctacgtggagcttctgatacagttgaagaagcgctattttccgggatctgatcccactctgtctgtgttacagaatacccccatccacgttgtcaaagatacactcaaaaagttcctgtccttctttccagtaaatcgactcgatttacagccggacctttactgcttggtgaaggctctttacaactgtattcacgaagacatgaagcgactcctgcctgttgtgagagctcccaacatcgatgggtccgacctccatagcgccgtcatcattacatggatcaatatgagcacctcaaataagacccgtccattctttgacaacttgctgcaggacgagctccagcacttgaaaaatgccgattataacattaccacccgcaagaccgtagctgagaacgtgtaccggctgaaacacttgcttcttgagatcggctttaatttggtgtacaactgcgatgagacagctaacctgtaccattgcctcattgatgcggacatacctgtcagttacgtcactcccgctgacatcagatctttcttaatgaccttctctagtcccgatactaactgccatatcggtaaactgccttgccgcttgcaacagactaacttaaaactgtttcacagcctcaagttgctggtcgattattgtttcaaggacgcagaagagaacgagattgaggtagaaggtctgcctttgttgattacactggattccgtcttgcagacattcgacgcgaaaagaccaaagttcctcaccacataccacgaactgattccatctcgtaaggatctctttatgaacacactctacttaaaatactctaatattctccttaactgcaaggttgccaaagttttcgacatctcatcctttgctgatttgctttcttccgtgctgcctcgcgagtataaaaccaaaagctgtacaaagtggaaagataactttgccagcgaatcttggcttaaaaacgcatggcacttcataagtgaaagcgtctccgtcaaagaggaccaggaggaaacaaaacccaccttcgacatcgtggtggataccctgaaggattgggccttgcttccagggactaaattcaccgtttcagctaatcagctggttgtgcctgagggagacgtgctcttgcctcttagtctcatgcatattgccgtttttccgaacgcccagtcagataaagttttccacgcgctgatgaaagccggttgtattcagcttgcgctcaacaaaatttgttctaaagactccgctttcgttcccctgctgtcatgccacactgccaatatcgagtcacctacttccatcctgaaagcacttcattacatggtacagacaagtactttccgcgctgaaaagctggtagaaaacgatttcgaggcgctgttgatgtattttaattgcaacctgaaccatttgatgtcgcaagacgacatcaagatcttgaaatctctgccatgttataaatctatctctgggcgttacgtctctattgggaagttcggcacatgttatgtgctaactaaatctatcccgagcgccgaagtcgagaagtggactcaaagcagctcttctgctttcctcgaagaaaagatccacctcaaggaactgtacgaggtaatcgggtgcgtgcctgttgatgacctcgaggtctatctcaagcaccttttacccaaaatcgagaacctgagttacgatgctaaacttgagcacctgatctatttgaagaatcgcctctcgagtgcagaggaactgagcgaaatcaaagagcagctattcgaaaagttggagagcttgctcattatccatgatgcgaactcaaggctgaagcaggccaagcacttttatgacagaactgttcgcgtgttcgaggtgatgttaccggagaagctattcattcccaacgatttctttaagaaactggagcagctcatcaagcctaaaaaccacgtgacctttatgacctcctgggtggagttccttaggaatatagggctgaagtatattctaagtcagcagcagctcctccagttcgccaaggagatctcagtgagagccaacaccgagaactggtcaaaagaaacattacaaaacacggttgacatactgctgcaccatattttccaggagcgaatggatctactttcaggtaatttcctgaaggaactgtctcttatcccatttctgtgcccagagagagcacccgcagagttcatcaggttccatcctcagtaccaggaagtgaatggaacactgccactcattaaattcaacggagcccaggttaaccctaagttcaaacaatgcgatgtcctccagctactatggacttcttgtccaattctgcccgagaaggcaacgcccctgtcaataaaagaacaggaaggttctgacttgggcccccaggagcagctggagcaggtgcttaatatgctcaatgtaaacctggaccccccgctagacaaggtcataaacaactgtcggaatatttgcaacattactactcttgacgaggaaatggtcaaaacaagagctaaggtccttcgttcaatttatgaatttcttagcgcagagaaacgcgaatttcgcttccaactccgtggggtcgcctttgtgatggttgaagatggttggaagctcctgaaacctgaggaggtggttatcaatcttgaatatgagtccgattttaaaccatacctgtacaaattgccactggagttgggaacttttcatcagttatttaagcacctggggactgaggatataatttctaccaaacagtacgtagaagtgctgtccaggatttttaagaatagcgagggcaagcagctagacccgaatgaaatgcgtactgtaaagagggtggtgtctggcctgttcagatccttgcagaatgatagtgtcaaggttcggagtgacctcgagaacgtaagagatttggccctttatctcccctcacaagatgggagactggtgaagtccagtatcctcgtctttgacgacgcccctcattacaaaagtcggatccagggaaacattggcgtgcagatgctagtcgacctgtctcagtgttatctcggtaaagaccatggtttccataccaaactcattatgctattccctcagaagctgcgtcccagactactgtcctcgattctggaagaacagctcgacgaggaaacacccaaggtgtgccaatttggagctctctgtagcttacagggcagactccagctgctgttgtcaagcgagcaattcattaccggtctgatcaggataatgaagcatgagaatgacaatgcctttctggcgaacgaggagaaggctattcggctctgcaaagctttgcgcgagggcttgaaagtatcctgcttcgaaaaactgcagacgacactgcgcgtgaagggatttaaccctattcctcactcccgctctgagacatttgctttcctgaagagatttgggaacgctgtgatcctcctgtatattcagcactcagatagcaaagacattaatttcctgctggcactcgctatgaccctgaagagcgccaccgataatctcataagcgacacaagttatttgattgcgatgttaggctgtaacgatatctatcgaattggggaaaaacttgacagcctgggtgtcaaatacgattcgtccgaaccttccaaactggaactaccaatgccagggacccccatccccgccgaaattcactatacgctcttgatggaccctatgaacgtattttatcccggagaatatgttgggtacctggtggacgcggagggcggcgatatatacggaagctatcagccaacctatacctatgctataattgttcaggaggtggagcgggaagatgctgataactcctcgtttctggggaagatctaccagatcgacatcggatattcagagtataagatcgtgtcatccttagacctctataagttctctcggcccgaggagagttcacaatcccgggacagtgcaccatccacacctacctctcctacggaatttcttacccccggacttaggagcatccctcccctcttctcaggccgagaaagtcataaaacttcaagtaagcaccagagcccaaagaagctcaaagtgaatagtctccccgaaattctgaaagaggtcactagcgtggtggaacaagcctggaaactgccagaatctgagagaaaaaagattatcagaagactatatttgaaatggcaccccgataagaacccagagaaccacgatatcgccaatgaagttttcaagcacttgcagaacgagatcaatcgcctggaaaaacaggcctttcttgatcagaatgccgatcgagcgagtcgcaggaccttcagtacttccgccagccggtttcaatctgataagtatagcttccaacggttttacacgtcatggaaccaggaggcgacctcccataagtcggagagacagcaacagaataaagagaaatgtcctcccagtgccgggcagacatatagccagagattcttcgtaccaccaacctttaaatcagtcggtaatcccgtggaagcaaggcggtggctccggcaggcccgtgccaatttcagcgccgcgcgcaatgaccttcataagaatgccaacgaatgggtgtgttttaagtgttatctgtccactaaactggctctgatcgccgcggactatgctgtaagggggaagtccgacaaggacgtcaaaccgacggccctcgcccaaaagattgaggagtatagccagcagctggaggggttaacaaacgatgtgcatacgctcgaggcctatggagttgattcgctcaagacacggtacccggatctactgccgttcccccagatacctaatgaccgctttacctctgaggtcgccatgcgggtaatggagtgcacagcctgtatcattataaaactggagaactttatgcagcagaaagtctag

SEQ ID NO: 179600 - DNA, 13740 bp, Artificial Sequence
  derived and/or modified sequence
atggagactaaggaaaatagatgggtgcctgttaccgtcttaccgggttgcgtcgggtgcagaacggttgctgctctggcttcgtggacagtgagagacgtgaaggaaaggatcttcgctgagacagggtttccggtctctgaacagaggttatggagaggcggaagagaactctcggattggatcaaaattggggacctgacctccaaaaactgccacctttttgtcaacctgcaatccaagggccttaagggaggaggcaggtttggacagaccacacccccactggtggacttccttaaagacatcttaaggaggtatcctgaaggcggacagatcttgaaagaactgatccagaatgccgaagacgctggagccacagaggtgaagtttctctacgatgagactcaatacggcactgagaccttgtggtcaaaagatatggcaccatatcaggggcctgccctatacgtgtacaataacgcagtttttaccccagaggactggcacggaatccaggaaattgctagaagccggaaaaaggacgaccccttgaaagtgggacggtttgggataggatttaatagcgtgtatcatatcaccgacgttccctgcattttttctggcgaccagataggcatgcttgatccacatcagaccctttttggacctcacgagtccggccagtgttggaacctgaaggacgacagcaaggaaatttctgaactttcagaccagtttgccccttttgtcggcatctttggatcgacaaaagagactttcataaacggaaatttccccggaacattcttcaggtttcccctgagacttcagccatctcagctgagcagcaacctctataacaaacagaaagtgcttgagttgttcgagtcatttcgggctgatgctgatactgtgcttctcttccttaaaagtgtacaagacgtgtcgctgtacgtccgagaagccgacggcaccgaaaagcttgtgtttcgggttaccagtagcgagtctaaggccttgaagcacgagcgccctaactccatcaaaattttgggaactgcaattagtaattactgtaaaaaaacacccagtaataatattacttgtgttacctatcacgtcaatatcgtgctcgaagaggagagtactaaggacgctcagaaaactagctggctggtatgcaattcggttggcggtcggggaattagctccaaactggactcgctggcggacgaattgaagtttgtccccatcattggaattgccatgcccctgtctagccgggatgatgaagccaaaggggcaaccagtgatttcagcggaaaggctttttgcttcctcccactaccgcctggcgaggaatcaagcaccggcctgccggtgcatatctccggattctttggactgacagataaccggcgatccattaagtggcgagagctggatcagtggcgggatcccgctgccctctggaatgagtttttagtcatgaacgtcgtaccaaaggcatatgctaccttaattttggactccatcaaaagactggagatggagaagagctctgactttccactgagcgtcgacgtgatctacaagctgtggcccgaggcatccaaggttaaggtgcactggcagcccgtgctggagccccttttcagcgagctcctccaaaacgccgtgatctattccattagttgcgattgggtgaggctggagcaagtatacttttccgaactggatgaaaatctggaatatactaagaccgttctaaactacctccaatcgtccggaaagcagatcgctaaggtgccaggcaatgtcgacgcggctgtccagctgaccgctgcatctggaactacacccgtaagaaaagtcacacccgcttgggtccgacaagttctgaggaagtgtgctcaccttggctgtgctgaagaaaagctacatctactcgaatttgtgctgtcagatcaggcctacagcgaattgctggggctcgagcttctacctctccaaaacggcaactttgtacctttctcttctagtgtatcagaccaagatgtaatctatataaccagcgccgagtatccacggtcccttttcccctctctggagggccgattcatcttggacaacctcaagccacacttggttgcggctctgaaggaggccgctcaaacccggggacggccttgcacccagctgcagctacttaatcccgagcgatttgctcgcctgattaaggaggtgatgaacaccttctggccgggtcgcgaactgattgtgcaatggtacccatttgatgaaaaccgtaaccacccatcagtgtcttggctgaagatggtatggaagaatttgtatatacacttttctgaggacctgaccttatttgatgagatgcccctgatccctcgaactatattagaggaggggcaaacctgtgtcgaattaatacgtctgagaatcccttctctggtgattctcgatgacgaaagtgaagcccaactgcccgaatttttggctgacatcgttcagaagctggggggatttgttctgaagaagctcgatgcctctatacaacaccctttaataaagaaatacattcattccccactcccatcggccgtattacaaattatggagaaaatgccgctgcagaagctgtgcaatcaaattacctcgctcctccccacccacaaggacgcactcaggaaatttctggcaagcttaacggattcgagcgaaaaggaaaaacggatcatacaggaattggctatcttcaagagaataaatcactcgtcagaccagggcatttcttcatatactaaactaaagggctgcaaagttctccaccacacagctaaacttcccgcagatttgcggctctccatatcagtgatcgatagttccgatgaggctacgatccggttggcaaacatgttaaaaattgagcaacttaaaactacttcctgtttaaaactggtgctgaaggatatcgagaatgcattttactctcacgaggaagtaacacagcttatgctctgggtgcttgagaacttatcgtcgctgaagaatgaaaaccctaacgtgctcgagtggctaaccccattgaaattcatccagatctcacaagagcagatggttagtgctggtgagctcttcgaccccgacatcgaagtacttaaagatcttttctgtaacgaagagggcacttatttccctccgagtgtttttaccagtcctgatatactccattctttgcggcagattggactaaaaaacgaggccagcctgaaggaaaaagatgtcgtgcaggtggccaaaaagatcgaggctctgcaggtaggcgcttgccctgaccaggatgttcttttgaaaaaagcaaagactctgctactggtccttaacaagaaccacacactgcttcagagttctgaaggcaagatgactctcaaaaagatcaagtgggtgcccgcttgtaaagagcgccctcccaactatccagggtcgttggtgtggaagggcgatctttgtaatctgtgtgcgccaccagatatgtgtgatgtgggacacgcgatactcataggaagtagtcttcccctggtcgagagcatacacgtaaatctcgagaaagcgctcgggattttcaccaagccctctctgagcgctgtcctgaaacatttcaaaatcgtggtggattggtattcatccaagacctttagtgatgaggactactaccagtttcagcacatactgctggaaatctacggttttatgcatgaccacctaaacgagggtaaagactcctttagagcactgaaatttccatgggtctggactggcaaaaagttctgccccctggcccaggccgttatcaaacccatccacgatctggatttgcagccgtatttgcacaatgtccctaaaacaatggccaaatttcaccagctctttaaggtatgtggaagcattgaagagctcacctcagaccacatctctatggtgattcagaaaatttatcttaagtccgatcaggatcttagtgaacaggaaagcaaacagaacctgcatttaatgctaaacataatcaggtggctctattcaaatcagatacccgcttcccccaatacacccgtcccgatccaccattctaagaacccctccaaacttattatgaagcccatacacgagtgttgttactgcgatattaaagtggacgacctaaatgatctgttggaggattctgtggagcctattattctggtccatgaggatatcccaatgaaaaccgccgaatggctgaaggtaccttgccttagtactagactgatcaaccccgagaatatgggcttcgagcaatctggccagagagaacccttaaccgtccgtataaaaaatattctcgaagaataccccagcgtgtcagacattttcaaagaactgctccaaaatgccgacgacgccaacgcaactgagtgcagttttctgattgacatgcgaaggaatatggacattcgggagaatctgctggatccgggtatggctgcgtgtcatggacccgcactctggtctttcaacaacagccagttctcagactcagactttgtgaatatcacccgactgggcgagagtctgaagcgtggcgaggtagataaggtggggaagtttggcctgggctttaactcagtctatcacatcactgacattcccattattatgtcaagagaatttatgatcatgtttgaccctaatatcaaccatatcagcaagcacatcaaagataagagtaatccaggcatcaaaattaactggagcaagcagcaaaagagactgagaaaattccctaaccagttcaagccctttatagatgtttttggatgtcagttaccgctgacggttgaagctccatactcctacaatggtacattgttcaggcttagtttccggactcagcaggaagccaaggttagtgaggtgtccagcacctgctacaacaccgctgatatttatagtttggtcgatgagttttctttatgtgggcaccgactgatcatcttcacacagagtgtgaaatccatgtaccttaaatacctgaaaattgaggagactaacccaagtttagctcaagatacagtgataatcaagaaaaagtcatgctcatccaaggcactgaacacacccgttttgtctgtgctgaaggaggccgcaaagctaatgaagacgtgttctagctccaacaagaagttgccctccgatgagcccaagagtagttgcatcctacagatcaccgtggaggagttccaccatgtcttcaggcggatcgcagacctacagtcacccctgttcagagggcctgacgacgaccccgctgcattgttcgaaatggcaaaatccgggcaatccaaaaagccctccgatgagctgagtcaaaagacagtggaatgtactacatggctgctgtgtacgtgtatggacaccggggaagctctgaagttttcactgagcgagtctgggaggcgtcttggattagtgccctgcggcgctgtaggcgttcagctctcagagatccaagaccagaagtggaccgtgaaaccacatataggcgaagttttctgctacctgcccttgcggataaagaccggcctcccggtgcacattaatggatgtttcgccgtgacctccaaccgcaaagagatctggaagactgacactaaagggcgatggaatactacctttatgcgccacgtgatcgtgaaggcatatttgcaggtgctgtccgtcctgagggaccttgccacctctggagaactgatggactatacctattatgctgtgtggccggatcccgacctggtgcatgatgacttttctgtgatctgtcagggcttctatgaggatatagctcacgggaaggggaaggagttgacaaaagtcttttcagatggaagcacctgggtcagcatgaaaaatgtgaggtttttagacgattctatcctcaaacgtcgtgacgtcgggtccgccgctttcaaaatatttttaaagtacctcaaaaagacaggctccaaaaacctgtgtgctgtggagctgccctcttcagttaaactgggctttgaagaggccggatgcaagcagattctgctcgagaacaccttcagcgaaaagcagtttttctctgaagttttttttccaaatattcaggagattgaagctgaattgagagaccctctgatgatctttgtactaaacgagaaggtggatgagttctctggcgttctccgagtgactccatgtatcccctgcagcctggagggacaccccctggtcctacctagtcgactgattcatcccgaagggagagtggccaagttgttcgacatcaaagacggtagatttccatatggatctacacaggactatctcaaccccattattctcataaaactggtgcagctgggcatggccaaagacgacatcctatgggatgacatgctcgagagggccgtgagtgtggccgagatcaataaatccgatcatgtggccgcatgtcttaggtcaagtatccttctctcactcattgacgagaagcttaagattagagatcccagagctaaagatttcgccgcaaagtaccagacaatcaggttcctaccgtttttgacaaagcccgctggtttcagtctggactggaagggcaacagctttaagcctgagactatgttcgctgctactgatctgtatacagctgaacaccaggatattgtttgccttctgcaacctatcctgaacgaaaatagccactcgtttaggggctgtggaagcgttagcctggccgtaaaggagttcctagggcttctgaaaaagcccaccgtggacttagttatcaaccaactcaaagaagtcgctaaatccgtggatgatggcatcactctgtaccaggaaaacatcactaatgcttgttacaagtatttgcacgaggccctgatgcagaatgagatcactaagatgtccatcatagacaaacttaagcctttttctttcattctggttgaaaatgcctacgtggattccgagaaggtgagtttccacctgaatttcgaagcagccccttacctgtaccagctaccaaacaagtacaagaataatttccgtgagctgtttgaaactgtcggtgtgcggcaatcatgcaccgttgaggacttcgccctcgttctggagtccatcgaccaggagagagggaccaaacaaattacagaggagaatttccaattatgccgaagaatcatttcggaaggtatttggagcctgattagagagaagaagcaagagttctgcgaaaaaaattatgggaaaatattactacccgatacaaacttgatgcttttgcccgctaagagtttgtgttataatgactgtccctggattaaagtcaaggacactaccgttaaatactgccacgccgatattccacgcgaagttgctgtgaagcttggagcagtgcctaagagacataaggcattggaaagatatgctagcaatgtgtgcttcacaaccctcggcaccgaatttgggcaaaaagaaaaattgacctcaaggataaagagtatcctgaacgcttaccccagcgaaaaggaaatgctgaaggagcttctgcagaatgccgacgacgccaaggctaccgaaatctgcttcgtgttcgaccctcggcagcatccagtggataggatctttgacgataagtgggcaccactgcaaggaccagcactctgcgtatacaacaaccaaccatttacggaggacgacgtcagaggaattcagaacctgggcaagggcaccaaagagggcaacccctacaagaccggccagtatggtataggttttaactccgtatatcacatcaccgactgccccagcttcattagcggcaacgacattctttgcatattcgatccccacgccagatacgccccaggtgccacaagtatcagccctggcagaatgtttcgagatcttgacgccgattttagaactcagtttagtgatgtgctggacctgtatctgggaactcattttaaattggataactgtaccatgtttcggttcccattgcgtaatgccgagatggctaaggtttccgagatatcatccgttccagcgagtgacaggatggtacagaacctgctggacaagttacgtagcgatggcgctgagctactcatgttcctgaaccacatggagaagatttccatttgtgaaatagacaagtcgacaggggctctgaacgttttgtactcagtgaaaggtaagattaccgatggagatcggctgaagcggaaacagttccacgcttcagttatcgactcagtgactaaaaaaaggcagctgaaagatattccggtgcagcagatcacgtacaccatggacactgaggattccgagggaaacctgaccacttggctgatttgcaacaggagtggattcagctctatggaaaaagtttcaaagtccgtaattagtgctcacaaaaatcaggatatcaccctgttccccagaggtggtgtcgctgcctgtatcactcataactacaagaaaccgcacagagccttttgttttctcccactgagccttgaaactggtctacctttccatgtgaatggacatttcgctcttgattccgctaggcggaacctttggcgggatgacaatggagtaggcgtacggagcgattggaataattcacttatgactgcgctgatagcaccggcatacgtcgaacttttgatccagctgaaaaagcgctatttccctggctccgatcctactctcagcgtcctccagaataccccaattcatgttgtgaaggacaccttgaaaaaatttctgtccttcttccctgtcaacagactggatctgcagccagatctttactgtctggtgaaagccttgtataactgtatacatgaggacatgaagcggctcctgcctgtggtccgcgctcctaacattgacgggtcagatcttcactccgccgtgatcattacgtggataaatatgtccacctcaaacaaaactcgaccattcttcgataatctcctgcaggatgaactccagcatctgaagaacgcggactacaacatcactactaggaagaccgtagcagagaacgtgtaccgccttaagcatctgcttcttgaaattggattcaacctcgtatacaactgtgacgagacagctaacctgtatcactgccttatcgacgctgacattccagtgtcttatgtcacgcctgccgatatacgttcttttcttatgacctttagcagcccggatactaactgccatatcgggaaactaccttgtagactgcagcaaaccaatttgaaactgttccactccctgaagctgcttgtggattattgcttcaaggatgccgaggaaaatgagattgaagtggagggccttccactcctcatcaccctggactccgtgctgcagacttttgatgcgaagcggcctaagtttctcactacataccatgaactgatcccttcccggaaggacctatttatgaacactctatatctaaagtatagtaacattctcctgaattgtaaggtggccaaggtgttcgacatatcaagcttcgctgaccttctgagttcagtgctccccagggaatataaaaccaaatcctgcacgaagtggaaagacaacttcgcttccgagtcttggcttaaaaacgcgtggcatttcatatcggaaagcgtttccgttaaggaggaccaggaggaaaccaagccaacgttcgacattgtggtggacacgttaaaagactgggccctactaccaggtactaagtttacagtgtcggctaatcagctggtcgtgccagaaggggacgttctgcttcctctcagcctaatgcacattgctgtgttccctaacgctcagagtgacaaggtcttccacgccctgatgaaagcaggctgtatccagcttgccctgaataaaatttgcagcaaggattccgctttcgtgcctttattgtcatgccacacagccaacattgagagccctacctctattctgaaggctttgcattacatggtccagaccagcacatttcgggctgaaaagctggtagaaaatgatttcgaggccctgcttatgtactttaattgtaacctgaatcatcttatgtcacaagacgatatcaaaatactgaagagtctcccatgttataaatcaatatctggcaggtacgtgtccattggcaagttcggcacctgctacgtgctgactaaaagcatcccatcagccgaggtggaaaaatggacacagtcctcttcatccgcttttctggaagaaaagattcacttaaaggagctgtatgaagtcataggctgtgtgccagtcgatgatctggaggtgtacttgaagcacttgctgcctaaaatcgagaatctgagctatgatgccaagctggaacaccttatatacctgaaaaatagactgtcctccgccgaggagctgtccgaaatcaaggaacagctattcgagaagctggagagtctgctgataatccatgacgcaaattctaggctgaagcaggcaaaacatttctacgataggaccgtgcgagtatttgaggtgatgctgccagaaaagttattcattcctaatgattttttcaaaaagctggagcagttaataaagccgaagaatcacgtaacgtttatgaccagctgggtggagtttctacggaacatcggcttgaaatacattctctcacagcagcagctgttgcagtttgccaaagaaatatccgtccgcgcaaataccgagaactggtcaaaagaaacgttgcaaaataccgtcgatatcttattgcatcacatcttccaagaacgtatggaccttttatctggcaatttcttgaaagaactctctttaattcccttcctgtgcccggagcgtgctcctgcagagttcatccgctttcatccccagtaccaagaggtcaacggaacactgccactcatcaaatttaacggtgcgcaagttaacccgaagttcaagcagtgcgatgtgctacagttgctttggacgagctgtccaatcctgcccgagaaagctactcctttgtcgatcaaggaacaggagggttcggacctgggacctcaggagcaactggaacaggtcctgaacatgctgaatgtgaatctggatcccccacttgataaagtgatcaacaactgcagaaacatttgcaatatcaccacgctggacgaggagatggtaaagaccagggccaaagtactgcgcagcatatacgagttcctgagcgccgagaagcgggagttccgcttccagttaagaggagtggccttcgtgatggtcgaggacggctggaagctgcttaaaccggaagaggtggtaattaaccttgaatatgaaagtgactttaagccgtacctttacaagcttcccctggagttagggacatttcatcaactattcaagcaccttggcaccgaggacattatctccaccaaacaatatgttgaggtcctgtcaagaattttcaaaaattcagaaggaaagcagctagacccgaacgagatgaggaccgtcaagcgcgtcgtctccggcctctttcgatctctccagaatgactcagtcaaggtaagatctgatctggagaacgtacgagatttggccctgtatctgcctagccaggacggcaggctcgtcaagtccagtattctcgtgtttgatgacgctccacactacaaaagtcgcatacagggaaacattggggtacagatgttggttgatctgtcgcagtgttacctcgggaaagaccatggattccacactaagctgatcatgctgttcccccaaaagctccgcccaaggctgctatcaagcatcctggaggagcaattagacgaggaaactccaaaagtctgccaatttggagccctatgttccctgcagggcaggttacagctcctcctatcatctgagcagtttatcaccgggctgattagaatcatgaagcatgaaaatgacaatgcctttctggctaatgaggaaaaagccatcaggctctgcaaggcactcagggaaggactcaaagtgagttgtttcgagaagcttcagaccacgttgcgagtgaaagggtttaatccaattcctcacagcagaagtgagacttttgcctttctaaagcgatttggtaacgccgtcattctgctgtacatccaacactccgactctaaggatatcaacttcttgttagcccttgcgatgaccctaaaaagcgccaccgataaccttatctctgatacctcttacctgattgcaatgctggggtgcaatgatatatacaggatcggcgagaagctggattccctgggcgtcaagtacgacagttccgaacctagcaaactagaattgccaatgccgggaactcccattcctgctgaaatccattacacactgctgatggatccaatgaatgtgttttatcctggggaatacgtgggttacctggtcgatgcggagggcggagatatttatggcagctaccagcccacatatacgtacgcgattatagtgcaggaggtggagagggaggacgccgacaacagctccttcctcggcaaaatctaccagatcgacattggatactccgaatacaagatagtgagctctctagacctctacaagttctcacggccagaagagtcctctcagtcaagggactcggccccatctacacccactagccccacagaattcctgacaccaggcctaagaagtataccccctctcttttccgggagagagtcacacaagacttctagcaagcaccagtcccctaaaaagttgaaggtgaatagcctgcctgaaattctcaaagaggtgacgtcagttgtcgaacaggcctggaagctcccggagagcgagaggaagaagatcatccggagactatatctcaaatggcacccggataaaaatcctgagaatcatgatatcgccaatgaagtgtttaagcatctccagaatgaaattaaccgccttgagaaacaggcgtttttagaccagaacgcggacagagcatccaggcgaacgtttagcacttctgcttcgcgtttccagagcgataaatactcttttcagagattttatacctcttggaaccaggaggctacgtcacacaagagcgagaggcagcagcaaaataaagagaaatgcccgccaagcgctggtcaaacctattcacagcgcttctttgtgcctccgacctttaaaagcgtggggaatccagtcgaagcgcgtaggtggcttcgacaggcccgtgccaatttctccgccgcacgaaacgacctgcacaagaacgcaaacgaatgggtatgctttaagtgctatctttccaccaagctggcactcatagcggcagactacgcagttcgcggtaaatccgacaaggatgttaaaccaaccgcactggcccagaagatagaggagtacagccagcagctggaggggctaaccaatgacgtgcataccttagaagcatacggagttgattctctgaaaaccagataccccgatctgttgccctttccacaaattcccaacgaccggtttacaagcgaagttgcgatgcgggttatggaatgtacagcatgtataattattaagcttgagaatttcatgcaacagaaggtgtac

SEQ ID NO: 179601 - DNA, 13740 bp, Artificial Sequence
  derived and/or modified sequence
atggaaaccaaagagaacagatgggtacccgtgaccgtgctgccagggtgtgtgggatgcaggaccgtcgctgcgctggcatcttggacggtccgcgacgtgaaggagaggatattcgccgagacaggatttccagtctccgagcagcgattgtggcgtgggggtcgcgaactgtccgactggatcaagatcggagatctgacttcaaagaattgccacctattcgtaaatttgcagagcaaaggactgaagggtggcggtcggtttggtcagactactccgcctctcgtcgatttcctgaaagatattctgagaagataccccgaagggggacagattctgaaagaactgatacaaaacgccgaagatgcgggagcaacagaggtcaagttcctctacgacgaaactcagtacgggacagagaccctgtggagtaaggatatggcaccctaccagggcccagctctgtacgtgtacaataatgcagtgttcaccccagaagattggcatggcatacaggaaatcgccaggtctcggaaaaaggacgatcccctgaaggtgggtcgattcggtatcggctttaattccgtttatcatattacggacgtgccttgtatttttagtggagatcagattggcatgctcgacccgcaccagacgctctttggtccacacgagtccggccagtgttggaatctcaaggatgactctaaggagattagtgaactttctgaccagttcgccccattcgtgggcatttttggcagtacaaaagaaacgttcattaatggaaatttccctggtactttcttcaggttcccactacgcttgcagcctagccagctgagctccaacctgtacaacaagcaaaaagtgttggaactgttcgagtcattcagggccgacgctgataccgtgctgctgttcctgaaaagtgtccaggacgtaagcctgtacgttcgggaggcagacggaacagagaaactggtgtttcgtgtgaccagttccgaaagcaaggccctgaaacatgaaaggcccaattctatcaagatcctaggaactgccatcagtaattattgtaagaagactccttccaacaacattacttgcgtaacgtaccacgtcaatatagtgctggaagaagagagcaccaaggatgcgcagaagacatcatggcttgtgtgtaacagcgtgggaggaaggggaatatcttctaaattggattccttagccgacgaactcaagtttgtaccaattatcggcattgccatgcctctgtctagccgagacgatgaagccaagggtgccacttctgatttcagcgggaaggctttctgttttcttcccctgccaccgggagaagagagctctaccggactaccggtccatataagcgggttcttcggccttacagacaacagacgcagtatcaagtggagagagctcgatcaatggagagatccggcagccctgtggaatgaatttcttgtgatgaacgtagttccaaaagcctacgcgaccttgattctggacagtataaaacgccttgaaatggaaaaatcttcagactttcccctgtctgtcgatgtcatctataaactatggccagaagctagcaaagttaaggtgcattggcagcccgttctcgaaccactcttcagcgagctgctccagaacgctgtgatttattcaataagctgcgactgggtgcggttggaacaagtatatttttcagagcttgatgagaacttggaatacactaaaaccgttctcaactacttgcagtcttcaggaaagcagattgctaaagtaccaggcaacgtagatgccgcagtgcagttgaccgccgctagcggcaccacaccggtgaggaaggtcacccccgcttgggtgaggcaggtcctccgcaaatgtgcacaccttgggtgcgcagaggaaaagttacacctgttagagtttgtgctcagcgaccaggcatatagcgaactgctcggcctggagctcttgccactgcagaacggaaatttcgtgcccttcagttcatccgtatctgaccaagacgtcatctatattaccagcgccgaatatccacgcagcctgtttccttcgctggaagggaggtttatactcgacaacttgaaaccccaccttgtggctgcattgaaggaggccgctcagaccaggggcaggccttgtacccagctgcagttgttaaaccccgagcgcttcgctcgcctgataaaggaggtgatgaacactttttggcctgggagagagttgatcgttcagtggtatcctttcgacgaaaaccgcaatcacccttccgtatcctggctgaagatggtatggaaaaatctctacatccactttagcgaagatctcacactctttgacgagatgccgctgattcctcgtactatcttagaggaggggcagacatgtgttgagttaattaggttacgcattccctcactggtgattttggacgatgaaagcgaggcacagttgcctgagttcttagctgacatagtgcagaagctcgggggattcgtgctgaagaagctggatgctagcattcagcatccgctgattaaaaagtatattcatagccccctccctagcgccgttctgcaaatcatggagaaaatgccattacagaagctgtgcaaccaaataactagtctcctgcctactcacaaagatgcgctccgcaaattcctggcttcactaaccgatagtagtgagaaagagaagcgcatcatccaggagcttgccatttttaaacgcatcaatcacagtagcgatcagggtatcagctcttatactaaattaaagggttgtaaggtcctacatcacacggcaaagttgcccgctgatctcaggctaagtatcagtgtcattgactcgagcgacgaggctacaataagactcgccaatatgctgaagatcgagcagttaaagaccaccagctgtctgaagttggtgttgaaagatatcgagaacgcattctattcccacgaggaagtaacgcagctgatgctttgggttttggaaaacctatccagtctgaagaatgaaaaccctaatgttctcgagtggctcacaccgctcaagttcatccagatctcccaggagcagatggtctcggccggagagctattcgacccagatatagaggtgctcaaggatttattctgcaacgaggagggcacatattttcctcccagtgtgtttaccagtcctgacatcctgcattccctgaggcaaattggcctcaaaaacgaagcaagcctaaaagaaaaggatgttgtgcaagtggccaaaaagatagaggccctgcaagtaggggcatgtccggatcaggacgtcttactgaagaaagcgaagacgctgctccttgttctaaacaagaatcacactctcctgcagagtagtgagggcaaaatgacccttaagaaaattaagtgggtccctgcatgtaaagagaggcctcccaattaccccggtagtctggtgtggaagggcgacctgtgtaatttgtgtgcccctcccgatatgtgtgacgtggggcacgctatcctgattggcagcagtctccctttggttgagtcaattcacgtaaacctggagaaggccttggggatcttcactaaaccatccctttccgcggttcttaaacacttcaagatcgtggttgactggtactcttcaaagaccttctctgatgaggattattaccagtttcaacacatcctactggaaatctacgggtttatgcacgatcacctgaatgagggaaaggatagtttccgggcactgaagttcccttgggtgtggaccggaaagaagttctgcccactggctcaggcagtaattaagccgatccatgatctcgacctgcaaccatatcttcacaacgtcccaaagacaatggctaagttccaccagctgttcaaagtctgcggctccattgaggagctgaccagtgaccatatttctatggtgatccaaaagatctaccttaagtcagatcaggacctctccgaacaggagtcaaaacagaatttgcatttgatgctgaacatcatccggtggttgtacagcaaccagatccctgcttcgccaaacacgcctgtgccaattcatcattcgaaaaaccccagcaagttgatcatgaagccaattcacgagtgttgctactgtgatattaaagtggacgacttaaacgaccttcttgaagatagtgtggaaccgataatcttagtgcacgaggatattcccatgaagaccgctgaatggctcaaggtaccctgcctatctaccaggcttataaacccggagaatatgggtttcgagcagtccggacaacgcgaacccctgactgtgcggattaagaacattctggaggaatacccatccgtgagcgacatcttcaaggaattgctgcagaacgccgacgacgcgaatgccaccgaatgctcattcctgatcgatatgcggagaaatatggatatccgagaaaatttgctagacccaggcatggctgcctgccatggacccgcactgtggtcatttaataacagccagtttagtgattccgactttgtcaacatcactcggttgggggagagcctgaaacgcggagaggtggataaggttggcaaattcggcctgggcttcaattccgtctatcacatcaccgatatacctatcataatgagtcgcgaattcatgattatgtttgaccccaacataaaccacatttctaaacatatcaaggataagtccaacccgggaatcaagatcaattggagtaaacagcagaagaggctgaggaagttcccaaaccagtttaagccctttatcgacgtgtttggatgccaactgcccttaacggtggaggccccttactcatataacgggaccctgtttcgcctcagtttcaggactcagcaggaggccaaggtgtctgaggtgagcagtacttgttacaatacagcagatatttactcacttgtcgacgaattttccctctgtgggcatagactgatcatttttacccaaagtgtaaaatctatgtaccttaagtatcttaagatcgaggagactaacccatcattagcccaggacacagtgataataaaaaagaaaagctgctcttctaaggctttaaacacaccagttctctcagtcctgaaagaggctgccaaactcatgaaaacttgctcatcttcgaacaagaagctccctagcgatgagcccaaatcttcttgtatcctacagatcactgttgaggaatttcatcatgtctttaggcgaatcgcagacctgcaaagtccactcttccgcggaccagacgacgatcctgcagcactatttgagatggccaagtcaggacagagtaagaaaccctccgatgagctcagccaaaagacagtggaatgtacaacctggttgctgtgcacctgtatggacaccggcgaggctttgaagttttcacttagtgagtccggtcgcaggctgggcttggtgccctgtggagctgtgggcgtccagctatcagagatacaggatcagaaatggactgttaaaccgcatattggggaggtgttttgctacctgccattgagaattaagaccggactgccggtgcacatcaatggttgtttcgctgtgactagcaaccggaaagagatttggaagactgataccaagggtcgatggaatactacatttatgaggcatgtgattgttaaagcgtacctgcaggtgctctccgtcctccgggatctggctacgagtggggagctgatggattacacctactatgctgtatggcctgaccctgaccttgtgcacgatgacttcagtgtgatctgccaaggattttatgaggatatcgcacacgggaaaggcaaggagctcactaaggtgttttctgatggaagtacttgggtttctatgaaaaacgtcagatttctcgatgactccatcctaaagaggcgtgacgtcggtagcgctgcatttaagattttcttgaaatacctgaaaaaaacagggtctaagaatctctgtgctgtcgagttgccctcaagtgttaagctggggtttgaagaagctggatgcaagcagatcttactggaaaatacattttctgaaaagcagtttttttcagaagtattcttcccaaacatccaggaaatagaggccgagctacgtgatcccttgatgattttcgtcttgaatgagaaggtggacgagtttagcggtgtcttaagggttaccccttgtatcccctgctccctggaggggcacccactagtgttgccatctaggttgatacacccagaaggaagggtagctaaactctttgacattaaagatggcaggtttccatatggttctacacaggactacctgaacccaatcatactcattaagttagttcagttagggatggcaaaagacgacattctgtgggatgacatgctcgaaagggccgtgtctgttgcagaaatcaataagagtgatcacgtggccgcatgtttgcggtcctccattctgctgagcttaatagatgagaaactgaaaatacgggaccccagagcaaaggactttgctgccaagtatcaaactataagatttctgcctttccttaccaaacccgctggattttccctcgactggaagggcaactctttcaaaccagaaaccatgttcgccgcaacagatctgtatactgccgagcaccaagacattgtttgtctgttacagccgattttaaatgagaacagccatagctttagaggatgcggcagcgtgagtcttgccgtgaaagagtttctaggcctcctcaagaaacccaccgtggacctcgttatcaatcagctcaaggaagttgccaaatcagtcgatgacggcattacattataccaggaaaatatcacaaatgcatgctacaagtatctccacgaggccctcatgcaaaacgaaatcacgaagatgagcattatcgataagttaaaaccatttagcttcattctggtcgagaatgcctacgtggactcagaaaaagtcagcttccacttgaattttgaagcggcaccctatctgtaccagttaccaaataagtataagaataactttcgtgagctcttcgaaaccgtgggcgtgcgacagagctgcactgtggaggattttgcacttgttctggagagtatcgatcaagaacggggaaccaagcaaattacagaagaaaatttccaactttgccgcaggattatctcagaaggaatctggtcactgattcgggaaaaaaaacaagaattttgcgagaagaactatggtaaaatcctgcttcccgataccaatttgatgctgcttccagcaaaatctctctgttataatgactgtccgtggatcaaagtcaaggacacaactgttaagtattgtcacgctgacatcccacgggaggtcgcggtgaagctcggggctgtccccaagcggcacaaggccttggaaaggtacgcttctaacgtctgcttcactacactcggtacagaattcggtcaaaaagagaaactgacgtctagaattaaatccatccttaacgcttatccatcagagaaagaaatgctaaaggagctgttgcagaatgccgacgacgctaaggctaccgaaatttgtttcgtgttcgaccccaggcagcacccagttgaccgcattttcgacgacaagtgggcacctctgcagggacccgctttgtgtgtttataataaccagcccttcacggaggatgatgtgaggggcatccagaacctcggtaaaggaactaaggagggaaacccctacaagacaggccagtatgggattggatttaactcggtgtaccacatcaccgattgtccaagctttataagtggcaacgacattctgtgtattttcgacccgcatgctagatatgccccaggcgcaacatctatcagccctggcagaatgttcagggacctggacgctgactttaggacacagttctctgacgtcctcgatctgtatctgggtactcactttaaactggataattgtaccatgttccgctttcctctccgaaatgccgagatggcaaaagtgtctgaaatctcctccgtgcccgcatccgacagaatggtccagaacttacttgataaactgcggagtgacggtgcagagctcctgatgtttctgaaccacatggaaaaaatcagcatatgtgagatagacaagagcaccggggcactgaacgtcttgtattccgtcaaaggaaagattacagacggcgatagactgaagcgcaagcagtttcatgcaagtgtgatagatagtgtgacaaaaaagaggcagctcaaggacatccccgttcagcagatcacttacaccatggatacagaagattctgaagggaacctcactacgtggttgatttgtaacaggtcagggttctcctcaatggagaaggtgtctaagtctgtcatctctgctcacaagaatcaggatatcacgctctttccaagaggcggagtggccgcatgcataacacacaactacaagaaacctcacagggccttttgtttcctgcccctatcacttgagacggggttgcccttccacgtcaatggtcactttgcgctggatagcgcgagacgaaatctgtggcgcgatgacaacggggtgggcgtccggtcagattggaataattcactaatgaccgcccttatcgcaccggcttatgtggaactgctgatacaactgaaaaagcgatattttcctgggagcgatcctaccctgagcgtgctccaaaacacgcccatacacgtggtcaaagacacgctcaaaaagttcctgtccttctttcctgtcaatcgtttggatttacagcctgacctctactgtctggtgaaagccctatataattgtattcacgaggacatgaagcggctgctacccgtggtgcgggcaccgaacatcgatggaagcgacctgcactcagctgtcataattacatggatcaatatgagcacctccaacaaaacgcgcccattcttcgataatcttctgcaggatgaattgcaacacctgaaaaacgcggattacaatattaccaccaggaagacagtcgccgaaaacgtctacagactgaaacacctgttgctggaaattgggttcaacctggtttacaattgtgacgaaacagccaatctctatcactgtttaatcgatgcggatattcccgtctcctacgtgactcctgccgatattcgtagtttcctgatgactttctccagccctgatactaactgtcatatcggcaaactgccctgccgactgcagcagacaaaccttaagctctttcactccttgaagctgctagtagactattgttttaaggatgcagaagagaacgagattgaggtcgaaggactgcctctgctgatcacactggattccgtgctgcagacttttgacgccaagcgcccaaagtttcttacaacgtatcacgaattgattccaagccggaaagacctgtttatgaacaccctttaccttaagtacagcaatattttgctgaactgcaaagtcgcaaaagtgtttgatatttctagctttgccgaccttctctccagtgttctccccagagagtataagactaaatcctgcactaagtggaaagataacttcgccagtgaatcctggttgaagaacgcttggcacttcatttctgagtcagtgtccgtgaaagaggaccaagaagagaccaaacctacctttgatatcgtcgttgacaccttgaaagactgggctttgctccccggtaccaagtttaccgtctcagccaaccagctagtcgtgccagaaggcgatgtgctgcttcccctgtctctaatgcacatcgcagtgtttcctaacgcgcagtcagacaaagtctttcatgccctaatgaaggcaggctgcatacagctggctctgaataagatctgctcaaaggactctgcgtttgtaccccttctgagctgccacaccgccaacatcgaatcccccaccagcattctcaaggccctccactacatggtacaaaccagtaccttccgggcagagaagctggtcgaaaacgattttgaggccctattgatgtattttaattgtaatctgaaccaccttatgtcacaagacgacattaaaatcctaaagtcgctaccgtgttataagtccatctctggccgttacgtcagtatcggaaaattcggtacttgttacgtgcttacaaaaagcattccctccgctgaggtggagaagtggactcagtcaagctcttcagcatttctggaagaaaaaatccacctaaaggagctgtatgaggttatcgggtgtgtccctgttgacgatctggaggtgtatctgaaacatctgctcccaaagattgaaaacctgtcctatgacgccaagctggaacacctgatatatctcaaaaaccgtttaagtagcgctgaggagttgagcgaaattaaggagcagctgttcgagaagctagagtctttacttatcattcacgatgccaactcacgactgaagcaggccaagcacttttatgatagaaccgtcagagtcttcgaggttatgcttcctgaaaaactcttcatacctaatgatttcttcaagaagctagagcagctgatcaagcccaaaaatcacgtcacgtttatgacttcctgggtcgagtttttgcgaaatatcggcctgaagtacattctgtctcagcagcagctcttgcagtttgccaaagagatctccgtgcgcgctaacactgagaactggtctaaggaaacccttcagaataccgtggacatcctccttcatcatatatttcaggagagaatggatctgctcagcgggaactttttgaaggagctatccttgattccgttcttatgtccagagagggcgcctgcagaattcatccggttccacccccaatatcaggaggttaacgggaccctaccactgataaagttcaacggagcccaggtgaacccgaaattcaagcagtgtgatgtgcttcagttgttgtggacctcctgcccaatcctgcccgagaaagcaacgcccctgagcataaaggagcaggagggctctgatctggggcctcaggaacagctcgagcaggtcctcaacatgctgaacgtcaatctcgacccgccactcgataaggtgattaacaattgccggaacatttgtaatataactacgttggacgaagagatggtgaaaacgagagccaaggtcctgcggtcaatctatgaatttctgtcagccgagaagcgcgaattcaggttccagctgcgcggagtggcattcgtaatggtggaagatgggtggaaacttctcaaacccgaggaggtggtaattaatttggagtacgaatccgacttcaaaccttacttgtataaacttcctctcgagttgggaacatttcaccaactgttcaagcacctcggtactgaagacattatctccaccaaacagtatgtagaggtgttgagtcgaatttttaaaaattctgagggcaagcagctggacccaaatgaaatgcggacagtgaagcgggtggtaagcggcttgttcagaagcctgcaaaacgattcagtaaaagtcaggtccgacctggaaaacgtcagagacttggccctgtatctgccgagccaagatggaagattggtgaagtcatctatccttgtgtttgacgatgctccgcactataaatccagaattcagggaaatatcggagtgcagatgttggttgaccttagtcagtgctacttgggaaaagaccatggctttcacactaagcttattatgttgtttccccaaaagctcagacccaggctgctgagtagcatactcgaagaacagctcgacgaagagactcctaaagtgtgtcaattcggagcgctctgctcattacaaggccgtctgcagcttctgctgtctagtgagcagttcattaccggcctgattcggataatgaaacatgagaatgacaatgcatttttagcaaacgaagaaaaagctatacgcctttgcaaagccctcagagaagggctaaaggtatcctgctttgagaagctgcagaccactctgcgagttaaaggctttaacccaatcccccattctcggagtgaaacctttgcattcctaaagcgctttggcaatgctgtcatcttgctgtatatacaacattcagactctaaggacatcaactttcttctcgccctggccatgaccttgaagtctgctacagacaatttaattagcgacactagttaccttatcgctatgctgggttgcaacgacatttacagaatcggcgagaaactggactcactcggggtgaagtacgatagttctgagccgtccaaactggagctccctatgcccggtactccaatacccgcagagattcattataccctgttgatggatccaatgaacgtcttttaccctggggagtacgtgggctatctggtcgatgccgaagggggagacatatatggatcctaccagcctacctacacctatgcaataatcgtacaggaggtggagagagaggacgcagataactctagctttctcggcaaaatttaccaaattgacattgggtacagtgaatataagattgtttcttctctggacctctacaaattcagtcggccagaggaaagctcccagtcacgcgactcagccccatcaacacccacttctccgacagaatttctgaccccgggtctgcgatccatcccaccgctcttttctggcagagaatctcacaaaacatcttctaagcaccagagcccaaaaaaactgaaagtgaattctctcccagaaatcctcaaggaggtgactagcgtagtcgagcaggcttggaagctcccggagagcgagcggaagaagatcattagacgcctgtacttgaagtggcatccagataagaatcccgagaaccacgatattgccaacgaggtattcaagcatctccaaaacgagatcaaccggctggagaagcaggcgttcttagaccagaatgcagaccgggcttcaagaaggacattttccacatccgctagtcgctttcagagtgacaagtattcattccagcgtttttacacctcttggaatcaggaagccacatcgcacaagagcgagcgccaacaacagaataaagagaaatgcccccctagcgctgggcagacctacagtcagagattcttcgtgccccctacctttaagagcgtgggcaatcctgtcgaagccagacgctggctgcgtcaggcacgggctaatttcagtgcagccagaaatgacctgcacaagaacgcaaatgaatgggtgtgttttaagtgttatctcagcacaaagttagctctgatagccgctgattatgcagttcgtgggaagagtgacaaggacgtcaaacctacagctctggcacagaagatcgaggaatattcccagcagctggaggggctgactaatgacgttcatactctcgaggcgtacggtgtggacagtctgaaaacccgctaccccgacctgctcccttttccgcagatccccaatgaccgtttcacaagtgaggtcgctatgagggtaatggaatgtacagcatgcatcatcatcaagttggaaaattttatgcagcaaaaagtctac

SEQ ID NO: 179602 - DNA, 15324 bp, Artificial Sequence
  derived and/or modified sequence
tatcctgagaacttccatgggtcgctggatcagcaggcaaccattatcagactggagagtcatactttaaggaatacaaatgcaacacacgacaatgtttcctgacatcagatgatgaatggacactgaagggaaaaacaggctttttttccacctggcaggaagagctgaacttggagtacacatttaaaggaagcacagagggaagacttaaacagaagaaagaagcgtactttcatggttttcacaaacaaatatcccaggagaagtgatcatggagaccaaggagaacaggtgggtcccggtgaccgtgctccccggctgcgtgggctgcaggaccgtcgcggcgctggcgtcctggaccgtgcgcgatgtgaaggaacgtatcttcgcggagactggcttcccggtgtcggagcagcggctgtggcgcggcggccgcgagttatctgactggatcaagattggagatctgacttccaaaaattgtcatctttttgtaaaccttcaatcaaaaggcttaaaagggggaggtcgatttggtcagacaacgccaccacttgttgattttctcaaggacattttgagaagatatccagaaggaggacagattcttaaggaattaattcagaatgcagaagatgctggggcgacagaagttaaatttttatatgatgaaactcaatacggaacagagactctttggtcaaaagatatggcgccatatcaggggccagctctctatgtgtacaacaacgcggttttcaccccagaggactggcacggcattcaagaaatagcaagaagcaggaaaaaggatgatcctctgaaggtcggaagatttggaattgggtttaattctgtctatcatataacagatgttccttgtatctttagtggtgaccaaatcgggatgctagatcctcatcaaacactttttggcccacatgaatcaggccaatgttggaatctcaaagatgacagcaaagaaattagtgaactttcagaccagtttgcaccatttgttggcatttttggaagcaccaaggaaacatttataaacggcaattttccaggaacatttttccgtttccctcttcgcctacaaccttcacaacttagtagtaacctctacaataagcagaaggttcttgagttgtttgagtcttttagggcagatgcagacacagtgctgctctttctgaaaagtgtgcaggatgtttccttatatgtccgagaggctgacggaacagagaaactggtgtttagagtgacttcgagtgagagtaaggcactgaaacatgagcggccgaattctataaagattctgggaactgctataagtaactattgtaaaaagactccaagcaataacatcacctgtgtaacatatcacgtaaatattgttttagaagaggagagtactaaggatgcacagaaaacatcttggttggtgtgtaacagtgtgggtgggcgagggatcagtagtaagcttgactctttagctgatgaactgaaatttgtcccaatcattggaatagccatgcctttatcaagcagagatgatgaagcaaaaggagcaacgtctgatttctcaggaaaagcattttgtttccttcctttaccacctggtgaggaaagcagcacaggcctcccagttcacatcagtgggttctttggccttactgataaccgcaggagcataaaatggagagagctggaccagtggagagacccggcagccttatggaatgagtttcttgtcatgaatgttgtccccaaagcttatgctactctgatcttagattcaataaaacgtctggagatggaaaagagctctgatttccccttgtcagttgatgttatctataagctttggccggaggcgagcaaagtcaaggtgcactggcaaccggtgttagagcctctattcagcgagctgttgcagaatgcagtgatttattcaattagctgtgactgggtcaggttggagcaggtgtacttctcagaacttgatgaaaatttagaatacacaaaaactgtgctcaactacctccagagctcagggaagcagattgccaaggtaccagggaatgtggatgctgctgttcagctcacagctgcctctggcacaacacctgtgaggaaggtgacgcccgcgtgggtgcggcaggtgctgcggaagtgtgcacacctgggctgtgctgaagaaaagcttcaccttctagaatttgtgctttctgaccaagcctacagtgagctgcttgggctggagctgctccctttacaaaatggcaattttgtccccttctcctcatctgtatcagaccaagatgtcatttatattacctcagcagaatatccaaggtcccttttcccaagtcttgaaggaagatttattttggataacttgaaacctcaccttgtggctgctttaaaggaagctgcccaaacccgaggaagaccatgtactcagctgcagcttctaaatccagaacgatttgcacgtcttatcaaggaagtaatgaatacattctggcctggcagagaattgattgttcaatggtatccatttgatgaaaacagaaatcacccatctgtttcatggcttaagatggtttggaaaaatctttatatacatttttcagaggatttgactttatttgatgagatgccacttatccccagaactatactagaggaaggtcagacatgtgtggaactcattagactcaggattccatcgttagtcattttagacgatgaatctgaagcacagcttccagaatttttagcagacattgtacaaaaacttggagggtttgtccttaaaaaattagatgcatctatacaacatccgcttattaaaaaatatattcattcaccattaccaagtgctgttttgcagataatggagaagatgccattgcagaaattgtgtaatcaaataacttcgctacttccaacacacaaagatgccctgaggaagttcttggctagtttaaccgatagcagtgagaaagagaaaagaattattcaagaattggcaatattcaagcgcattaaccattcttctgatcagggaatttcctcttatacaaaattgaaaggttgtaaagtcttacaccatactgccaaactcccagcagatctgcgactttctatttcagtaatagacagtagtgatgaagctactattcgtctggcaaacatgttgaaaatagaacagttaaagaccactagctgcttaaagcttgttttaaaagatattgaaaatgcattttattcacatgaagaggtaacacagcttatgttatgggtccttgagaatctatcttctcttaaaaatgagaatccaaatgtgcttgagtggttaacaccattaaaattcatccagatatcacaggaacagatggtatcagctggtgaactctttgaccctgatatagaagtactaaaggatctcttttgtaatgaagaaggaacctatttcccaccctcagtttttacctcaccagatattcttcactccttaagacagattggtttaaaaaacgaagccagtctcaaagaaaaggatgttgtgcaagtggcaaaaaaaattgaagccttacaggtcggtgcttgtcctgatcaagatgttcttctgaagaaagccaaaaccctcttactggttttaaataagaatcacacactgttgcaatcatctgaaggaaagatgacattgaagaaaataaaatgggttccagcctgcaaggaaaggcctccaaattatccaggctctttggtctggaaaggagatctctgtaatctctgtgcaccaccagatatgtgtgatgtaggccatgcaattctcattggctcctcacttcctcttgttgaaagtatccatgtaaacctggaaaaagcattagggatcttcacaaaacctagccttagtgctgtcttaaaacactttaaaattgttgttgattggtattcttcaaaaacctttagtgatgaagactactatcaattccagcatattttgcttgagatttacggattcatgcatgatcatctaaatgaagggaaagattcttttagagccttaaaatttccatgggtttggactggcaaaaagttttgtccacttgcccaggctgtgattaaaccaatccatgatcttgaccttcagccttatttgcataatgtacctaaaaccatggcaaaattccaccaactatttaaggtctgtggttcaatagaggagttgacatcagatcatatttccatggttattcagaagatatatctcaaaagtgaccaagatctcagtgaacaagaaagcaaacaaaatcttcatcttatgttgaatattatcagatggctgtatagcaatcagattccagcaagccccaacacaccagttcctatacatcatagcaaaaatccttctaaacttatcatgaagccaattcacgaatgctgttattgtgacattaaagttgatgaccttaatgacttacttgaagattctgtggaaccaatcattttggtgcatgaggacatacccatgaaaactgcagaatggctaaaagttccatgccttagtacaagactgataaatcctgaaaacatgggatttgagcagtcaggacaaagagagccacttactgtaagaattaaaaatattctggaagaatacccttcagtgtcagatatttttaaagaactacttcaaaacgctgatgatgcaaatgcaacagaatgcagtttcttgattgatatgagaagaaatatggacataagagagaatctcctagacccagggatggcagcttgtcatggacctgctttgtggtcattcaacaattctcaattctcagattcagattttgtgaacataactaggttaggagaatctttaaaaaggggagaagttgacaaagttggaaaatttggtcttggatttaattctgtgtaccatatcactgacattcccatcattatgagtcgggaattcatgataatgttcgatccaaacataaatcatatcagtaaacacattaaagacaaatccaatcctgggatcaaaattaattggagtaaacaacagaaaagacttagaaaatttcctaatcagttcaaaccatttatagatgtatttggctgtcagttacctttgactgtagaagcaccttacagctataatggaacccttttccgactgtcctttagaactcaacaggaagcaaaagtgagtgaagttagtagtacgtgctacaatacagcagatatttattctcttgtggatgaatttagtctctgtggacacaggcttatcattttcactcagagtgtaaagtcaatgtatttgaagtacttgaaaattgaggaaaccaaccccagtttagcacaagatacagtaataattaaaaaaaaatcctgctcttccaaagcattgaacacacctgtcttaagtgttttaaaagaggctgctaagctcatgaagacttgcagcagcagtaataaaaagcttcccagtgatgaaccaaagtcatcttgcattcttcagatcacagtggaagaatttcaccatgtgttcagaaggattgctgatttacagtcgccactttttagaggtccagatgatgacccagctgctctctttgaaatggctaagtctggccaatcaaaaaagccatcagatgagttgtcacagaaaacagtagagtgtaccacgtggcttctgtgtacttgcatggacacaggagaggctctgaagttttccctgagtgagagtggaagaagactaggactggttccatgtggggcagtaggagttcagctgtcagaaatccaggaccagaagtggacagtgaaaccacacattggagaggtgttttgctatttacctttacgaataaaaacaggcttgccagttcatatcaatgggtgctttgctgttacatcaaataggaaagaaatctggaaaacagatacaaaaggacgatggaataccacgttcatgagacatgttattgtgaaagcttacttacaggtactgagtgtcttacgggacctggccactagtggggagctaatggattatacttactatgcagtatggcccgatcctgatttagttcatgatgatttttctgtaatttgccaaggattttatgaagatatagctcatggaaaagggaaagaactgaccaaagtcttctctgatggatctacttgggtttccatgaagaacgtaagatttctagatgactctatacttaaaagaagagatgttggttcagcagccttcaagatatttttgaaatacctcaagaagactgggtccaaaaacctttgtgctgttgaacttccttcttcggtaaaattaggatttgaagaagctggctgcaaacagatactacttgaaaacacattttcagagaaacagtttttttctgaagtgttttttccaaatattcaagaaattgaagcagaacttagagatcctttaatgatctttgttctaaatgaaaaagttgatgagttctcgggagttcttcgtgttactccatgtattccttgttccttggaggggcatcctttggttttgccatcaagattgatccaccccgaaggacgagttgcaaagttatttgatattaaagatgggagattcccttatggttctactcaggattatctcaatcctattattttgattaaactagttcagttaggtatggcaaaagatgatattttatgggatgatatgctagaacgtgcagtgtcagtagctgaaattaataaaagtgatcatgttgctgcatgcctaagaagtagtatcttattgagtcttatcgatgagaaactaaaaataagggatcctagagcaaaggattttgctgcaaaatatcaaacaatccgcttccttccatttctgacaaaaccagcaggtttttctttggactggaaaggcaacagttttaagcctgaaaccatgtttgcagcaactgacctttatacagctgaacatcaagatatagtttgtcttttgcaaccaattctaaatgaaaattcccattcttttagaggttgtggttcagtgtcattggctgttaaagagtttttgggattactcaagaagccaacagttgatctggttataaaccaattgaaagaagtagcaaaatcagttgatgatggaattacactgtaccaggagaatatcaccaatgcttgctacaaataccttcatgaagccttgatgcaaaatgaaatcactaagatgtcaattattgataagttaaaaccctttagcttcattctagttgagaatgcatatgttgactcagaaaaggtttcttttcatttaaattttgaggcggcaccatacctttatcagttgcctaataagtataaaaataatttccgcgaactttttgaaaccgtgggtgtgaggcagtcatgcactgttgaagattttgctcttgttttggaatctattgatcaagaaagaggaacaaagcaaataacagaagagaattttcagctttgccgacgaataatcagtgaaggaatatggagtctcattagagaaaagaaacaagaattttgtgagaaaaattatggcaagatattattgccagatactaatcttatgcttctccctgctaaatcgttatgctacaatgattgcccttggataaaagtaaaggataccactgtaaaatattgtcatgctgacatacccagggaagtagcagtaaaactaggagcagtcccaaagcgacacaaagccttagaaagatatgcatccaatgtctgttttacaacacttggcacagaatttgggcagaaagaaaaattgaccagcagaattaagagcatccttaatgcatatccttctgaaaaggaaatgttgaaagagcttcttcaaaatgctgatgatgcaaaggcgacagaaatctgttttgtgtttgatcctagacagcatccagttgatagaatatttgatgataagtgggccccattgcaagggccagcactttgtgtgtacaacaaccagccatttacagaagatgatgttagaggaattcagaatcttggaaaaggcacgaaagagggaaatccttataaaactggacagtatggaataggattcaattctgtgtatcatatcacagactgcccatcttttatttctggcaatgacatcctgtgtatttttgatcctcatgccagatatgcaccaggggccacatccattagtcccggacgcatgtttagagatttggatgcagattttaggacacagttctcagatgttctggatctttatctgggaacccattttaaactggataattgcacaatgttcagatttcctcttcgtaatgcagaaatggcaaaagtttcggaaatttcgtctgttccagcatcagacagaatggtccagaatcttttggacaaactgcgctcagatggggcagaacttctaatgtttcttaatcacatggaaaaaatttctatttgtgaaatagataagagtactggagctctaaatgtgctgtattcagtaaagggcaaaatcacagatggagacagattgaaaaggaaacaatttcatgcatctgtaattgatagtgttactaaaaagaggcagctcaaagacataccagttcaacaaataacctatactatggatactgaggactctgaaggaaatcttactacgtggctaatttgtaatagatcaggcttttcaagtatggagaaagtatctaaaagtgtcatatcagctcacaagaaccaagatattactcttttcccacgtggtggagtagctgcctgcattactcacaactataaaaaaccccatagggccttctgttttttgcctctttctttggagactgggctgccatttcatgtgaatggccactttgcactggattcagccagaaggaacctgtggcgtgatgataatggagttggtgttcgaagtgactggaataacagtttaatgacagcattaatagctcctgcatatgttgaattgctaatacagttaaaaaaacggtatttccctggttctgatccaacattatcagtgttacagaacacccctattcatgttgtaaaggacactttaaagaagtttttatcgtttttcccagttaaccgtcttgatctacagccagatttatattgtctagtgaaagcactttacaattgcattcacgaagacatgaaacgtcttttacctgttgtgcgggctccaaatattgatggctctgacttgcactctgcagttataattacttggatcaatatgtctacttctaataaaactagaccattttttgacaatttactacaggatgaattacaacaccttaaaaatgcagattataatatcaccacacgcaaaacagtagcagagaatgtctataggctgaaacatctccttttagaaattggtttcaacttggtttataactgtgatgaaactgctaatctttaccactgtcttatagatgcagatattcctgttagttatgtgacccctgctgatatcagatcttttttaatgacattttcctctcctgacactaattgccatattgggaagctgccttgtcgtctgcagcagactaatctaaaactttttcatagtttaaaacttttagttgattattgttttaaagatgcagaagaaaatgagattgaagttgagggattgccccttctcatcacactggacagtgttttgcaaacttttgatgcaaaacgacccaagtttctaacaacatatcatgaattgattccatcccgcaaagacttgtttatgaatacattatatttgaaatatagtaatattttattgaactgtaaagttgcaaaagtgtttgacatttccagctttgctgatttgttatcctctgtgttgcctcgagaatataagaccaaaagttgcacaaagtggaaagacaattttgcaagtgagtcttggcttaagaatgcatggcattttattagtgaatctgtaagtgtgaaagaagatcaggaagaaacaaaaccaacatttgacattgttgttgatactctaaaagactgggcattgcttccaggaacaaagtttactgtttcagccaaccagcttgtggttcctgaaggagatgttctgcttcctctcagccttatgcacattgcagtttttccaaatgcccagagtgataaagtttttcatgctctaatgaaagctggctgtattcagcttgctttgaacaaaatctgttccaaagacagtgcatttgttcctttgttgtcatgtcacacagcaaatatagagagccccacaagcatcttgaaggctctacattatatggtccaaacttcaacatttagagcagaaaaattagtagaaaatgattttgaggcacttttgatgtatttcaactgcaatttgaatcatttgatgtcccaagatgatataaaaattctaaagtcacttccgtgctataaatccatcagtggccgctatgtaagcattggaaaatttggaacatgctacgtacttacaaaaagtatcccttcagctgaagtggagaaatggacacagtcatcatcatctgcatttcttgaagaaaaaatacacttaaaagaactatatgaggtgattggttgtgtacctgtagatgatcttgaggtatatttgaaacacctcttaccaaaaattgaaaatctctcttatgatgcaaaattagagcacttgatctaccttaagaatagattatcaagtgctgaggaattatcagagattaaggaacaactttttgaaaaactggaaagtttattgataatccatgatgctaacagtagactaaagcaagcaaagcatttctatgatagaactgtgagagtttttgaagttatgcttcctgaaaaattgtttattcctaatgatttctttaagaaattggaacaacttataaaacccaaaaatcatgttacatttatgacatcctgggtggaattcttaagaaatattggactaaaatacatactttctcagcagcagttgttacagtttgctaaggaaatcagtgtgagggctaatacagaaaactggtccaaagaaacattgcaaaatacagttgatatccttctgcatcatatattccaagaacgaatggatttgttatctggaaattttctgaaagaactatctttaataccattcttatgtcctgagcgggcccccgcggaattcattagatttcatcctcaatatcaagaggtaaatggaacacttcctcttataaagttcaatggagcacaggtaaatccaaaattcaagcaatgtgatgtactccagctgttatggacatcctgccctattcttccagagaaagctacacccttaagcattaaagaacaagaaggtagtgaccttggtccacaagaacagcttgaacaagttttaaatatgcttaatgttaacctggatcctcctcttgataaggtaatcaataactgcagaaacatatgcaacataacgacgttggatgaagaaatggtaaaaactagagcaaaagtcttaaggagcatatatgaattcctcagtgcagaaaaaagggaatttcgttttcagttgcgaggggttgcttttgtgatggtagaagatggttggaaacttctgaagcctgaggaggtagtcataaacctagaatatgaatctgattttaaaccttatttgtacaagctacctttagaacttggcacatttcaccagttgttcaaacacttaggtactgaagatattatttcaactaagcaatatgttgaagtgttgagccgcatatttaaaaattctgagggcaaacaattagatcctaatgaaatgcgtacagttaagagagtagtttctggtctgttcaggagtctacagaatgattcagtcaaggtgaggagtgatctcgagaatgtacgagaccttgcgctttacctcccaagccaggatggtagattggtaaagtcaagcatcttagtgtttgacgatgcgccacattataaaagtagaatccaggggaatattggtgtgcaaatgttagttgatctcagccagtgctacttagggaaagaccatggatttcacactaagttgataatgctctttcctcaaaaacttagacctcgattattgagcagtatacttgaagaacaattagatgaagagactcccaaagtttgtcagtttggagcgttgtgttctcttcaaggaagattgcagttactcttgtcttctgaacagttcattacaggactgattagaattatgaagcatgaaaatgataatgcttttctggccaatgaagaaaaagccataagactttgcaaagccctaagagaaggattgaaagtatcctgctttgaaaagcttcaaacaacattaagagttaaaggttttaatcctattccccacagcagaagtgaaacttttgcttttttgaagcgatttggtaatgcagtcatcttgctctacattcaacattcagacagtaaagacattaatttcctgttagcattggcaatgactcttaaatcagcaactgacaatttgatttctgacacttcatatttaattgctatgctaggatgcaatgatatttacaggattggtgagaaacttgacagtttaggagtgaaatatgactcttcggagccatcaaaactggaacttccaatgcctggcacaccaattcctgctgaaattcattacactctgcttatggacccaatgaatgttttttacccgggagaatatgttgggtaccttgttgatgctgaaggtggtgatatctatggatcataccagccaacatacacatatgcaattattgtacaagaagttgaaagagaagatgctgacaattctagttttctaggaaagatatatcagatagatattggttatagtgaatataaaatagttagctctcttgatctgtataagttttcaagacctgaggaaagctctcaaagcagggacagtgctccttctacaccaaccagccccactgagttcctcacccctggcctgagaagcattcctcctcttttctctggtagagagagccacaagacttcttccaaacatcagtcccccaaaaagcttaaggttaattctttaccagaaatcttaaaagaagtgacatctgtggtggagcaagcatggaagcttccagaatcggaacgaaaaaagattattaggcggttgtatttgaaatggcatcctgacaaaaatccagagaaccatgacattgccaatgaagtttttaaacatttgcagaatgaaatcaacagattagaaaaacaggcttttctagatcaaaatgcagacagggcctccagacgaacattttcaacctcagcatcccgatttcagtcagacaaatactcatttcagagattctatacttcatggaatcaagaagcaacgagccataaatctgaaagacagcaacagaacaaagaaaaatgccccccttcagccggacagacttactctcaaaggttctttgttcctcccactttcaagtcggttggcaatccagtggaagcacgcagatggctaagacaagccagagcaaacttctcagctgccaggaatgaccttcataaaaatgccaatgagtgggtgtgctttaaatgttacctttctaccaagttagctttgattgcagctgactatgctgtgaggggaaagtctgataaagatgtaaaaccaactgcacttgctcagaaaatagaggaatatagtcagcaacttgaaggactgacaaatgatgttcacacattggaagcttatggtgtagacagtttaaaaacaagataccctgatttgcttccctttcctcagatcccaaatgacaggttcacttctgaggttgctatgagggtgatggaatgtactgcctgtatcataataaaacttgaaaattttatgcaacaaaaagtgtgaagatatttaacgaaaaaaaaggtagatcttgaatgtgttgtagcacgaataaattgctgtacttcattaagcttcattgccaattagctaggaattgttaagcacattgcagattgttcttggagaattctggagttgttatgaacatgaataccaacggaaaaccttaactgaatctaaaagaaaactattttgaagatggtggtgagctgcaaaatagctggatggatttgaatgattgggatgatacatcattgaactgcactttatataaccaaagcttagcagtttgttagataagagtctatgtatgtctctggttaggatgaagttaattttatgtttttaacatggtatttttgaaggagctaatgaaacactggacatataattggtttaaacataaggggaattaagtctttgtagtctgtcatttttttaagtggatcctcttggatgcgttattttctcatcagctggctctgatcatgaatttgttgtaattttatgttgtactcagtgcatttaagaaatggtagagtattttaatcctattacttgactaagagtgtgaaggtagtactttttagagtgcactgagtgcactttacatctttatttaaatttttttttaacatcttatgtttacaggcttcctgtttgatgaagatagcaacggaaaactcaaaatggtggcagttcttattaccagttgttagtattgtttctggaaactgcttgccaagacaacatttattaactgttagaacacttgctttatgtttgtgtgtacatattttccacaaatgttataatttatatagtgtggttgaacaggatgcaatcttttgttgtctaaaggtgctgcagttaaaaaaaaaacaaccttttctttcaatatggcatgtagtggagtttttttaactttaaaaacatcaaaaattgttaaaatcattgtgttatctagtagtttataattatcggcttatatttccccatgaatgatcagaactgacatttaattcatgtttgtctcgccatgcttctttactttaacatatttcttttgcagaatgtaaaaggtaatgataattagtttatataagtgtactggctgtaaatgatgctaaatatactttatgcaattaagggcttacagaacatgttgaaactttttttacttttattgggaataaggaatgtttgcacctccacattttattgcttctggatgtgaaatcatgtaattatttctgctgttatataaagtgccatacttttaataaaggaaaatgtacatatgaaatcat

SEQ ID NO: 179603 - DNA, 15639 bp, Artificial Sequence
  derived and/or modified sequence
agtgcggctgcgggacagtcacgctgggaactgctgatggcactggaggaaaacaaaggccgagagaccctgatgcccacagcccccagatcacagaagtgaggccaagatgcccatgtcaccagagccagaagaaaggctcctaccaaagaatattttacatctgctgagatgagggtgagaaacaaaatccaagaatttctgcgacgttttccccaagaaccttcaaaaagaaatacagaaaattctcagatgaaaataaattgattttgctctgggggaaagccaaaaacctttagcgaatccacactgttttatcctgagaacttccatgggtcgctggatcagcaggcaaccattatcagactggagagtcatactttaaggaatacaaatgcaacacacgacaatgtttcctgacatcagatgatgaatggacactgaagggaaaaacaggctttttttccacctggcaggaagagctgaacttggagtacacatttaaaggaagcacagagggaagacttaaacagaagaaagaagcgtactttcatggttttcacaaacaaatatcccaggagaagtgatcatggagaccaaggagaacaggtgggtcccggtgaccgtgctccccggctgcgtgggctgcaggaccgtcgcggcgctggcgtcctggaccgtgcgcgatgtgaaggaacgtatcttcgcggagactggcttcccggtgtcggagcagcggctgtggcgcggcggccgcgagttatctgactggatcaagattggagatctgacttccaaaaattgtcatctttttgtaaaccttcaatcaaaaggcttaaaagggggaggtcgatttggtcagacaacgccaccacttgttgattttctcaaggacattttgagaagatatccagaaggaggacagattcttaaggaattaattcagaatgcagaagatgctggggcgacagaagttaaatttttatatgatgaaactcaatacggaacagagactctttggtcaaaagatatggcgccatatcaggggccagctctctatgtgtacaacaacgcggttttcaccccagaggactggcacggcattcaagaaatagcaagaagcaggaaaaaggatgatcctctgaaggtcggaagatttggaattgggtttaattctgtctatcatataacagatgttccttgtatctttagtggtgaccaaatcgggatgctagatcctcatcaaacactttttggcccacatgaatcaggccaatgttggaatctcaaagatgacagcaaagaaattagtgaactttcagaccagtttgcaccatttgttggcatttttggaagcaccaaggaaacatttataaacggcaattttccaggaacatttttccgtttccctcttcgcctacaaccttcacaacttagtagtaacctctacaataagcagaaggttcttgagttgtttgagtcttttagggcagatgcagacacagtgctgctctttctgaaaagtgtgcaggatgtttccttatatgtccgagaggctgacggaacagagaaactggtgtttagagtgacttcgagtgagagtaaggcactgaaacatgagcggccgaattctataaagattctgggaactgctataagtaactattgtaaaaagactccaagcaataacatcacctgtgtaacatatcacgtaaatattgttttagaagaggagagtactaaggatgcacagaaaacatcttggttggtgtgtaacagtgtgggtgggcgagggatcagtagtaagcttgactctttagctgatgaactgaaatttgtcccaatcattggaatagccatgcctttatcaagcagagatgatgaagcaaaaggagcaacgtctgatttctcaggaaaagcattttgtttccttcctttaccacctggtgaggaaagcagcacaggcctcccagttcacatcagtgggttctttggccttactgataaccgcaggagcataaaatggagagagctggaccagtggagagacccggcagccttatggaatgagtttcttgtcatgaatgttgtccccaaagcttatgctactctgatcttagattcaataaaacgtctggagatggaaaagagctctgatttccccttgtcagttgatgttatctataagctttggccggaggcgagcaaagtcaaggtgcactggcaaccggtgttagagcctctattcagcgagctgttgcagaatgcagtgatttattcaattagctgtgactgggtcaggttggagcaggtgtacttctcagaacttgatgaaaatttagaatacacaaaaactgtgctcaactacctccagagctcagggaagcagattgccaaggtaccagggaatgtggatgctgctgttcagctcacagctgcctctggcacaacacctgtgaggaaggtgacgcccgcgtgggtgcggcaggtgctgcggaagtgtgcacacctgggctgtgctgaagaaaagcttcaccttctagaatttgtgctttctgaccaagcctacagtgagctgcttgggctggagctgctccctttacaaaatggcaattttgtccccttctcctcatctgtatcagaccaagatgtcatttatattacctcagcagaatatccaaggtcccttttcccaagtcttgaaggaagatttattttggataacttgaaacctcaccttgtggctgctttaaaggaagctgcccaaacccgaggaagaccatgtactcagctgcagcttctaaatccagaacgatttgcacgtcttatcaaggaagtaatgaatacattctggcctggcagagaattgattgttcaatggtatccatttgatgaaaacagaaatcacccatctgtttcatggcttaagatggtttggaaaaatctttatatacatttttcagaggatttgactttatttgatgagatgccacttatccccagaactatactagaggaaggtcagacatgtgtggaactcattagactcaggattccatcgttagtcattttagacgatgaatctgaagcacagcttccagaatttttagcagacattgtacaaaaacttggagggtttgtccttaaaaaattagatgcatctatacaacatccgcttattaaaaaatatattcattcaccattaccaagtgctgttttgcagataatggagaagatgccattgcagaaattgtgtaatcaaataacttcgctacttccaacacacaaagatgccctgaggaagttcttggctagtttaaccgatagcagtgagaaagagaaaagaattattcaagaattggcaatattcaagcgcattaaccattcttctgatcagggaatttcctcttatacaaaattgaaaggttgtaaagtcttacaccatactgccaaactcccagcagatctgcgactttctatttcagtaatagacagtagtgatgaagctactattcgtctggcaaacatgttgaaaatagaacagttaaagaccactagctgcttaaagcttgttttaaaagatattgaaaatgcattttattcacatgaagaggtaacacagcttatgttatgggtccttgagaatctatcttctcttaaaaatgagaatccaaatgtgcttgagtggttaacaccattaaaattcatccagatatcacaggaacagatggtatcagctggtgaactctttgaccctgatatagaagtactaaaggatctcttttgtaatgaagaaggaacctatttcccaccctcagtttttacctcaccagatattcttcactccttaagacagattggtttaaaaaacgaagccagtctcaaagaaaaggatgttgtgcaagtggcaaaaaaaattgaagccttacaggtcggtgcttgtcctgatcaagatgttcttctgaagaaagccaaaaccctcttactggttttaaataagaatcacacactgttgcaatcatctgaaggaaagatgacattgaagaaaataaaatgggttccagcctgcaaggaaaggcctccaaattatccaggctctttggtctggaaaggagatctctgtaatctctgtgcaccaccagatatgtgtgatgtaggccatgcaattctcattggctcctcacttcctcttgttgaaagtatccatgtaaacctggaaaaagcattagggatcttcacaaaacctagccttagtgctgtcttaaaacactttaaaattgttgttgattggtattcttcaaaaacctttagtgatgaagactactatcaattccagcatattttgcttgagatttacggattcatgcatgatcatctaaatgaagggaaagattcttttagagccttaaaatttccatgggtttggactggcaaaaagttttgtccacttgcccaggctgtgattaaaccaatccatgatcttgaccttcagccttatttgcataatgtacctaaaaccatggcaaaattccaccaactatttaaggtctgtggttcaatagaggagttgacatcagatcatatttccatggttattcagaagatatatctcaaaagtgaccaagatctcagtgaacaagaaagcaaacaaaatcttcatcttatgttgaatattatcagatggctgtatagcaatcagattccagcaagccccaacacaccagttcctatacatcatagcaaaaatccttctaaacttatcatgaagccaattcacgaatgctgttattgtgacattaaagttgatgaccttaatgacttacttgaagattctgtggaaccaatcattttggtgcatgaggacatacccatgaaaactgcagaatggctaaaagttccatgccttagtacaagactgataaatcctgaaaacatgggatttgagcagtcaggacaaagagagccacttactgtaagaattaaaaatattctggaagaatacccttcagtgtcagatatttttaaagaactacttcaaaacgctgatgatgcaaatgcaacagaatgcagtttcttgattgatatgagaagaaatatggacataagagagaatctcctagacccagggatggcagcttgtcatggacctgctttgtggtcattcaacaattctcaattctcagattcagattttgtgaacataactaggttaggagaatctttaaaaaggggagaagttgacaaagttggaaaatttggtcttggatttaattctgtgtaccatatcactgacattcccatcattatgagtcgggaattcatgataatgttcgatccaaacataaatcatatcagtaaacacattaaagacaaatccaatcctgggatcaaaattaattggagtaaacaacagaaaagacttagaaaatttcctaatcagttcaaaccatttatagatgtatttggctgtcagttacctttgactgtagaagcaccttacagctataatggaacccttttccgactgtcctttagaactcaacaggaagcaaaagtgagtgaagttagtagtacgtgctacaatacagcagatatttattctcttgtggatgaatttagtctctgtggacacaggcttatcattttcactcagagtgtaaagtcaatgtatttgaagtacttgaaaattgaggaaaccaaccccagtttagcacaagatacagtaataattaaaaaaaaatcctgctcttccaaagcattgaacacacctgtcttaagtgttttaaaagaggctgctaagctcatgaagacttgcagcagcagtaataaaaagcttcccagtgatgaaccaaagtcatcttgcattcttcagatcacagtggaagaatttcaccatgtgttcagaaggattgctgatttacagtcgccactttttagaggtccagatgatgacccagctgctctctttgaaatggctaagtctggccaatcaaaaaagccatcagatgagttgtcacagaaaacagtagagtgtaccacgtggcttctgtgtacttgcatggacacaggagaggctctgaagttttccctgagtgagagtggaagaagactaggactggttccatgtggggcagtaggagttcagctgtcagaaatccaggaccagaagtggacagtgaaaccacacattggagaggtgttttgctatttacctttacgaataaaaacaggcttgccagttcatatcaatgggtgctttgctgttacatcaaataggaaagaaatctggaaaacagatacaaaaggacgatggaataccacgttcatgagacatgttattgtgaaagcttacttacaggtactgagtgtcttacgggacctggccactagtggggagctaatggattatacttactatgcagtatggcccgatcctgatttagttcatgatgatttttctgtaatttgccaaggattttatgaagatatagctcatggaaaagggaaagaactgaccaaagtcttctctgatggatctacttgggtttccatgaagaacgtaagatttctagatgactctatacttaaaagaagagatgttggttcagcagccttcaagatatttttgaaatacctcaagaagactgggtccaaaaacctttgtgctgttgaacttccttcttcggtaaaattaggatttgaagaagctggctgcaaacagatactacttgaaaacacattttcagagaaacagtttttttctgaagtgttttttccaaatattcaagaaattgaagcagaacttagagatcctttaatgatctttgttctaaatgaaaaagttgatgagttctcgggagttcttcgtgttactccatgtattccttgttccttggaggggcatcctttggttttgccatcaagattgatccaccccgaaggacgagttgcaaagttatttgatattaaagatgggagattcccttatggttctactcaggattatctcaatcctattattttgattaaactagttcagttaggtatggcaaaagatgatattttatgggatgatatgctagaacgtgcagtgtcagtagctgaaattaataaaagtgatcatgttgctgcatgcctaagaagtagtatcttattgagtcttatcgatgagaaactaaaaataagggatcctagagcaaaggattttgctgcaaaatatcaaacaatccgcttccttccatttctgacaaaaccagcaggtttttctttggactggaaaggcaacagttttaagcctgaaaccatgtttgcagcaactgacctttatacagctgaacatcaagatatagtttgtcttttgcaaccaattctaaatgaaaattcccattcttttagaggttgtggttcagtgtcattggctgttaaagagtttttgggattactcaagaagccaacagttgatctggttataaaccaattgaaagaagtagcaaaatcagttgatgatggaattacactgtaccaggagaatatcaccaatgcttgctacaaataccttcatgaagccttgatgcaaaatgaaatcactaagatgtcaattattgataagttaaaaccctttagcttcattctagttgagaatgcatatgttgactcagaaaaggtttcttttcatttaaattttgaggcggcaccatacctttatcagttgcctaataagtataaaaataatttccgcgaactttttgaaaccgtgggtgtgaggcagtcatgcactgttgaagattttgctcttgttttggaatctattgatcaagaaagaggaacaaagcaaataacagaagagaattttcagctttgccgacgaataatcagtgaaggaatatggagtctcattagagaaaagaaacaagaattttgtgagaaaaattatggcaagatattattgccagatactaatcttatgcttctccctgctaaatcgttatgctacaatgattgcccttggataaaagtaaaggataccactgtaaaatattgtcatgctgacatacccagggaagtagcagtaaaactaggagcagtcccaaagcgacacaaagccttagaaagatatgcatccaatgtctgttttacaacacttggcacagaatttgggcagaaagaaaaattgaccagcagaattaagagcatccttaatgcatatccttctgaaaaggaaatgttgaaagagcttcttcaaaatgctgatgatgcaaaggcgacagaaatctgttttgtgtttgatcctagacagcatccagttgatagaatatttgatgataagtgggccccattgcaagggccagcactttgtgtgtacaacaaccagccatttacagaagatgatgttagaggaattcagaatcttggaaaaggcacgaaagagggaaatccttataaaactggacagtatggaataggattcaattctgtgtatcatatcacagactgcccatcttttatttctggcaatgacatcctgtgtatttttgatcctcatgccagatatgcaccaggggccacatccattagtcccggacgcatgtttagagatttggatgcagattttaggacacagttctcagatgttctggatctttatctgggaacccattttaaactggataattgcacaatgttcagatttcctcttcgtaatgcagaaatggcaaaagtttcggaaatttcgtctgttccagcatcagacagaatggtccagaatcttttggacaaactgcgctcagatggggcagaacttctaatgtttcttaatcacatggaaaaaatttctatttgtgaaatagataagagtactggagctctaaatgtgctgtattcagtaaagggcaaaatcacagatggagacagattgaaaaggaaacaatttcatgcatctgtaattgatagtgttactaaaaagaggcagctcaaagacataccagttcaacaaataacctatactatggatactgaggactctgaaggaaatcttactacgtggctaatttgtaatagatcaggcttttcaagtatggagaaagtatctaaaagtgtcatatcagctcacaagaaccaagatattactcttttcccacgtggtggagtagctgcctgcattactcacaactataaaaaaccccatagggccttctgttttttgcctctttctttggagactgggctgccatttcatgtgaatggccactttgcactggattcagccagaaggaacctgtggcgtgatgataatggagttggtgttcgaagtgactggaataacagtttaatgacagcattaatagctcctgcatatgttgaattgctaatacagttaaaaaaacggtatttccctggttctgatccaacattatcagtgttacagaacacccctattcatgttgtaaaggacactttaaagaagtttttatcgtttttcccagttaaccgtcttgatctacagccagatttatattgtctagtgaaagcactttacaattgcattcacgaagacatgaaacgtcttttacctgttgtgcgggctccaaatattgatggctctgacttgcactctgcagttataattacttggatcaatatgtctacttctaataaaactagaccattttttgacaatttactacaggatgaattacaacaccttaaaaatgcagattataatatcaccacacgcaaaacagtagcagagaatgtctataggctgaaacatctccttttagaaattggtttcaacttggtttataactgtgatgaaactgctaatctttaccactgtcttatagatgcagatattcctgttagttatgtgacccctgctgatatcagatcttttttaatgacattttcctctcctgacactaattgccatattgggaagctgccttgtcgtctgcagcagactaatctaaaactttttcatagtttaaaacttttagttgattattgttttaaagatgcagaagaaaatgagattgaagttgagggattgccccttctcatcacactggacagtgttttgcaaacttttgatgcaaaacgacccaagtttctaacaacatatcatgaattgattccatcccgcaaagacttgtttatgaatacattatatttgaaatatagtaatattttattgaactgtaaagttgcaaaagtgtttgacatttccagctttgctgatttgttatcctctgtgttgcctcgagaatataagaccaaaagttgcacaaagtggaaagacaattttgcaagtgagtcttggcttaagaatgcatggcattttattagtgaatctgtaagtgtgaaagaagatcaggaagaaacaaaaccaacatttgacattgttgttgatactctaaaagactgggcattgcttccaggaacaaagtttactgtttcagccaaccagcttgtggttcctgaaggagatgttctgcttcctctcagccttatgcacattgcagtttttccaaatgcccagagtgataaagtttttcatgctctaatgaaagctggctgtattcagcttgctttgaacaaaatctgttccaaagacagtgcatttgttcctttgttgtcatgtcacacagcaaatatagagagccccacaagcatcttgaaggctctacattatatggtccaaacttcaacatttagagcagaaaaattagtagaaaatgattttgaggcacttttgatgtatttcaactgcaatttgaatcatttgatgtcccaagatgatataaaaattctaaagtcacttccgtgctataaatccatcagtggccgctatgtaagcattggaaaatttggaacatgctacgtacttacaaaaagtatcccttcagctgaagtggagaaatggacacagtcatcatcatctgcatttcttgaagaaaaaatacacttaaaagaactatatgaggtgattggttgtgtacctgtagatgatcttgaggtatatttgaaacacctcttaccaaaaattgaaaatctctcttatgatgcaaaattagagcacttgatctaccttaagaatagattatcaagtgctgaggaattatcagagattaaggaacaactttttgaaaaactggaaagtttattgataatccatgatgctaacagtagactaaagcaagcaaagcatttctatgatagaactgtgagagtttttgaagttatgcttcctgaaaaattgtttattcctaatgatttctttaagaaattggaacaacttataaaacccaaaaatcatgttacatttatgacatcctgggtggaattcttaagaaatattggactaaaatacatactttctcagcagcagttgttacagtttgctaaggaaatcagtgtgagggctaatacagaaaactggtccaaagaaacattgcaaaatacagttgatatccttctgcatcatatattccaagaacgaatggatttgttatctggaaattttctgaaagaactatctttaataccattcttatgtcctgagcgggcccccgcggaattcattagatttcatcctcaatatcaagaggtaaatggaacacttcctcttataaagttcaatggagcacaggtaaatccaaaattcaagcaatgtgatgtactccagctgttatggacatcctgccctattcttccagagaaagctacacccttaagcattaaagaacaagaaggtagtgaccttggtccacaagaacagcttgaacaagttttaaatatgcttaatgttaacctggatcctcctcttgataaggtaatcaataactgcagaaacatatgcaacataacgacgttggatgaagaaatggtaaaaactagagcaaaagtcttaaggagcatatatgaattcctcagtgcagaaaaaagggaatttcgttttcagttgcgaggggttgcttttgtgatggtagaagatggttggaaacttctgaagcctgaggaggtagtcataaacctagaatatgaatctgattttaaaccttatttgtacaagctacctttagaacttggcacatttcaccagttgttcaaacacttaggtactgaagatattatttcaactaagcaatatgttgaagtgttgagccgcatatttaaaaattctgagggcaaacaattagatcctaatgaaatgcgtacagttaagagagtagtttctggtctgttcaggagtctacagaatgattcagtcaaggtgaggagtgatctcgagaatgtacgagaccttgcgctttacctcccaagccaggatggtagattggtaaagtcaagcatcttagtgtttgacgatgcgccacattataaaagtagaatccaggggaatattggtgtgcaaatgttagttgatctcagccagtgctacttagggaaagaccatggatttcacactaagttgataatgctctttcctcaaaaacttagacctcgattattgagcagtatacttgaagaacaattagatgaagagactcccaaagtttgtcagtttggagcgttgtgttctcttcaaggaagattgcagttactcttgtcttctgaacagttcattacaggactgattagaattatgaagcatgaaaatgataatgcttttctggccaatgaagaaaaagccataagactttgcaaagccctaagagaaggattgaaagtatcctgctttgaaaagcttcaaacaacattaagagttaaaggttttaatcctattccccacagcagaagtgaaacttttgcttttttgaagcgatttggtaatgcagtcatcttgctctacattcaacattcagacagtaaagacattaatttcctgttagcattggcaatgactcttaaatcagcaactgacaatttgatttctgacacttcatatttaattgctatgctaggatgcaatgatatttacaggattggtgagaaacttgacagtttaggagtgaaatatgactcttcggagccatcaaaactggaacttccaatgcctggcacaccaattcctgctgaaattcattacactctgcttatggacccaatgaatgttttttacccgggagaatatgttgggtaccttgttgatgctgaaggtggtgatatctatggatcataccagccaacatacacatatgcaattattgtacaagaagttgaaagagaagatgctgacaattctagttttctaggaaagatatatcagatagatattggttatagtgaatataaaatagttagctctcttgatctgtataagttttcaagacctgaggaaagctctcaaagcagggacagtgctccttctacaccaaccagccccactgagttcctcacccctggcctgagaagcattcctcctcttttctctggtagagagagccacaagacttcttccaaacatcagtcccccaaaaagcttaaggttaattctttaccagaaatcttaaaagaagtgacatctgtggtggagcaagcatggaagcttccagaatcggaacgaaaaaagattattaggcggttgtatttgaaatggcatcctgacaaaaatccagagaaccatgacattgccaatgaagtttttaaacatttgcagaatgaaatcaacagattagaaaaacaggcttttctagatcaaaatgcagacagggcctccagacgaacattttcaacctcagcatcccgatttcagtcagacaaatactcatttcagagattctatacttcatggaatcaagaagcaacgagccataaatctgaaagacagcaacagaacaaagaaaaatgccccccttcagccggacagacttactctcaaaggttctttgttcctcccactttcaagtcggttggcaatccagtggaagcacgcagatggctaagacaagccagagcaaacttctcagctgccaggaatgaccttcataaaaatgccaatgagtgggtgtgctttaaatgttacctttctaccaagttagctttgattgcagctgactatgctgtgaggggaaagtctgataaagatgtaaaaccaactgcacttgctcagaaaatagaggaatatagtcagcaacttgaaggactgacaaatgatgttcacacattggaagcttatggtgtagacagtttaaaaacaagataccctgatttgcttccctttcctcagatcccaaatgacaggttcacttctgaggttgctatgagggtgatggaatgtactgcctgtatcataataaaacttgaaaattttatgcaacaaaaagtgtgaagatatttaacgaaaaaaaaggtagatcttgaatgtgttgtagcacgaataaattgctgtacttcattaagcttcattgccaattagctaggaattgttaagcacattgcagattgttcttggagaattctggagttgttatgaacatgaataccaacggaaaaccttaactgaatctaaaagaaaactattttgaagatggtggtgagctgcaaaatagctggatggatttgaatgattgggatgatacatcattgaactgcactttatataaccaaagcttagcagtttgttagataagagtctatgtatgtctctggttaggatgaagttaattttatgtttttaacatggtatttttgaaggagctaatgaaacactggacatataattggtttaaacataaggggaattaagtctttgtagtctgtcatttttttaagtggatcctcttggatgcgttattttctcatcagctggctctgatcatgaatttgttgtaattttatgttgtactcagtgcatttaagaaatggtagagtattttaatcctattacttgactaagagtgtgaaggtagtactttttagagtgcactgagtgcactttacatctttatttaaatttttttttaacatcttatgtttacaggcttcctgtttgatgaagatagcaacggaaaactcaaaatggtggcagttcttattaccagttgttagtattgtttctggaaactgcttgccaagacaacatttattaactgttagaacacttgctttatgtttgtgtgtacatattttccacaaatgttataatttatatagtgtggttgaacaggatgcaatcttttgttgtctaaaggtgctgcagttaaaaaaaaaacaaccttttctttcaatatggcatgtagtggagtttttttaactttaaaaacatcaaaaattgttaaaatcattgtgttatctagtagtttataattatcggcttatatttccccatgaatgatcagaactgacatttaattcatgtttgtctcgccatgcttctttactttaacatatttcttttgcagaatgtaaaaggtaatgataattagtttatataagtgtactggctgtaaatgatgctaaatatactttatgcaattaagggcttacagaacatgttgaaactttttttacttttattgggaataaggaatgtttgcacctccacattttattgcttctggatgtgaaatcatgtaattatttctgctgttatataaagtgccatacttttaataaaggaaaatgtacatatgaaatcat

SEQ ID NO: 179604 - DNA, 15134 bp, Artificial Sequence
  derived and/or modified sequence
ctgctcctcggccgccgcggcttcctctagcgtttcctcctcggcgcgggctgctgcgtacgggactgcgccatgcggatcccgccctcccggcccgcgcggggcctgtggacgcggtagggccggccgtgatcgggcgccggcgtcaggggcgggcgctaggggcgcctgccgcgccgcgatgtgggagaggtgggtcccggtgaccgtgctccccggctgcgtgggctgcaggaccgtcgcggcgctggcgtcctggaccgtgcgcgatgtgaaggaacgtatcttcgcggagactggcttcccggtgtcggagcagcggctgtggcgcggcggccgcgaggtcgatttggtcagacaacgccaccacttgttgattttctcaaggacattttgagaagatatccagaaggaggacagattcttaaggaattaattcagaatgcagaagatgctggggcgacagaagttaaatttttatatgatgaaactcaatacggaacagagactctttggtcaaaagatatggcgccatatcaggggccagctctctatgtgtacaacaacgcggttttcaccccagaggactggcacggcattcaagaaatagcaagaagcaggaaaaaggatgatcctctgaaggtcggaagatttggaattgggtttaattctgtctatcatataacagatgttccttgtatctttagtggtgaccaaatcgggatgctagatcctcatcaaacactttttggcccacatgaatcaggccaatgttggaatctcaaagatgacagcaaagaaattagtgaactttcagaccagtttgcaccatttgttggcatttttggaagcaccaaggaaacatttataaacggcaattttccaggaacatttttccgtttccctcttcgcctacaaccttcacaacttagtagtaacctctacaataagcagaaggttcttgagttgtttgagtcttttagggcagatgcagacacagtgctgctctttctgaaaagtgtgcaggatgtttccttatatgtccgagaggctgacggaacagagaaactggtgtttagagtgacttcgagtgagagtaaggcactgaaacatgagcggccgaattctataaagattctgggaactgctataagtaactattgtaaaaagactccaagcaataacatcacctgtgtaacatatcacgtaaatattgttttagaagaggagagtactaaggatgcacagaaaacatcttggttggtgtgtaacagtgtgggtgggcgagggatcagtagtaagcttgactctttagctgatgaactgaaatttgtcccaatcattggaatagccatgcctttatcaagcagagatgatgaagcaaaaggagcaacgtctgatttctcaggaaaagcattttgtttccttcctttaccacctggtgaggaaagcagcacaggcctcccagttcacatcagtgggttctttggccttactgataaccgcaggagcataaaatggagagagctggaccagtggagagacccggcagccttatggaatgagtttcttgtcatgaatgttgtccccaaagcttatgctactctgatcttagattcaataaaacgtctggagatggaaaagagctctgatttccccttgtcagttgatgttatctataagctttggccggaggcgagcaaagtcaaggtgcactggcaaccggtgttagagcctctattcagcgagctgttgcagaatgcagtgatttattcaattagctgtgactgggtcaggttggagcaggtgtacttctcagaacttgatgaaaatttagaatacacaaaaactgtgctcaactacctccagagctcagggaagcagattgccaaggtaccagggaatgtggatgctgctgttcagctcacagctgcctctggcacaacacctgtgaggaaggtgacgcccgcgtgggtgcggcaggtgctgcggaagtgtgcacacctgggctgtgctgaagaaaagcttcaccttctagaatttgtgctttctgaccaagcctacagtgagctgcttgggctggagctgctccctttacaaaatggcaattttgtccccttctcctcatctgtatcagaccaagatgtcatttatattacctcagcagaatatccaaggtcccttttcccaagtcttgaaggaagatttattttggataacttgaaacctcaccttgtggctgctttaaaggaagctgcccaaacccgaggaagaccatgtactcagctgcagcttctaaatccagaacgatttgcacgtcttatcaaggaagtaatgaatacattctggcctggcagagaattgattgttcaatggtatccatttgatgaaaacagaaatcacccatctgtttcatggcttaagatggtttggaaaaatctttatatacatttttcagaggatttgactttatttgatgagatgccacttatccccagaactatactagaggaaggtcagacatgtgtggaactcattagactcaggattccatcgttagtcattttagacgatgaatctgaagcacagcttccagaatttttagcagacattgtacaaaaacttggagggtttgtccttaaaaaattagatgcatctatacaacatccgcttattaaaaaatatattcattcaccattaccaagtgctgttttgcagataatggagaagatgccattgcagaaattgtgtaatcaaataacttcgctacttccaacacacaaagatgccctgaggaagttcttggctagtttaaccgatagcagtgagaaagagaaaagaattattcaagaattggcaatattcaagcgcattaaccattcttctgatcagggaatttcctcttatacaaaattgaaaggttgtaaagtcttacaccatactgccaaactcccagcagatctgcgactttctatttcagtaatagacagtagtgatgaagctactattcgtctggcaaacatgttgaaaatagaacagttaaagaccactagctgcttaaagcttgttttaaaagatattgaaaatgcattttattcacatgaagaggtaacacagcttatgttatgggtccttgagaatctatcttctcttaaaaatgagaatccaaatgtgcttgagtggttaacaccattaaaattcatccagatatcacaggaacagatggtatcagctggtgaactctttgaccctgatatagaagtactaaaggatctcttttgtaatgaagaaggaacctatttcccaccctcagtttttacctcaccagatattcttcactccttaagacagattggtttaaaaaacgaagccagtctcaaagaaaaggatgttgtgcaagtggcaaaaaaaattgaagccttacaggtcggtgcttgtcctgatcaagatgttcttctgaagaaagccaaaaccctcttactggttttaaataagaatcacacactgttgcaatcatctgaaggaaagatgacattgaagaaaataaaatgggttccagcctgcaaggaaaggcctccaaattatccaggctctttggtctggaaaggagatctctgtaatctctgtgcaccaccagatatgtgtgatgtaggccatgcaattctcattggctcctcacttcctcttgttgaaagtatccatgtaaacctggaaaaagcattagggatcttcacaaaacctagccttagtgctgtcttaaaacactttaaaattgttgttgattggtattcttcaaaaacctttagtgatgaagactactatcaattccagcatattttgcttgagatttacggattcatgcatgatcatctaaatgaagggaaagattcttttagagccttaaaatttccatgggtttggactggcaaaaagttttgtccacttgcccaggctgtgattaaaccaatccatgatcttgaccttcagccttatttgcataatgtacctaaaaccatggcaaaattccaccaactatttaaggtctgtggttcaatagaggagttgacatcagatcatatttccatggttattcagaagatatatctcaaaagtgaccaagatctcagtgaacaagaaagcaaacaaaatcttcatcttatgttgaatattatcagatggctgtatagcaatcagattccagcaagccccaacacaccagttcctatacatcatagcaaaaatccttctaaacttatcatgaagccaattcacgaatgctgttattgtgacattaaagttgatgaccttaatgacttacttgaagattctgtggaaccaatcattttggtgcatgaggacatacccatgaaaactgcagaatggctaaaagttccatgccttagtacaagactgataaatcctgaaaacatgggatttgagcagtcaggacaaagagagccacttactgtaagaattaaaaatattctggaagaatacccttcagtgtcagatatttttaaagaactacttcaaaacgctgatgatgcaaatgcaacagaatgcagtttcttgattgatatgagaagaaatatggacataagagagaatctcctagacccagggatggcagcttgtcatggacctgctttgtggtcattcaacaattctcaattctcagattcagattttgtgaacataactaggttaggagaatctttaaaaaggggagaagttgacaaagttggaaaatttggtcttggatttaattctgtgtaccatatcactgacattcccatcattatgagtcgggaattcatgataatgttcgatccaaacataaatcatatcagtaaacacattaaagacaaatccaatcctgggatcaaaattaattggagtaaacaacagaaaagacttagaaaatttcctaatcagttcaaaccatttatagatgtatttggctgtcagttacctttgactgtagaagcaccttacagctataatggaacccttttccgactgtcctttagaactcaacaggaagcaaaagtgagtgaagttagtagtacgtgctacaatacagcagatatttattctcttgtggatgaatttagtctctgtggacacaggcttatcattttcactcagagtgtaaagtcaatgtatttgaagtacttgaaaattgaggaaaccaaccccagtttagcacaagatacagtaataattaaaaaaaaatcctgctcttccaaagcattgaacacacctgtcttaagtgttttaaaagaggctgctaagctcatgaagacttgcagcagcagtaataaaaagcttcccagtgatgaaccaaagtcatcttgcattcttcagatcacagtggaagaatttcaccatgtgttcagaaggattgctgatttacagtcgccactttttagaggtccagatgatgacccagctgctctctttgaaatggctaagtctggccaatcaaaaaagccatcagatgagttgtcacagaaaacagtagagtgtaccacgtggcttctgtgtacttgcatggacacaggagaggctctgaagttttccctgagtgagagtggaagaagactaggactggttccatgtggggcagtaggagttcagctgtcagaaatccaggaccagaagtggacagtgaaaccacacattggagaggtgttttgctatttacctttacgaataaaaacaggcttgccagttcatatcaatgggtgctttgctgttacatcaaataggaaagaaatctggaaaacagatacaaaaggacgatggaataccacgttcatgagacatgttattgtgaaagcttacttacaggtactgagtgtcttacgggacctggccactagtggggagctaatggattatacttactatgcagtatggcccgatcctgatttagttcatgatgatttttctgtaatttgccaaggattttatgaagatatagctcatggaaaagggaaagaactgaccaaagtcttctctgatggatctacttgggtttccatgaagaacgtaagatttctagatgactctatacttaaaagaagagatgttggttcagcagccttcaagatatttttgaaatacctcaagaagactgggtccaaaaacctttgtgctgttgaacttccttcttcggtaaaattaggatttgaagaagctggctgcaaacagatactacttgaaaacacattttcagagaaacagtttttttctgaagtgttttttccaaatattcaagaaattgaagcagaacttagagatcctttaatgatctttgttctaaatgaaaaagttgatgagttctcgggagttcttcgtgttactccatgtattccttgttccttggaggggcatcctttggttttgccatcaagattgatccaccccgaaggacgagttgcaaagttatttgatattaaagatgggagattcccttatggttctactcaggattatctcaatcctattattttgattaaactagttcagttaggtatggcaaaagatgatattttatgggatgatatgctagaacgtgcagtgtcagtagctgaaattaataaaagtgatcatgttgctgcatgcctaagaagtagtatcttattgagtcttatcgatgagaaactaaaaataagggatcctagagcaaaggattttgctgcaaaatatcaaacaatccgcttccttccatttctgacaaaaccagcaggtttttctttggactggaaaggcaacagttttaagcctgaaaccatgtttgcagcaactgacctttatacagctgaacatcaagatatagtttgtcttttgcaaccaattctaaatgaaaattcccattcttttagaggttgtggttcagtgtcattggctgttaaagagtttttgggattactcaagaagccaacagttgatctggttataaaccaattgaaagaagtagcaaaatcagttgatgatggaattacactgtaccaggagaatatcaccaatgcttgctacaaataccttcatgaagccttgatgcaaaatgaaatcactaagatgtcaattattgataagttaaaaccctttagcttcattctagttgagaatgcatatgttgactcagaaaaggtttcttttcatttaaattttgaggcggcaccatacctttatcagttgcctaataagtataaaaataatttccgcgaactttttgaaaccgtgggtgtgaggcagtcatgcactgttgaagattttgctcttgttttggaatctattgatcaagaaagaggaacaaagcaaataacagaagagaattttcagctttgccgacgaataatcagtgaaggaatatggagtctcattagagaaaagaaacaagaattttgtgagaaaaattatggcaagatattattgccagatactaatcttatgcttctccctgctaaatcgttatgctacaatgattgcccttggataaaagtaaaggataccactgtaaaatattgtcatgctgacatacccagggaagtagcagtaaaactaggagcagtcccaaagcgacacaaagccttagaaagatatgcatccaatgtctgttttacaacacttggcacagaatttgggcagaaagaaaaattgaccagcagaattaagagcatccttaatgcatatccttctgaaaaggaaatgttgaaagagcttcttcaaaatgctgatgatgcaaaggcgacagaaatctgttttgtgtttgatcctagacagcatccagttgatagaatatttgatgataagtgggccccattgcaagggccagcactttgtgtgtacaacaaccagccatttacagaagatgatgttagaggaattcagaatcttggaaaaggcacgaaagagggaaatccttataaaactggacagtatggaataggattcaattctgtgtatcatatcacagactgcccatcttttatttctggcaatgacatcctgtgtatttttgatcctcatgccagatatgcaccaggggccacatccattagtcccggacgcatgtttagagatttggatgcagattttaggacacagttctcagatgttctggatctttatctgggaacccattttaaactggataattgcacaatgttcagatttcctcttcgtaatgcagaaatggcaaaagtttcggaaatttcgtctgttccagcatcagacagaatggtccagaatcttttggacaaactgcgctcagatggggcagaacttctaatgtttcttaatcacatggaaaaaatttctatttgtgaaatagataagagtactggagctctaaatgtgctgtattcagtaaagggcaaaatcacagatggagacagattgaaaaggaaacaatttcatgcatctgtaattgatagtgttactaaaaagaggcagctcaaagacataccagttcaacaaataacctatactatggatactgaggactctgaaggaaatcttactacgtggctaatttgtaatagatcaggcttttcaagtatggagaaagtatctaaaagtgtcatatcagctcacaagaaccaagatattactcttttcccacgtggtggagtagctgcctgcattactcacaactataaaaaaccccatagggccttctgttttttgcctctttctttggagactgggctgccatttcatgtgaatggccactttgcactggattcagccagaaggaacctgtggcgtgatgataatggagttggtgttcgaagtgactggaataacagtttaatgacagcattaatagctcctgcatatgttgaattgctaatacagttaaaaaaacggtatttccctggttctgatccaacattatcagtgttacagaacacccctattcatgttgtaaaggacactttaaagaagtttttatcgtttttcccagttaaccgtcttgatctacagccagatttatattgtctagtgaaagcactttacaattgcattcacgaagacatgaaacgtcttttacctgttgtgcgggctccaaatattgatggctctgacttgcactctgcagttataattacttggatcaatatgtctacttctaataaaactagaccattttttgacaatttactacaggatgaattacaacaccttaaaaatgcagattataatatcaccacacgcaaaacagtagcagagaatgtctataggctgaaacatctccttttagaaattggtttcaacttggtttataactgtgatgaaactgctaatctttaccactgtcttatagatgcagatattcctgttagttatgtgacccctgctgatatcagatcttttttaatgacattttcctctcctgacactaattgccatattgggaagctgccttgtcgtctgcagcagactaatctaaaactttttcatagtttaaaacttttagttgattattgttttaaagatgcagaagaaaatgagattgaagttgagggattgccccttctcatcacactggacagtgttttgcaaacttttgatgcaaaacgacccaagtttctaacaacatatcatgaattgattccatcccgcaaagacttgtttatgaatacattatatttgaaatatagtaatattttattgaactgtaaagttgcaaaagtgtttgacatttccagctttgctgatttgttatcctctgtgttgcctcgagaatataagaccaaaagttgcacaaagtggaaagacaattttgcaagtgagtcttggcttaagaatgcatggcattttattagtgaatctgtaagtgtgaaagaagatcaggaagaaacaaaaccaacatttgacattgttgttgatactctaaaagactgggcattgcttccaggaacaaagtttactgtttcagccaaccagcttgtggttcctgaaggagatgttctgcttcctctcagccttatgcacattgcagtttttccaaatgcccagagtgataaagtttttcatgctctaatgaaagctggctgtattcagcttgctttgaacaaaatctgttccaaagacagtgcatttgttcctttgttgtcatgtcacacagcaaatatagagagccccacaagcatcttgaaggctctacattatatggtccaaacttcaacatttagagcagaaaaattagtagaaaatgattttgaggcacttttgatgtatttcaactgcaatttgaatcatttgatgtcccaagatgatataaaaattctaaagtcacttccgtgctataaatccatcagtggccgctatgtaagcattggaaaatttggaacatgctacgtacttacaaaaagtatcccttcagctgaagtggagaaatggacacagtcatcatcatctgcatttcttgaagaaaaaatacacttaaaagaactatatgaggtgattggttgtgtacctgtagatgatcttgaggtatatttgaaacacctcttaccaaaaattgaaaatctctcttatgatgcaaaattagagcacttgatctaccttaagaatagattatcaagtgctgaggaattatcagagattaaggaacaactttttgaaaaactggaaagtttattgataatccatgatgctaacagtagactaaagcaagcaaagcatttctatgatagaactgtgagagtttttgaagttatgcttcctgaaaaattgtttattcctaatgatttctttaagaaattggaacaacttataaaacccaaaaatcatgttacatttatgacatcctgggtggaattcttaagaaatattggactaaaatacatactttctcagcagcagttgttacagtttgctaaggaaatcagtgtgagggctaatacagaaaactggtccaaagaaacattgcaaaatacagttgatatccttctgcatcatatattccaagaacgaatggatttgttatctggaaattttctgaaagaactatctttaataccattcttatgtcctgagcgggcccccgcggaattcattagatttcatcctcaatatcaagaggtaaatggaacacttcctcttataaagttcaatggagcacaggtaaatccaaaattcaagcaatgtgatgtactccagctgttatggacatcctgccctattcttccagagaaagctacacccttaagcattaaagaacaagaaggtagtgaccttggtccacaagaacagcttgaacaagttttaaatatgcttaatgttaacctggatcctcctcttgataaggtaatcaataactgcagaaacatatgcaacataacgacgttggatgaagaaatggtaaaaactagagcaaaagtcttaaggagcatatatgaattcctcagtgcagaaaaaagggaatttcgttttcagttgcgaggggttgcttttgtgatggtagaagatggttggaaacttctgaagcctgaggaggtagtcataaacctagaatatgaatctgattttaaaccttatttgtacaagctacctttagaacttggcacatttcaccagttgttcaaacacttaggtactgaagatattatttcaactaagcaatatgttgaagtgttgagccgcatatttaaaaattctgagggcaaacaattagatcctaatgaaatgcgtacagttaagagagtagtttctggtctgttcaggagtctacagaatgattcagtcaaggtgaggagtgatctcgagaatgtacgagaccttgcgctttacctcccaagccaggatggtagattggtaaagtcaagcatcttagtgtttgacgatgcgccacattataaaagtagaatccaggggaatattggtgtgcaaatgttagttgatctcagccagtgctacttagggaaagaccatggatttcacactaagttgataatgctctttcctcaaaaacttagacctcgattattgagcagtatacttgaagaacaattagatgaagagactcccaaagtttgtcagtttggagcgttgtgttctcttcaaggaagattgcagttactcttgtcttctgaacagttcattacaggactgattagaattatgaagcatgaaaatgataatgcttttctggccaatgaagaaaaagccataagactttgcaaagccctaagagaaggattgaaagtatcctgctttgaaaagcttcaaacaacattaagagttaaaggttttaatcctattccccacagcagaagtgaaacttttgcttttttgaagcgatttggtaatgcagtcatcttgctctacattcaacattcagacagtaaagacattaatttcctgttagcattggcaatgactcttaaatcagcaactgacaatttgatttctgacacttcatatttaattgctatgctaggatgcaatgatatttacaggattggtgagaaacttgacagtttaggagtgaaatatgactcttcggagccatcaaaactggaacttccaatgcctggcacaccaattcctgctgaaattcattacactctgcttatggacccaatgaatgttttttacccgggagaatatgttgggtaccttgttgatgctgaaggtggtgatatctatggatcataccagccaacatacacatatgcaattattgtacaagaagttgaaagagaagatgctgacaattctagttttctaggaaagatatatcagatagatattggttatagtgaatataaaatagttagctctcttgatctgtataagttttcaagacctgaggaaagctctcaaagcagggacagtgctccttctacaccaaccagccccactgagttcctcacccctggcctgagaagcattcctcctcttttctctggtagagagagccacaagacttcttccaaacatcagtcccccaaaaagcttaaggttaattctttaccagaaatcttaaaagaagtgacatctgtggtggagcaagcatggaagcttccagaatcggaacgaaaaaagattattaggcggttgtatttgaaatggcatcctgacaaaaatccagagaaccatgacattgccaatgaagtttttaaacatttgcagaatgaaatcaacagattagaaaaacaggcttttctagatcaaaatgcagacagggcctccagacgaacattttcaacctcagcatcccgatttcagtcagacaaatactcatttcagagattctatacttcatggaatcaagaagcaacgagccataaatctgaaagacagcaacagaacaaagaaaaatgccccccttcagccggacagacttactctcaaaggttctttgttcctcccactttcaagtcggttggcaatccagtggaagcacgcagatggctaagacaagccagagcaaacttctcagctgccaggaatgaccttcataaaaatgccaatgagtgggtgtgctttaaatgttacctttctaccaagttagctttgattgcagctgactatgctgtgaggggaaagtctgataaagatgtaaaaccaactgcacttgctcagaaaatagaggaatatagtcagcaacttgaaggactgacaaatgatgttcacacattggaagcttatggtgtagacagtttaaaaacaagataccctgatttgcttccctttcctcagatcccaaatgacaggttcacttctgaggttgctatgagggtgatggaatgtactgcctgtatcataataaaacttgaaaattttatgcaacaaaaagtgtgaagatatttaacgaaaaaaaaggtagatcttgaatgtgttgtagcacgaataaattgctgtacttcattaagcttcattgccaattagctaggaattgttaagcacattgcagattgttcttggagaattctggagttgttatgaacatgaataccaacggaaaaccttaactgaatctaaaagaaaactattttgaagatggtggtgagctgcaaaatagctggatggatttgaatgattgggatgatacatcattgaactgcactttatataaccaaagcttagcagtttgttagataagagtctatgtatgtctctggttaggatgaagttaattttatgtttttaacatggtatttttgaaggagctaatgaaacactggacatataattggtttaaacataaggggaattaagtctttgtagtctgtcatttttttaagtggatcctcttggatgcgttattttctcatcagctggctctgatcatgaatttgttgtaattttatgttgtactcagtgcatttaagaaatggtagagtattttaatcctattacttgactaagagtgtgaaggtagtactttttagagtgcactgagtgcactttacatctttatttaaatttttttttaacatcttatgtttacaggcttcctgtttgatgaagatagcaacggaaaactcaaaatggtggcagttcttattaccagttgttagtattgtttctggaaactgcttgccaagacaacatttattaactgttagaacacttgctttatgtttgtgtgtacatattttccacaaatgttataatttatatagtgtggttgaacaggatgcaatcttttgttgtctaaaggtgctgcagttaaaaaaaaaacaaccttttctttcaatatggcatgtagtggagtttttttaactttaaaaacatcaaaaattgttaaaatcattgtgttatctagtagtttataattatcggcttatatttccccatgaatgatcagaactgacatttaattcatgtttgtctcgccatgcttctttactttaacatatttcttttgcagaatgtaaaaggtaatgataattagtttatataagtgtactggctgtaaatgatgctaaatatactttatgcaattaagggcttacagaacatgttgaaactttttttacttttattgggaataaggaatgtttgcacctccacattttattgcttctggatgtgaaatcatgtaattatttctgctgttatataaagtgccatacttttaataaaggaaaatgtacatatgaaatcat

SEQ ID NO: 179605 - protein, 408 aa, Artificial Sequence
  derived and/or modified sequence
MSKRDIVLTNVTVVQLLRQPCPVTRAPPPPEPKAEVEPQPQPEPTPVREEIKPPPPPLPPHPATPPPKMVSVARELTVGINGFGRIGRLVLRACMEKGVKVVAVNDPFIDPEYMVYMFKYDSTHGRYKGSVEFRNGQLVVDNHEISVYQCKEPKQIPWRAVGSPYVVESTGVYLSIQAASDHISAGAQRVVISAPSPDAPMFVMGVNENDYNPGSMNIVSNASCTTNCLAPLAKVIHERFGIVEGLMTTVHSYTATQKTVDGPSRKAWRDGRGAHQNIIPASTGAAKAVTKVIPELKGKLTGMAFRVPTPDVSVVDLTCRLAQPAPYSAIKEAVKAAAKGPMAGILAYTEDEVVSTDFLGDTHSSIFDAKAGIALNDNFVKLISWYDNEYGYSHRVVDLLRYMFSRDK

SEQ ID NO: 179606 - DNA, 1227 bp, Artificial Sequence
  derived and/or modified sequence
atgagcaagagagacatcgtgctgaccaacgtgaccgtggtgcagctgctgagacagccctgccccgtgaccagagccccccccccccccgagcccaaggccgaggtggagccccagccccagcccgagcccacccccgtgagagaggagatcaagcccccccccccccccctgcccccccaccccgccacccccccccccaagatggtgagcgtggccagagagctgaccgtgggcatcaacggcttcggcagaatcggcagactggtgctgagagcctgcatggagaagggcgtgaaggtggtggccgtgaacgaccccttcatcgaccccgagtacatggtgtacatgttcaagtacgacagcacccacggcagatacaagggcagcgtggagttcagaaacggccagctggtggtggacaaccacgagatcagcgtgtaccagtgcaaggagcccaagcagatcccctggagagccgtgggcagcccctacgtggtggagagcaccggcgtgtacctgagcatccaggccgccagcgaccacatcagcgccggcgcccagagagtggtgatcagcgcccccagccccgacgcccccatgttcgtgatgggcgtgaacgagaacgactacaaccccggcagcatgaacatcgtgagcaacgccagctgcaccaccaactgcctggcccccctggccaaggtgatccacgagagattcggcatcgtggagggcctgatgaccaccgtgcacagctacaccgccacccagaagaccgtggacggccccagcagaaaggcctggagagacggcagaggcgcccaccagaacatcatccccgccagcaccggcgccgccaaggccgtgaccaaggtgatccccgagctgaagggcaagctgaccggcatggccttcagagtgcccacccccgacgtgagcgtggtggacctgacctgcagactggcccagcccgccccctacagcgccatcaaggaggccgtgaaggccgccgccaagggccccatggccggcatcctggcctacaccgaggacgaggtggtgagcaccgacttcctgggcgacacccacagcagcatcttcgacgccaaggccggcatcgccctgaacgacaacttcgtgaagctgatcagctggtacgacaacgagtacggctacagccacagagtggtggacctgctgagatacatgttcagcagagacaagtag

SEQ ID NO: 179607 - DNA, 1227 bp, Artificial Sequence
  derived and/or modified sequence
atgtccaagagggacattgtcctcaccaacgtgacagtggtgcaacttctgcggcagccctgcccagttacgagggcccctccacctcccgagccaaaagccgaagtggagccgcagcctcagccagaacctacccccgtccgcgaagagataaaacctcctccaccccctctgccgccacacccagccactccacctcctaagatggtatcagttgctcgggagcttaccgtaggaattaacgggttcgggcgcattggcagattagttctgagggcttgcatggagaaaggcgtcaaagtggttgcagtcaacgaccctttcattgatcccgaatacatggtgtacatgtttaagtatgacagcactcacggtcgctataagggatcagtggagtttagaaacgggcagctcgtggtggacaatcatgaaatcagtgtttatcaatgcaaagagccaaagcagatcccatggcgcgctgtggggtctccatacgttgtggagagtactggtgtctatttgtcaattcaggctgcttctgatcacatcagcgctggcgctcagcgggtggtgatctccgcgccctctcccgatgccccaatgtttgtgatgggggtgaacgaaaacgattataatccaggctctatgaacatcgtgagtaatgctagttgtaccacaaactgcctggctccattggcaaaagtgatccacgagagatttggtatcgtcgagggacttatgacgacagtgcactcctatacagcaacacagaaaaccgtcgacggcccatctcgtaaggcctggagagatggcaggggcgcccaccagaatatcattcccgccagcaccggggccgccaaggccgtcaccaaagtgataccagaattaaagggaaagctgaccggaatggcctttagggtccctacacctgacgtttctgtggttgacctaacgtgcaggctggcacagcccgctccgtactcagccattaaggaggccgttaaggcggccgcaaagggcccaatggcggggatcttagcctacacggaagacgaggtggtctcgacagatttccttggcgatacccattccagtatcttcgatgctaaggccggcattgcactaaatgataattttgtcaagttgatctcgtggtacgacaatgagtacgggtacagtcaccgcgtcgtcgacctcctcaggtacatgttctcacgcgataagtag

SEQ ID NO: 179608 - DNA, 1227 bp, Artificial Sequence
  derived and/or modified sequence
atgagcaagagggacatcgtgctgaccaacgtgacagtggtgcagctgctgcggcagccctgccctgtgacccgggcccctcctcctcctgagcccaaggccgaggtggagccccagccccagcctgagcccacccctgtgcgggaggagatcaagcccccacctccacccctgcccccccacccagccaccccaccacccaagatggtgtctgtggcccgggagctgactgtgggcatcaatggatttggccgcatcggccgcctggtgctgcgggcctgcatggagaagggcgtgaaggtggtggccgtgaatgaccccttcattgatcctgagtacatggtgtacatgttcaagtatgacagcacccacggccgctacaagggctctgtggagttcagaaatggccagctggtggtggacaaccacgagatctctgtgtaccagtgcaaggagcccaagcagatcccctggagggctgtgggcagcccctacgtggtggagagcactggagtgtacctgagcatccaggccgccagtgaccacatctctgctggggcccagagggtggtgatcagcgcccccagcccagatgcccccatgtttgtgatgggcgtgaatgaaaatgactacaaccctggctccatgaacatcgtgtccaatgccagctgcaccaccaactgcctggcccccctggccaaggtgattcatgagcgcttcggcatcgtggagggcctgatgaccaccgtgcacagctacacagccacccagaagacagtggatggccccagcaggaaggcctggagagatggccgcggggcccaccagaacatcatcccagccagcactggagctgccaaggctgtgaccaaggtgattcctgagctgaagggcaagctgaccggcatggccttccgggtgcccaccccagatgtgtctgtggtggacctgacctgccgcctggcccagcctgccccctacagcgccatcaaggaggccgtgaaggctgctgccaagggccccatggccggcatcctggcctacacagaagatgaggtggtgtccacagacttcctgggggacacccacagcagcatctttgatgccaaggccggcatcgccctgaatgacaactttgtgaagctgatctcctggtatgacaatgaatatggctacagccaccgggtggtggacctgctgcgctacatgttcagccgggacaagtag

SEQ ID NO: 179609 - DNA, 1227 bp, Artificial Sequence
  derived and/or modified sequence
atgagcaagcgggacatcgtgctgaccaacgtgaccgtggtgcagctgttacgtcaaccttgtcccgtgacacgggcccctcctccccctgagcctaaggctgaggtggaaccgcagcctcagccggaacctaccccagtgagagaggagattaagccccccccacctccacttccccctcaccccgctacacccccgccgaagatggtgtccgtggcaagggagctgaccgtgggaattaatggatttggaaggatagggcgactagtgctgagggcctgcatggagaaaggcgtcaaagtcgtggcagtaaatgacccattcatcgatcctgaatacatggtctatatgttcaaatacgacagcacacacgggcgttataaggggagtgtggaatttcggaatggtcagctggtcgtggacaaccatgagatctctgtataccaatgcaaagaaccaaaacaaatcccttggcgggctgtggggagcccttatgtcgtggaatctaccggcgtctatctgtccatccaagccgctagcgaccacatcagcgccggagcccagagggtggtgatctcagcccccagcccggacgcgccgatgttcgtcatgggcgttaacgagaatgattataaccccggcagcatgaacatcgtgagcaatgcctcttgcactactaattgtctggccccattggccaaagtgattcatgaacgttttggaatcgttgaggggctgatgactactgtgcacagttatacagctacgcagaagaccgtcgacggcccctctagaaaagcctggagagatggcagaggcgcgcaccagaatattatccctgcctctactggcgccgctaaggccgttacgaaggtgatcccagaactgaaggggaagttaaccgggatggcgtttagagtacccacacccgatgtatcagtggtcgatctaacatgccgactggctcagccagctccatactccgcaatcaaggaggccgttaaggccgcagctaagggtcccatggccgggatcctggcttacaccgaagacgaggtggtaagcacagattttctgggcgacacgcactcttcaattttcgatgcaaaagctggcatcgctctcaacgataatttcgtgaagctgatcagctggtatgataatgaatatggttacagccacagggtcgtggacctgctgaggtatatgttcagcagggacaaatag

SEQ ID NO: 179610 - DNA, 1227 bp, Artificial Sequence
  derived and/or modified sequence
atgagcaaaagagatattgtcctgacaaatgtgaccgtggtacaacttcttcgacagccatgcccagtgacccgggcacccccacccccagaacctaaagccgaagtggaaccccagcctcagcccgaacccacacctgtccgggaagaaatcaaaccacccccaccacccttgcccccacaccctgcgacgcccccaccgaagatggtgagtgtggcccgagagttgacagtgggtataaacgggtttggcaggatcggcaggctcgtactcagggcatgcatggaaaagggtgtcaaagtggtcgccgtgaacgatccctttatcgacccagagtacatggtctatatgttcaagtacgactcaacccatggacgctacaaggggtcagtggaattcaggaacgggcaactggtggtggacaatcatgaaatcagcgtctatcagtgcaaggagcccaaacagataccatggagagcagtgggaagcccgtacgtggttgaatctaccggcgtgtacttatctatccaggctgcctccgaccatatctctgccggagctcagcgggtcgtgatttccgctcccagtcccgatgcgcctatgttcgtgatgggagtgaatgagaatgactacaaccccggatcaatgaacatcgtgtctaacgcaagttgtactaccaattgtttagcccctctagcaaaggtgatccatgaaaggtttggcatcgtagaggggctgatgacaacagttcacagctacacagctacacagaagactgtggacggacccagcaggaaagcttggcgagatggaagaggggcacaccagaatatcatcccagctagcactggtgccgcaaaggcagtaacgaaggtcattcccgagttaaaagggaaactgaccgggatggcattccgagtcccaacacctgacgtttcggtagtcgatctcacatgtcgtctggctcaaccagcaccctatagtgccatcaaagaggccgtaaaggccgctgcgaaaggtcctatggccggaattttggcttacacagaagatgaggtggtgtccactgattttcttggtgacacacatagctcaattttcgatgctaaggccggaatcgccttgaacgacaatttcgttaagttaatttcgtggtatgacaacgagtacggttactcccaccgggtggtcgatcttctgcgatatatgttcagcagagataagtag

SEQ ID NO: 179611 - DNA, 1492 bp, Artificial Sequence
  derived and/or modified sequence
gtcactgggtgctgtgacatcagggcaattagcccaggacccacagccctggcgctccgcacgcacctcggtaacatcacagcaggtccaggccaatgataaccttataagaggccatgtcgaagcgcgacatcgtcctcaccaatgtcaccgttgtccagttgctgcgacagccgtgcccggtgaccagagcaccgcccccacctgagcctaaggctgaagtagagccccagccacaaccagagcccacaccagtcagggaggaaataaagccaccaccgccaccactgcctcctcaccccgctactcctcctcctaagatggtgtctgtggcccgggagctgactgtgggcatcaatggatttggacgcatcggtcgcctggtcctgcgcgcctgcatggagaagggtgttaaggtggtggctgtgaatgatccattcattgacccggaatacatggtgtacatgtttaagtatgactccacccacggccgatacaagggaagtgtggaattcaggaatggacaactggtcgtggacaaccatgagatctctgtctaccagtgcaaagagcccaaacagatcccctggagggctgtcgggagcccctacgtggtggagtccacaggcgtgtacctctccatacaggcagcttcggaccacatctctgcaggtgctcaacgtgtggtcatctccgcgccctcaccggatgcaccaatgttcgtcatgggtgtcaatgaaaatgactataaccctggctccatgaacattgtgagcaacgcgtcctgcaccaccaactgtttggctcccctcgccaaagtcatccacgagcgatttgggatcgtggaagggttgatgaccacagtccattcctacacggccacccagaagacagtggacgggccatcaaggaaggcctggcgagatgggcggggtgcccaccagaacatcatcccagcctccactggggctgcgaaagctgtgaccaaagtcatcccagagctcaaagggaagctgacagggatggcgttccgggtaccaaccccggatgtgtctgtcgtggacctgacctgccgcctcgcccagcctgccccctactcagccatcaaggaggctgtaaaagcagcagccaaggggcccatggctggcatccttgcctacaccgaggatgaggtcgtctctacggacttcctcggtgatacccactcgtccatcttcgatgctaaggccggcattgcgctcaatgacaatttcgtgaagctcatttcatggtacgacaacgaatatggctacagtcaccgggtggtcgacctcctccgctacatgttcagccgagacaagtgaaacgggaaggtcctttctttccttcccaggggccggggccggaacatgtgcctcccgttccagcatctggctgcccgggggaggaaggacacccggggcgggcgccccacgccgatgggtccatggtgaaataaaaaacagtgctcacg

SEQ ID NO: 179612 - protein, 196 aa, Artificial Sequence
  derived and/or modified sequence
MADGQMPFSCHYPSRLRRDPFRDSPLSSRLLDDGFGMDPFPDDLTASWPDWALPRLSSAWPGTLRSGMVPRGPTATARFGVPAEGRTPPPFPGEPWKVCVNVHSFKPEELMVKTKDGYVEVSGKHEEKQQEGGIVSKNFTKKIQLPAEVDPVTVFASLSPEGLLIIEAPQVPPYSTFGESSFNNELPQDSQEVTCT

SEQ ID NO: 179613 - DNA, 591 bp, Artificial Sequence
  derived and/or modified sequence
atggctgacggacagatgcctttctcctgccactatccatcaagactgcgtcgggatcccttccgggacagtccactgagtagtcgactattggacgatggctttggtatggatccattcccagatgatcttaccgcatcatggccagactgggccctgccaaggctgagtagtgcatggccaggaaccctgagaagtggaatggttcctagagggcccacggccaccgcacgcttcggggtgccagccgaagggagaactcccccaccatttcccggggagccttggaaagtgtgcgtcaacgtgcatagctttaaaccagaggagcttatggtcaaaacaaaagacgggtatgtggaagttagcggcaaacatgaagagaaacagcaggagggcgggatcgtgtccaaaaatttcacaaagaaaatccaacttcctgctgaggtggaccccgtgactgtgtttgccagcttatctcccgaaggcttgctcattatcgaagcgccccaggtacccccttactccacttttggagagagcagtttcaacaatgaacttcctcaggactcccaggaggttacgtgcacatag

SEQ ID NO: 179614 - DNA, 2150 bp, Artificial Sequence
  derived and/or modified sequence
attaatagccaggccttagtgccccgctcggggagggcggctccagctcctggagcaagaggagggcggagctgagcggagtggccaggggaggagagagtgtccggagaggccggctgaacttggacgcggcccctcccagctccccccacagcccagctgttccctccgcggattctccggggctggttcatcacctccgaatattcctgtgacaggagacgcttgcaaaacccgcctccagcctccagcagcaaataaatagaaggcttgcagcccagaaggagccagaagaagtttctaggcgcgcgtgccctgggtttattaagctcctggctccgctctagacctcagcggttctggctgccagcctgggcagcctgggaagcctgggaggacggtggcttgccggtctgtcgtgaggcagtgcggacggggaccctctgggattctgctggatctgccccgggggttacctttgggggctgggaccccagtcgaggggacacaaccgtccctggcagtggttggttctgcttctccctgcagaaaagcagcattttcggaagctgaagaataagctagcccagccacaccaccttgttgtgtgaccttgggcaggtggttctgtctctctgagcctctgtttctctctgagctgagcagccaccatggctgacggtcagatgcccttctcctgccactacccaagccgcctgcgccgagaccccttccgggactctcccctctcctctcgcctgctggatgatggctttggcatggaccccttcccagacgacttgacagcctcttggcccgactgggctctgcctcgtctctcctccgcctggccaggcaccctaaggtcgggcatggtgccccggggccccactgccaccgccaggtttggggtgcctgccgagggcaggacccccccacccttccctggggagccctggaaagtgtgtgtgaatgtgcacagcttcaagccagaggagttgatggtgaagaccaaagatggatacgtggaggtgtctggcaaacatgaagagaaacagcaagaaggtggcattgtttctaagaacttcacaaagaaaatccagcttcctgcagaggtggatcctgtgacagtatttgcctcactttccccagagggtctgctgatcatcgaagctccccaggtccctccttactcaacatttggagagagcagtttcaacaacgagcttccccaggacagccaggaagtcacctgtacctgagatgccagtactggcccatccttgttttgtccccaaccctagggcttctctgattccaggatacattactttagctgaactcagatttagtgcaagtaaaatgttagagggtgcgggggtgaggactgaccacagattccctggatagtgtagtggtagatttctccacaggatagcgcaattggcaaatcatgcttggttgtgttaggccaaaatactagttttgctttctttaccttttctatcttgatgaaaatgttgcacattctatagttgcaaaacacataaaaggggacttaacatttcacgttgtatcttacttgcagtgaatgcaagggttacttttctctggggacctcccccatcacccaggttcctactctgggctcccgattcccatggctcccaaaccatgccgcatggtttggttaatgaaacccagtagctaaccccactgtgcttccacatgcctggcctaaaatgggtgatatacaggtcttatatccccatatggaatttatccatcaaccacataaaaacaaacagtgccttctgccctctgcccagatgtgtccagcacgttctcaaagtttccacattagcactccctaaggacgctgggagcctgtcagtttatgatctgacctaggtcccccctttcttctgtcccctgtgtttaagtcgggatttttacagagggagctgtctccagacagctccatcaggaaccaagcaaaggccagatagcctgacagataggctagtggtattgtgtatatgggcgggacgtgtgtgtcattattatttgagttatgctgttgtttaggggtaaataacagtaaataattaataataataataataataataaaggagctgacgttctta

SEQ ID NO: 179615 - DNA, 591 bp, Artificial Sequence
  derived and/or modified sequence
atggctgatggccagatgcccttcagctgccactaccccagccggctgcggcgggaccccttccgggacagccccctgagcagccggctgctggatgatggcttcggcatggaccccttcccagatgacctgacagcctcctggccagactgggccctgccccggctgagcagcgcctggccaggcaccctgcggagcggcatggtgccccggggccccacagccacagccaggtttggagtgcctgctgagggccgcaccccaccacccttccctggagagccctggaaggtgtgtgtgaatgtgcacagcttcaagccagaggagctgatggtgaagaccaaggatggctacgtggaggtgtctgggaagcatgaggagaagcagcaggagggcggcatcgtgtccaagaacttcaccaagaagatccagctgcctgctgaggtggaccctgtgacagtgtttgccagcctgagccctgagggcctgctgatcatcgaggccccccaggtgcccccctacagcacctttggagagagcagcttcaacaatgagctgccccaggacagccaggaggtgacctgcacctag

SEQ ID NO: 179616 - DNA, 591 bp, Artificial Sequence
  derived and/or modified sequence
atggccgacggccagatgcccttcagctgccactaccccagccggctgagacgcgatccatttcgggatagtccactgagcagtcgactgctcgatgacggatttggcatggatccgtttcccgacgacttaaccgcctcgtggccggactgggccctgcctcgtttgagcagtgcttggccggggacattgcggtctgggatggtgccacgtggtccgactgcgacagctcggttcggggtgcctgcagaaggccggacccctccaccttttccaggagagccatggaaagtgtgtgtgaatgtgcactcatttaaacctgaggagttgatggtgaaaactaaagacggatacgtagaggtgtccggaaagcacgaggagaaacagcaggaaggcggcatcgtgtccaaaaactttactaaaaagatccagctgccagcagaggtggatcccgttacagtctttgccagtctgtcaccagaagggttgctgatcatcgaggcaccccaggtcccaccctacagtacgtttggtgagagctcttttaataatgagttgcctcaggattcacaggaggtaacatgtacttag

SEQ ID NO: 179617 - DNA, 591 bp, Artificial Sequence
  derived and/or modified sequence
atggcagatggccaaatgccattctcttgccactaccccagcagactgcgtcgagatccattcagagatagccccttgagttctcggctcttggacgatgggttcggaatggatccgttcccagacgacctcacagccagctggcccgattgggctctgccacggctgtcttcagcttggcctgggaccctgcggtcaggaatggttcctagggggcctacagctaccgccaggttcggggtgccggcagaaggcagaacccctccacccttcccgggagagccatggaaggtctgtgtaaatgttcactcatttaagcctgaagaacttatggtcaaaaccaaagacggttacgtcgaggtctcaggcaaacacgaagaaaagcagcaggaggggggaattgtgagcaagaattttacaaagaaaattcagttgccagcagaggttgaccccgtcacagtgttcgcatctctgagccctgagggattgctgatcattgaagcacctcaagttcctccatactctacttttggtgagagcagctttaataatgaattaccacaggatagtcaggaagtcacttgcacatag

SEQ ID NO: 179618 - DNA, 591 bp, Artificial Sequence
  derived and/or modified sequence
atggccgacggccagatgcccttcagctgccactaccccagcagactgagaagagaccccttcagagacagccccctgagcagcagactgctggacgacggcttcggcatggaccccttccccgacgacctgaccgccagctggcccgactgggccctgcccagactgagcagcgcctggcccggcaccctgagaagcggcatggtgcccagaggccccaccgccaccgccagattcggcgtgcccgccgagggcagaacccccccccccttccccggcgagccctggaaggtgtgcgtgaacgtgcacagcttcaagcccgaggagctgatggtgaagaccaaggacggctacgtggaggtgagcggcaagcacgaggagaagcagcaggagggcggcatcgtgagcaagaacttcaccaagaagatccagctgcccgccgaggtggaccccgtgaccgtgttcgccagcctgagccccgagggcctgctgatcatcgaggccccccaggtgcccccctacagcaccttcggcgagagcagcttcaacaacgagctgccccaggacagccaggaggtgacctgcacctag

SEQ ID NO: 179619 - protein, 537 aa, Artificial Sequence
  derived and/or modified sequence
MTCHKRYKIQKKVREHHRKLRKEAKKRGHKKPRKDPGVPNSAPFKEALLREAELRKQRLEELKQQQKLDRQKELEKKRKLETNPDIKPSNVEPMEKEFGLCKTENKAKSGKQNSKKLYCQELKKVIEASDVVLEVLDARDPLGCRCPQVEEAIVQSGQKKLVLILNKSDLVPKENLESWLNYLKKELPTVVFRASTKPKDKGKITKRVKAKKNAAPFRSEVCFGKEGLWKLLGGFQETCSKAIRVGVIGFPNVGKSSIINSLKQEQMCNVGVSMGLTRSMQVVPLDKQITIIDSPSFIVSPLNSSSALALRSPASIEVVKPMEAASAILSQADARQVVLKYTVPGYRNSLEFFTVLAQRRGMHQKGGIPNVEGAAKLLWSEWTGASLAYYCHPPTSWTPPPYFNESIVVDMKSGFNLEELEKNNAQSIRAIKGPHLANSILFQSSGLTNGIIEEKDIHEELPKRKERKQEEREDDKDSDQETVDEEVDENSSGMFAAEETGEALSEETTAGEQSTRSFILDKIIEEDDAYDFSTDYV

SEQ ID NO: 179620 - protein, 549 aa, Artificial Sequence
  derived and/or modified sequence
MKRPKLKKASKRMTCHKRYKIQKKVREHHRKLRKEAKKRGHKKPRKDPGVPNSAPFKEALLREAELRKQRLEELKQQQKLDRQKELEKKRKLETNPDIKPSNVEPMEKEFGLCKTENKAKSGKQNSKKLYCQELKKVIEASDVVLEVLDARDPLGCRCPQVEEAIVQSGQKKLVLILNKSDLVPKENLESWLNYLKKELPTVVFRASTKPKDKGKITKRVKAKKNAAPFRSEVCFGKEGLWKLLGGFQETCSKAIRVGVIGFPNVGKSSIINSLKQEQMCNVGVSMGLTRSMQVVPLDKQITIIDSPSFIVSPLNSSSALALRSPASIEVVKPMEAASAILSQADARQVVLKYTVPGYRNSLEFFTVLAQRRGMHQKGGIPNVEGAAKLLWSEWTGASLAYYCHPPTSWTPPPYFNESIVVDMKSGFNLEELEKNNAQSIRAIKGPHLANSILFQSSGLTNGIIEEKDIHEELPKRKERKQEEREDDKDSDQETVDEEVDENSSGMFAAEETGEALSEETTAGEQSTRSFILDKIIEEDDAYDFSTDYV

SEQ ID NO: 179621 - protein, 138 aa, Artificial Sequence
  derived and/or modified sequence
MKRPKLKKASKRMTCHKRYKIQKKVREHHRKLRKEAKKRGHKKPRKDPGVPNSAPFKEALLREAELRKQRLEELKQQQKLDRQKELEKKRKLETNPDIKPSNVEPMEKEFGLCKTENKAKSGKQNSKKLYCQELKKVS

SEQ ID NO: 179622 - DNA, 1650 bp, Artificial Sequence
  derived and/or modified sequence
atgaaacggcccaagcttaagaaagcttctaaaagaatgacatgtcacaaacgctacaaaatccagaaaaaagttcgcgaacatcaccggaagctgagaaaggaagccaagaaacgcggacacaagaagcccagaaaggatccaggagtgccaaattcagcaccttttaaggaagctttactacgtgaagcagaattgcgcaagcagcgactcgaggaactgaaacagcagcagaaattggatcgacaaaaggaactggagaagaagcgcaaactggaaactaacccagacattaaaccctctaatgtggagcccatggaaaaagagttcggtctctgtaagacggaaaacaaggcaaagagcggaaaacaaaatagtaagaagctctactgccaggagctgaagaaggtgatcgaggctagcgacgtggtgctcgaagtattagatgcccgtgacccgctgggctgtcgttgcccacaggtggaggaagccattgtccagtcaggccagaagaagctcgttttaatcctgaataagtccgatctcgttcctaaggagaatctcgagtcgtggctcaactatttaaagaaagaactgcctaccgtcgtctttagggcctctacgaaacctaaagataaggggaagatcacaaagagagtgaaagcgaaaaagaacgcagctccgtttagaagcgaggtctgcttcgggaaggagggcctgtggaaattgctcggggggttccaggagacctgtagcaaagctattcgggtgggcgtcatcggatttcccaatgtcggcaaatcttctatcattaattctctcaagcaagagcagatgtgcaacgttggggtgtctatgggactgaccagatcaatgcaagttgtgccactggacaagcaaattaccataatcgacagcccctccttcatagttagtccccttaatagtagttctgccttagcactgcggagccctgcttccatcgaggtcgtgaagccaatggaggcggctagcgcgattctgagtcaggcagatgcacgacaagttgtgctcaagtacaccgtaccaggctataggaattcgcttgagttttttaccgtgctggcccaaagaagaggaatgcatcagaagggagggatccccaacgtggagggggccgctaagcttctttggtcagagtggactggcgcttcactggcttattactgccatcccccgactagctggacaccgccaccttacttcaatgagtctatcgtggttgatatgaagtcggggttcaatctcgaagaactcgagaaaaataatgcccagagcattcgcgctatcaagggaccccatctggcaaacagtatactgttccagagctccgggctgaccaacggcatcattgaagagaaagatatacacgaggagcttcctaaacggaaggagagaaagcaggaggagagagaagacgataaagacagtgaccaagaaaccgtagatgaagaggtagatgaaaactcttccggtatgttcgccgccgaggagacaggtgaagccttgagcgaggaaacaaccgcgggagaacagtctacgagatccttcattcttgataagattatagaggaggatgatgcctacgacttttccacagactatgtgtag

SEQ ID NO: 179623 - DNA, 417 bp, Artificial Sequence
  derived and/or modified sequence
atgaaaagacccaaactaaagaaagcgtctaaaaggatgacttgtcataaacgctataagatacaaaaaaaggtacgcgaacaccacagaaagctgaggaaagaggccaaaaagcgggggcacaaaaaaccgaggaaggatcccggcgttcccaatagcgccccttttaaggaggctcttctgagggaggccgaactcagaaagcaaagactggaggagctcaagcagcaacagaagctggaccggcaaaaagaattggagaaaaaacgaaaactcgaaaccaatcccgacatcaagccttcaaatgttgagcccatggaaaaggagttcggtctgtgtaaaaccgaaaataaggctaagtcgggtaaacagaacagcaagaagctatattgccaggaattaaagaaggtgagttag

SEQ ID NO: 179624 - DNA, 2041 bp, Artificial Sequence
  derived and/or modified sequence
gctcgtcagtggcttcagttcacacgtggcgccagcggaggcaggttgatgtgtttgtgcttccttctacagccaatatgaaaaggcctagtaagtggggtcgggaggcgggcgtggagggacccacgtctggaagttgctgcagccaccacgacgctcttctacggctacggctttgtctctgctgagttaaagaaagcaagtaaacgcatgacctgccataagcggtataaaatccaaaaaaaggttcgagaacatcatcgaaaattaagaaaggaggctaaaaagcggggtcacaagaagcctaggaaagacccaggagttccaaacagtgctccctttaaggaggctcttcttagggaagctgagctaaggaaacagaggcttgaagaactaaaacagcagcagaaacttgacaggcagaaggaactagaaaagaaaagaaaacttgaaactaatcctgatattaagccatcaaatgtggaacctatggaaaaggagtttgggctttgcaaaactgagaacaaagccaagtcgggcaaacagaattcaaagaagctgtactgccaagaacttaaaaaggtgattgaagcctccgatgttgtcctagaggtgttggatgccagagatcctcttggttgcagatgtcctcaggtagaagaggccattgtccagagtggacagaaaaagctggtacttatattaaataaatcagatctggtaccaaaggagaatttggagagctggctaaattatttgaagaaagaattgccaacagtggtgttcagagcctcaacaaaaccaaaggataaagggaagataaccaagcgtgtgaaggcaaagaagaatgctgctccattcagaagtgaagtctgctttgggaaagagggcctttggaaacttcttggaggttttcaggaaacttgcagcaaagccattcgggttggagtaattggtttcccaaatgtggggaaaagcagcattatcaatagcttaaaacaagaacagatgtgtaatgttggtgtatccatggggcttacaaggagcatgcaagttgtccccttggacaaacagatcacaatcatagatagtccgagcttcatcgtatctccacttaattcctcctctgcgcttgctctgcgaagtccagcaagtattgaagtagtaaaaccgatggaggctgccagtgccatcctttcccaggctgatgctcgacaggtagtactgaaatatactgtcccaggctacaggaattctctggaattttttactgtgcttgctcagagaagaggtatgcaccaaaaaggtggaatcccaaatgttgaaggtgctgccaaactgctgtggtctgagtggacaggtgcctcattagcttactattgccatccccctacatcttggactcctcctccatattttaatgagagtattgtggtagacatgaaaagcggcttcaatctggaagaactggaaaagaacaatgcacagagcataagagccatcaagggccctcatttggccaatagcatccttttccagtcttccggtctgacaaatggaataatagaagaaaaggacatacatgaagaattgccaaaacggaaagaaaggaagcaggaggagagggaggatgacaaagacagtgaccaggaaactgttgatgaagaagttgatgaaaacagctcaggcatgtttgctgcagaagagacaggggaggcactgtctgaggagactacagcaggtgaacagtctacaaggtcttttatcttggataaaatcattgaagaggatgatgcttatgacttcagtacagattatgtgtaacagaacaatggctttttatgattttttttttaacattttaagcagactgctaaactgttctctgtataagttatggtatgcatgagctgtgtaaattttgtgaatatgtattatattaaaaccaggcaacttggaatccctaaattctgtaaaaagacaattcatctcattgtgagtggaagtagttatctggaataaaaaaagaagatacctattg

SEQ ID NO: 179625 - DNA, 2040 bp, Artificial Sequence
  derived and/or modified sequence
gcggccgccaagcgatccctgctccgcgcgacactgcgtgcccgcgcacgcagagaggcggtgacgcactttacggcggcagcgtaagtgcgtgacgctcgtcagtggcttcagttcacacgtggcgccagcggaggcaggttgatgtgtttgtgcttccttctacagccaatatgaaaaggcctaagttaaagaaagcaagtaaacgcatgacctgccataagcggtataaaatccaaaaaaaggttcgagaacatcatcgaaaattaagaaaggaggctaaaaagcggggtcacaagaagcctaggaaagacccaggagttccaaacagtgctccctttaaggaggctcttcttagggaagctgagctaaggaaacagaggcttgaagaactaaaacagcagcagaaacttgacaggcagaaggaactagaaaagaaaagaaaacttgaaactaatcctgatattaagccatcaaatgtggaacctatggaaaaggagtttgggctttgcaaaactgagaacaaagccaagtcgggcaaacagaattcaaagaagctgtactgccaagaacttaaaaaggtgattgaagcctccgatgttgtcctagaggtgttggatgccagagatcctcttggttgcagatgtcctcaggtagaagaggccattgtccagagtggacagaaaaagctggtacttatattaaataaatcagatctggtaccaaaggagaatttggagagctggctaaattatttgaagaaagaattgccaacagtggtgttcagagcctcaacaaaaccaaaggataaagggaagataaccaagcgtgtgaaggcaaagaagaatgctgctccattcagaagtgaagtctgctttgggaaagagggcctttggaaacttcttggaggttttcaggaaacttgcagcaaagccattcgggttggagtaattggtttcccaaatgtggggaaaagcagcattatcaatagcttaaaacaagaacagatgtgtaatgttggtgtatccatggggcttacaaggagcatgcaagttgtccccttggacaaacagatcacaatcatagatagtccgagcttcatcgtatctccacttaattcctcctctgcgcttgctctgcgaagtccagcaagtattgaagtagtaaaaccgatggaggctgccagtgccatcctttcccaggctgatgctcgacaggtagtactgaaatatactgtcccaggctacaggaattctctggaattttttactgtgcttgctcagagaagaggtatgcaccaaaaaggtggaatcccaaatgttgaaggtgctgccaaactgctgtggtctgagtggacaggtgcctcattagcttactattgccatccccctacatcttggactcctcctccatattttaatgagagtattgtggtagacatgaaaagcggcttcaatctggaagaactggaaaagaacaatgcacagagcataagagccatcaagggccctcatttggccaatagcatccttttccagtcttccggtctgacaaatggaataatagaagaaaaggacatacatgaagaattgccaaaacggaaagaaaggaagcaggaggagagggaggatgacaaagacagtgaccaggaaactgttgatgaagaagttgatgaaaacagctcaggcatgtttgctgcagaagagacaggggaggcactgtctgaggagactacagcaggtgaacagtctacaaggtcttttatcttggataaaatcattgaagaggatgatgcttatgacttcagtacagattatgtgtaacagaacaatggctttttatgattttttttttaacattttaagcagactgctaaactgttctctgtataagttatggtatgcatgagctgtgtaaattttgtgaatatgtattatattaaaaccaggcaacttggaatccctaaattctgtaaaaagacaattcatctcattgtgagtggaagtagttatctggaataaaaaaagaagatacctattg

SEQ ID NO: 179626 - DNA, 567 bp, Artificial Sequence
  derived and/or modified sequence
gctcttctacggctacggctttgtctctgctggtatgggggtgggagcctacgcgtaggccttggccctatttcctggtagaaccgagagttggaagtccctacggcgatcatgttaaccgcgcgggctcattctgcggaacgaagccgggcagagggtggggaagactaggctagattttcgtaaggaagcagcgtctgagccaggtttgaggcccaatattttctttccgtggccacgtgcagactggcccagagttaaagaaagcaagtaaacgcatgacctgccataagcggtataaaatccaaaaaaaggttcgagaacatcatcgaaaattaagaaaggaggctaaaaagcggggtcacaagaagcctaggaaagacccaggagttccaaacagtgctccctttaaggaggctcttcttagggaagctgagctaaggaaacagaggcttgaagaactaaaacagcagcagaaacttgacaggcagaaggaactagaaaagaaaagaaaacttgaaactaatcctgatattaagccatcaaatgtggaacctatggaaaagg

SEQ ID NO: 179627 - DNA, 547 bp, Artificial Sequence
  derived and/or modified sequence
gacaccagcagctgaatgattagaacaggagaacactggttgccagcagtatggaaagaaaggttggggatctccaggaaacagaaagaaggagcaaaagaatcacatttgaaaatcctgagttaaagaaagcaagtaaacgcatgacctgccataagcggtataaaatccaaaaaaaggttcgagaacatcatcgaaaattaagaaaggaggctaaaaagcggggtcacaagaagcctaggaaagacccaggagttccaaacagtgctccctttaaggaggctcttcttagggaagctgagctaaggaaacagaggcttgaagaactaaaacagcagcagaaacttgacaggcagaaggaactagaaaagaaaagaaaacttgaaactaatcctgatattaagccatcaaatgtggaacctatggaaaaggagtttgggctttgcaaaactgagaacaaagccaagtcgggcaaacagaattcaaagaagctgtactgccaagaacttaaaaaggtgattgaagcctccgatgttgtcctagaggt

SEQ ID NO: 179628 - DNA, 729 bp, Artificial Sequence
  derived and/or modified sequence
agttcacacgtggcgccagcggaggcaggttgatgtgtttgtgcttccttctacagccaatatgaaaaggcctaagttaaagaaagcaagtaaacgcatgacctgccataagcggtataaaatccaaaaaaaggttcgagaacatcatcgaaaattaagaaaggaggctaaaaagcggggtcacaagaagcctaggaaagacccaggagttccaaacagtgctccctttaaggaggctcttcttagggaagctgagctaaggaaacagaggcttgaagaactaaaacagcagcagaaacttgacaggcagaaggaactagaaaagaaaagaaaacttgaaactaatcctgatattaagccatcaaatgtggaacctatggaaaaggagtttgggctttgcaaaactgagaacaaagccaagtcgggcaaacagaattcaaagaagctgtactgccaagaacttaaaaaggtatcttagcctaggtgattgaagcctccgatgttgtcctagaggtgttggatgccagagatcctcttggttgcagatgtcctcaggtagaagaggccattgtccagagtggacagaaaaagctggtacttatattaaataaatcagatctggtaccaaaggagaatttggagagctggctaaattatttgaagaaagaattgccaacagtggtgttcagagcctcaacaaaaccaaaggataaagggaagataaccaag

SEQ ID NO: 179629 - DNA, 1650 bp, Artificial Sequence
  derived and/or modified sequence
atgaagaggcccaagctgaagaaggccagcaagaggatgacctgccacaagcgctacaagatccagaagaaggtgcgggagcaccacaggaagctgaggaaggaggccaagaagaggggccacaagaagcccaggaaggaccccggggtgcccaacagcgcccccttcaaggaggccctgctgcgggaggccgagctgaggaagcagaggctggaggagctgaagcagcagcagaagctggaccggcagaaggagctggagaagaagaggaagctggagaccaacccagacatcaagcccagcaatgtggagcccatggagaaggagtttggcctgtgcaagacagagaacaaggccaagagcggcaagcagaacagcaagaagctgtactgccaggagctgaagaaggtgattgaggccagtgatgtggtgctggaggtgctggatgcccgggaccccctgggctgccgctgcccccaggtggaggaggccatcgtgcagagcggccagaagaagctggtgctgatcctgaacaagagtgacctggtgcccaaggagaacctggagagctggctgaactacctgaagaaggagctgcccaccgtggtgttccgggccagcaccaagcccaaggacaagggcaagatcaccaagagggtgaaggccaagaagaatgctgcccccttccgctctgaggtgtgcttcggcaaggagggcctgtggaagctgctgggcggcttccaggagacctgcagcaaggccatccgggtgggcgtcatcggcttccccaacgtgggcaagagcagcatcatcaacagcctgaagcaggagcagatgtgcaatgtgggcgtgtccatgggcctgaccaggtccatgcaggtggtgcccctggacaagcagatcaccatcatcgacagccccagcttcatcgtgagccccctgaacagcagcagcgccctggccctgcggagccctgccagcattgaggtggtgaagcccatggaggccgccagcgccatcctgagccaggctgatgcccggcaggtggtgctgaagtacacagtgcccggctacagaaacagcctggagttcttcaccgtgctggcccagaggcggggcatgcaccagaagggcggcatccccaacgtggagggcgccgccaagctgctgtggagcgagtggacaggagccagcctggcctactactgccacccccccacctcctggaccccaccaccctacttcaatgaaagcatcgtggtggacatgaagagcggcttcaacctggaggagctggagaagaacaatgcccagagcatccgggccatcaagggcccccacctggccaacagcatcctcttccagagcagcggcctgaccaacggcatcatcgaggagaaggacatccacgaggagctgcccaagaggaaggagaggaagcaggaggagagagaagatgacaaggacagcgaccaggagaccgtggatgaggaggtggatgagaacagcagcggcatgtttgctgctgaggagaccggggaggccctgtctgaggagaccacagctggggagcagagcaccaggagcttcatcctggacaagatcatcgaggaggatgatgcctatgacttcagcacagattatgtgtag

SEQ ID NO: 179630 - DNA, 417 bp, Artificial Sequence
  derived and/or modified sequence
atgaagaggcccaagctgaagaaggccagcaagaggatgacctgccacaagcgctacaagatccagaagaaggtgcgggagcaccacaggaagctgaggaaggaggccaagaagaggggccacaagaagcccaggaaggaccccggggtgcccaacagcgcccccttcaaggaggccctgctgcgggaggccgagctgaggaagcagaggctggaggagctgaagcagcagcagaagctggaccggcagaaggagctggagaagaagaggaagctggagaccaacccagacatcaagcccagcaatgtggagcccatggagaaggagtttggcctgtgcaagacagagaacaaggccaagagcggcaagcagaacagcaagaagctgtactgccaggagctgaagaaggtgtcctag

SEQ ID NO: 179631 - DNA, 1650 bp, Artificial Sequence
  derived and/or modified sequence
atgaagcggcccaagctgaagaaggccagcaagcggatgacctgccataagcgctataaaattcaaaaaaaagtccgcgaacaccaccggaaattgcggaaggaggcaaaaaagcgcggacataaaaaaccgaggaaagacccgggtgttccgaactctgcccccttcaaggaagccctcctccgcgaagctgaattaaggaaacagaggttagaggagctcaagcagcaacagaagctggaccggcaaaaagagctggagaagaagcgcaaattagagaccaaccctgatattaaaccttcaaacgtggagcctatggagaaggaatttggcctgtgcaaaacagagaacaaggcgaaatctggcaaacagaacagtaagaaactgtattgccaggagttaaagaaagtcatcgaagcctctgatgtggttctcgaggtgctggacgctcgcgatccactaggctgccgctgcccccaggtggaagaggctattgtgcagtccggacagaagaagctggtattaattttgaataaaagtgatctggtcccaaaggaaaacctggagagctggttaaattatctgaaaaaagaactgcccaccgtagtgtttagggccagcacgaagccaaaggataaggggaagattacaaagagagttaaggctaaaaaaaatgctgccccatttcgttcagaagtctgttttgggaaagagggcctctggaagttacttggtgggtttcaagagacttgcagcaaggccatcagggttggggtgattggctttcccaatgtgggcaaatcctcaattatcaatagtctgaaacaagagcagatgtgcaatgtgggagttagtatgggccttaccagaagcatgcaagtcgttcccctggataagcagatcaccattattgactcgccatcttttatagtgtctcccctcaacagctccagcgccctggccttacgcagcccagcgtctatagaggtcgtgaagccaatggaggctgcctctgctattctatcccaggccgatgcccggcaggtggtgttaaagtacaccgttccagggtataggaattctctggaattttttacggtgctggctcagagaaggggaatgcatcagaaaggaggaattcccaatgtggaaggagccgccaagctgctgtggtccgaatggacgggcgcgtccttagcctattactgtcacccacccacatcctggactcctccaccttactttaatgaaagcatagtggtggacatgaagtcagggtttaatctggaggagctagagaaaaacaacgcccagtcaatacgtgccattaaagggccccaccttgcaaattccatcttatttcaaagttctggcttgactaatggtatcatcgaagagaaggatatacacgaggaactgcccaagaggaaggaacgtaagcaagaggagcgagaggatgataaggactctgatcaagagaccgtggatgaagaggtggacgaaaattccagtggaatgtttgccgccgaggagaccggagaggccctgagcgaagaaaccacagctggagaacagtcgacacggtccttcatccttgacaagattattgaagaggatgacgcttatgactttagtaccgactatgtgtag

SEQ ID NO: 179632 - DNA, 417 bp, Artificial Sequence
  derived and/or modified sequence
atgaagcggcccaagctgaagaaggccagcaagcggatgacctgccacaaacgatacaaaatccagaaaaaagttagagagcatcataggaagctcagaaaggaagcaaaaaaacgtggacacaaaaaaccacgaaaggacccaggcgttccaaattctgccccgttcaaagaggcactacttcgagaagcagagctccgcaaacaacggcttgaagaacttaagcagcagcaaaaacttgataggcaaaaagaactggagaagaaaaggaagcttgagaccaaccctgacataaagccatctaacgtggaacccatggaaaaagagtttgggttatgtaagaccgagaacaaagctaagtcagggaagcaaaatagcaagaagctttactgtcaagagttgaagaaggtgtcttag

SEQ ID NO: 179633 - DNA, 1650 bp, Artificial Sequence
  derived and/or modified sequence
atgaagagaccaaagctgaagaaagcatctaaaagaatgacctgtcataagagatataagatacagaagaaagttcgcgaacatcaccggaagctgcgcaaagaggccaaaaaacgtgggcacaagaagcctagaaaggaccctggtgtgccaaacagcgccccatttaaggaggctctgctgcgcgaagctgaactgcgcaagcagcgcctggaggagctcaaacagcaacagaaactcgaccggcaaaaggagctcgagaagaagagaaagctggaaactaatcccgatattaaaccttcaaatgtggagcccatggaaaaggaatttggcctgtgtaagacagagaataaagcaaaaagcggtaaacagaactccaagaagttgtattgtcaggagctcaaaaaggtgattgaggcgtccgacgttgtgctagaggtcctggacgccagagatccgttaggttgcagatgcccccaggtggaagaggcaattgtccagtcaggccagaagaaactggtgctcatcttgaataaatcagacttggtacctaaggagaacctcgagtcatggctgaattacctgaagaaggagcttccgactgtagtgttccgagcctccacaaaaccgaaagacaagggcaaaataacgaaaagagtcaaggctaagaaaaatgcagcaccctttcgctcagaggtgtgtttcggtaaagaaggtctgtggaagttactgggtggcttccaggaaacatgctccaaagccatccgcgttggcgtcattgggttccctaatgtgggcaaatcctcaattatcaatagccttaagcaggaacaaatgtgcaacgtgggagtcagtatggggctcacccgcagcatgcaagtggtacctcttgataagcagatcactatcatcgattcccctagttttattgtgtctcctttaaattcctccagcgctctggctctgcgatcccctgctagtatcgaggtggtgaagccaatggaggctgcatcagccatactctcgcaggctgacgccagacaggttgtactgaagtacaccgtccccggttaccgtaatagcctggaattttttacggtgctggcccagagaagaggaatgcatcagaaaggcggaatcccaaatgtcgagggggctgctaagttgctgtggtcagagtggactggggctagcctagcctactactgccacccccctactagctggactcccccaccgtatttcaatgagagcatcgttgtggatatgaagtctggattcaacctcgaggagcttgagaagaataacgctcagagtatcagggccatcaaaggtccacacttagccaactccatcttgttccagtcctctgggctgacaaatggaattattgaagagaaggatattcacgaagagcttccaaaaagaaaagaacgcaagcaagaagagagagaggacgacaaggatagtgatcaggagaccgttgacgaggaagttgacgaaaatagttcagggatgtttgcagctgaggagacgggtgaagccctgtcagaagagaccacagcaggagagcaaagtactaggtcttttattctggataagattatcgaggaagacgacgcctatgacttttcaacagattatgtgtag

SEQ ID NO: 179634 - DNA, 417 bp, Artificial Sequence
  derived and/or modified sequence
atgaagaggccgaagcttaagaaggcatccaaaagaatgacctgccataaacgatataagatacagaaaaaggtgcgcgagcatcaccgcaagcttcggaaagaagccaagaaaagggggcataagaaaccacgaaaggaccctggtgtccccaactctgcaccttttaaggaggctctcctgcgcgaggctgaactacggaaacagcggctggaagagctgaaacagcagcagaagctagacagacagaaagaactcgagaaaaagaggaaactggaaaccaatcccgacataaagccatccaacgtggaacccatggaaaaggagtttgggttatgtaagaccgagaataaagctaaatccgggaaacagaatagcaaaaagctctactgccaggagctgaagaaagtctcatag

SEQ ID NO: 179635 - DNA, 1650 bp, Artificial Sequence
  derived and/or modified sequence
atgaagagacccaagctgaagaaggccagcaagagaatgacctgccacaagagatacaagatccagaagaaggtgagagagcaccacagaaagctgagaaaggaggccaagaagagaggccacaagaagcccagaaaggaccccggcgtgcccaacagcgcccccttcaaggaggccctgctgagagaggccgagctgagaaagcagagactggaggagctgaagcagcagcagaagctggacagacagaaggagctggagaagaagagaaagctggagaccaaccccgacatcaagcccagcaacgtggagcccatggagaaggagttcggcctgtgcaagaccgagaacaaggccaagagcggcaagcagaacagcaagaagctgtactgccaggagctgaagaaggtgatcgaggccagcgacgtggtgctggaggtgctggacgccagagaccccctgggctgcagatgcccccaggtggaggaggccatcgtgcagagcggccagaagaagctggtgctgatcctgaacaagagcgacctggtgcccaaggagaacctggagagctggctgaactacctgaagaaggagctgcccaccgtggtgttcagagccagcaccaagcccaaggacaagggcaagatcaccaagagagtgaaggccaagaagaacgccgcccccttcagaagcgaggtgtgcttcggcaaggagggcctgtggaagctgctgggcggcttccaggagacctgcagcaaggccatcagagtgggcgtgatcggcttccccaacgtgggcaagagcagcatcatcaacagcctgaagcaggagcagatgtgcaacgtgggcgtgagcatgggcctgaccagaagcatgcaggtggtgcccctggacaagcagatcaccatcatcgacagccccagcttcatcgtgagccccctgaacagcagcagcgccctggccctgagaagccccgccagcatcgaggtggtgaagcccatggaggccgccagcgccatcctgagccaggccgacgccagacaggtggtgctgaagtacaccgtgcccggctacagaaacagcctggagttcttcaccgtgctggcccagagaagaggcatgcaccagaagggcggcatccccaacgtggagggcgccgccaagctgctgtggagcgagtggaccggcgccagcctggcctactactgccacccccccaccagctggaccccccccccctacttcaacgagagcatcgtggtggacatgaagagcggcttcaacctggaggagctggagaagaacaacgcccagagcatcagagccatcaagggcccccacctggccaacagcatcctgttccagagcagcggcctgaccaacggcatcatcgaggagaaggacatccacgaggagctgcccaagagaaaggagagaaagcaggaggagagagaggacgacaaggacagcgaccaggagaccgtggacgaggaggtggacgagaacagcagcggcatgttcgccgccgaggagaccggcgaggccctgagcgaggagaccaccgccggcgagcagagcaccagaagcttcatcctggacaagatcatcgaggaggacgacgcctacgacttcagcaccgactacgtgtag

SEQ ID NO: 179636 - DNA, 417 bp, Artificial Sequence
  derived and/or modified sequence
atgaagagacccaagctgaagaaggccagcaagagaatgacctgccacaagagatacaagatccagaagaaggtgagagagcaccacagaaagctgagaaaggaggccaagaagagaggccacaagaagcccagaaaggaccccggcgtgcccaacagcgcccccttcaaggaggccctgctgagagaggccgagctgagaaagcagagactggaggagctgaagcagcagcagaagctggacagacagaaggagctggagaagaagagaaagctggagaccaaccccgacatcaagcccagcaacgtggagcccatggagaaggagttcggcctgtgcaagaccgagaacaaggccaagagcggcaagcagaacagcaagaagctgtactgccaggagctgaagaaggtgagctag

SEQ ID NO: 179637 - protein, 392 aa, Artificial Sequence
  derived and/or modified sequence
MYWKHENAAPALPEGCRLPAEGGPATDQVMAQPGSGCKATTRCLEGTAPPAMAQSDAEALAGALDKDEGQASPCTPSTPSVCSPPSAASSVPSAGKNICSSCGLEILDRYLLKVNNLIWHVRCLECSVCRTSLRQQNSCYIKNKEIFCKMDYFSRFGTKCARCGRQIYASDWVRRARGNAYHLACFACFSCKRQLSTGEEFGLVEEKVLCRIHYDTMIENLKRAAENGNGLTLEGAVPSEQDSQPKPAKRARTSFTAEQLQVMQAQFAQDNNPDAQTLQKLADMTGLSRRVIQVWFQNCRARHKKHTPQHPVPPSGAPPSRLPSALSDDIHYTPFSSPERARMVTLHGYIESQVQCGQVHCRLPYTAPPVHLKADMDGPLSNRGEKVILFQY

SEQ ID NO: 179638 - DNA, 3377 bp, Artificial Sequence
  derived and/or modified sequence
atgtactggaagcatgagaacgccgccccggcgttgcccgagggctgccggctgccggccgagggcggccccgccaccgaccaggtgatggcccagccagggtccggctgcaaagcgaccacccgctgtcttgaagggaccgcgccgcccgccatggctcagtctgacgccgaggccctggcaggagctctggacaaggacgagggtcaggcctccccatgtacgcccagcacgccatctgtctgctcaccgccctctgccgcctcctccgtgccgtctgcaggcaagaacatctgctccagctgcggcctcgagatcctggaccgatatctgctcaaggtcaacaacctcatctggcacgtgcggtgcctcgagtgctccgtgtgtcgcacgtcgctgaggcagcagaacagctgctacatcaagaacaaggagatcttctgcaagatggactacttcagccgattcgggaccaagtgtgcccggtgcggccgacagatctacgccagcgactgggtgcggagagctcgcggcaacgcctaccacctggcctgcttcgcctgcttctcgtgcaagcgccagctgtccactggtgaggagttcggcctggtcgaggagaaggtgctctgccgcatccactacgacaccatgattgagaacctcaagagggccgccgagaacgggaacggcctcacgttggagggggcagtgccctcggaacaggacagtcaacccaagccggccaagcgcgcgcggacgtccttcaccgcggaacagctgcaggttatgcaggcgcagttcgcgcaggacaacaaccccgacgctcagacgctgcagaagctggcggacatgacgggcctcagccggagagtcatccaggtgtggtttcaaaactgccgggcgcgtcataaaaagcacacgccgcaacacccagtgccgccctcgggggcgcccccgtcccgccttccctccgccctgtccgacgacatccactacaccccgttcagcagccccgagcgggcgcgcatggtcaccctgcacggctacattgagagtcaggtacagtgcgggcaggtgcactgccggctgccttacaccgcaccccccgtccacctcaaagccgatatggatgggccgctctccaaccggggtgagaaggtcatcctttttcagtactaacgctgccggcacttccgcatctgcccgtgggcgccccacagctgcccctcagccgctgagatccagtgtccaagctgcggccaggagtccacccacctccgcatccacccccgtccgccatcctgcccaccaccaggtcggttcccgaggcctggcctttccctctcctgctgagaaccagaacccaccaggagcaccacagagtcctcctcttggaaggcagaactccctgaaatctggaatcagggtggaaacagcctgtttttcccatttaaacaggagtcctcttcaacttcagctgattacaataacaaaaggcggaattgaattgtgcgatgccaacggccttctcatttacaggtttttttcccccacattggcctttatttactacttccttggaaccatctctgaattctgaatagctgacaacccccaatgttatccactctgttgcttttgtctggaaaactctacagtgtttgtgggatgtccccaaaggaaagctatgttctaattttatcatttccatctgtctggttatgtcaagttaattcagaaagagaagagacagtgaccaaccctgagaggcctaatagggcagagatggaggcctgcccagactaggaggcagcggggatagacagggaatggggagaagaaagacccccattggtttggaaatcaaggagagggcggtgacatattggaccagaagaggcactagccattttaaggagaggaaagagaaaactctggggtcagggagagaccctacccccacctaattatccagcatatatgtaagaaacatagcagcgatggtattcgatctgtgccatgactcttctgaatgtttggacaggttagagttggggacccctgttggccacttgttgacctctcatagtggtgcttgggccaggtcttctcaatggaaggggaatcccttataggggagagggaacagagcccagtgaaatggcagtcagaatgttaaccctggatccatctctaagtagagagagggtgcccattgcctaggtgagtgtgccaagctcaggattccaactggtgcctctgagcttcccaatcaatacttcctggagccagccccacccacccctgagaacagaggtcagacacagctgcgtaacatccatcctgctacaactcttccaccccaaacaaaagggctcaggctacacacgaccatgatttatgttttcaggggatgcccatttgtcccaagcttatcctgtaattctagaattacctggtgtcctgatgcattttccactagaggttgctaatcagcatgttttagcccaagtccgccttcctgctgtggttaacctgttatgttgcttttggaaggagactctaagacagggaaagcaagttcatggtacatacgcagccattgtctctgtttttacccatggcagacattgctaatcaatggcagctctatttcactgagtctggataaggtttcagagttcaaatgcttgacgttggcacttaacatgaaagcctataggtcattcttgctctgggatctacaggcagggtaggcacaggtgcagcctaagaagggaacctgcttcctctcccttccaaagacagtgacagctgactgagggcaaagagcaggcaccactcagaacgtggtgagtacagctcagctcagcactcagtcagtggtaacttgtgcccagccctgtgctaggcgctgacattaacaggagcaaccagggcccaattcctggccttggagctcaaatctttcctttgatttttgctcctgatcatcaaggccccagtggcaaccatgtggtaagtggccaaccaagccctacccagggtcacccaacacactctgccttgagcctctcctcagggtctattccttgcgtggattatgtggccgtagcatgttacagttcaaacatgtctccactaccctgttaagagcagcctgggaacgtacaggccatcaagactatttatttaaatacaaaaaaaggggaaaacacacacacggaaaaaaaattgtaagcactttttttgtaaaaccaatgtctgttttgttacatacctttcatgtcgtgctttgtaaatgtcttatttgtgtaataaagttaatgcaagtagaagtgctggcactgaaatccagaaaaaaaaaaaaaaaaaaa

SEQ ID NO: 179639 - DNA, 3384 bp, Artificial Sequence
  derived and/or modified sequence
gttcggcgccggtttatataacaggcgcggggaggcgctgggctcaggctgtgcggagccagttcagcagccgccgccgcctgcgttccctccccccctcccccaggtgatggcccagccagggtccggctgcaaagcgaccacccgctgtcttgaagggaccgcgccgcccgccatggctcagtctgacgccgaggccctggcaggagctctggacaaggacgagggtcaggcctccccatgtacgcccagcacgccatctgtctgctcaccgccctctgccgcctcctccgtgccgtctgcaggcaagaacatctgctccagctgcggcctcgagatcctggaccgatatctgctcaaggtcaacaacctcatctggcacgtgcggtgcctcgagtgctccgtgtgtcgcacgtcgctgaggcagcagaacagctgctacatcaagaacaaggagatcttctgcaagatggactacttcagccgattcgggaccaagtgtgcccggtgcggccgacagatctacgccagcgactgggtgcggagagctcgcggcaacgcctaccacctggcctgcttcgcctgcttctcgtgcaagcgccagctgtccactggtgaggagttcggcctggtcgaggagaaggtgctctgccgcatccactacgacaccatgattgagaacctcaagagggccgccgagaacgggaacggcctcacgttggagggggcagtgccctcggaacaggacagtcaacccaagccggccaagcgcgcgcggacgtccttcaccgcggaacagctgcaggttatgcaggcgcagttcgcgcaggacaacaaccccgacgctcagacgctgcagaagctggcggacatgacgggcctcagccggagagtcatccaggtgtggtttcaaaactgccgggcgcgtcataaaaagcacacgccgcaacacccagtgccgccctcgggggcgcccccgtcccgccttccctccgccctgtccgacgacatccactacaccccgttcagcagccccgagcgggcgcgcatggtcaccctgcacggctacattgagagtcaggtacagtgcgggcaggtgcactgccggctgccttacaccgcaccccccgtccacctcaaagccgatatggatgggccgctctccaaccggggtgagaaggtcatcctttttcagtactaacgctgccggcacttccgcatctgcccgtgggcgccccacagctgcccctcagccgctgagatccagtgtccaagctgcggccaggagtccacccacctccgcatccacccccgtccgccatcctgcccaccaccaggtcggttcccgaggcctggcctttccctctcctgctgagaaccagaacccaccaggagcaccacagagtcctcctcttggaaggcagaactccctgaaatctggaatcagggtggaaacagcctgtttttcccatttaaacaggagtcctcttcaacttcagctgattacaataacaaaaggcggaattgaattgtgcgatgccaacggccttctcatttacaggtttttttcccccacattggcctttatttactacttccttggaaccatctctgaattctgaatagctgacaacccccaatgttatccactctgttgcttttgtctggaaaactctacagtgtttgtgggatgtccccaaaggaaagctatgttctaattttatcatttccatctgtctggttatgtcaagttaattcagaaagagaagagacagtgaccaaccctgagaggcctaatagggcagagatggaggcctgcccagactaggaggcagcggggatagacagggaatggggagaagaaagacccccattggtttggaaatcaaggagagggcggtgacatattggaccagaagaggcactagccattttaaggagaggaaagagaaaactctggggtcagggagagaccctacccccacctaattatccagcatatatgtaagaaacatagcagcgatggtattcgatctgtgccatgactcttctgaatgtttggacaggttagagttggggacccctgttggccacttgttgacctctcatagtggtgcttgggccaggtcttctcaatggaaggggaatcccttataggggagagggaacagagcccagtgaaatggcagtcagaatgttaaccctggatccatctctaagtagagagagggtgcccattgcctaggtgagtgtgccaagctcaggattccaactggtgcctctgagcttcccaatcaatacttcctggagccagccccacccacccctgagaacagaggtcagacacagctgcgtaacatccatcctgctacaactcttccaccccaaacaaaagggctcaggctacacacgaccatgatttatgttttcaggggatgcccatttgtcccaagcttatcctgtaattctagaattacctggtgtcctgatgcattttccactagaggttgctaatcagcatgttttagcccaagtccgccttcctgctgtggttaacctgttatgttgcttttggaaggagactctaagacagggaaagcaagttcatggtacatacgcagccattgtctctgtttttacccatggcagacattgctaatcaatggcagctctatttcactgagtctggataaggtttcagagttcaaatgcttgacgttggcacttaacatgaaagcctataggtcattcttgctctgggatctacaggcagggtaggcacaggtgcagcctaagaagggaacctgcttcctctcccttccaaagacagtgacagctgactgagggcaaagagcaggcaccactcagaacgtggtgagtacagctcagctcagcactcagtcagtggtaacttgtgcccagccctgtgctaggcgctgacattaacaggagcaaccagggcccaattcctggccttggagctcaaatctttcctttgatttttgctcctgatcatcaaggccccagtggcaaccatgtggtaagtggccaaccaagccctacccagggtcacccaacacactctgccttgagcctctcctcagggtctattccttgcgtggattatgtggccgtagcatgttacagttcaaacatgtctccactaccctgttaagagcagcctgggaacgtacaggccatcaagactatttatttaaatacaaaaaaaggggaaaacacacacacggaaaaaaaattgtaagcactttttttgtaaaaccaatgtctgttttgttacatacctttcatgtcgtgctttgtaaatgtcttatttgtgtaataaagttaatgcaagtagaagtgctggcactgaaatccagaaca

SEQ ID NO: 179640 - DNA, 3466 bp, Artificial Sequence
  derived and/or modified sequence
ctctcctcctgctcctgcagcagcctctgctcccactgcggctgtggtccccctcggcgcagctctccgcgctgcgcgcccgctgagcccgaggttccccggcccatgtactggaagcatgagaacgccgccccggcgttgcccgagggctgccggctgccggccgagggcggccccgccaccgaccaggtgatggcccagccagggtccggctgcaaagcgaccacccgctgtcttgaagggaccgcgccgcccgccatggctcagtctgacgccgaggccctggcaggagctctggacaaggacgagggtcaggcctccccatgtacgcccagcacgccatctgtctgctcaccgccctctgccgcctcctccgtgccgtctgcaggcaagaacatctgctccagctgcggcctcgagatcctggaccgatatctgctcaaggtcaacaacctcatctggcacgtgcggtgcctcgagtgctccgtgtgtcgcacgtcgctgaggcagcagaacagctgctacatcaagaacaaggagatcttctgcaagatggactacttcagccgattcgggaccaagtgtgcccggtgcggccgacagatctacgccagcgactgggtgcggagagctcgcggcaacgcctaccacctggcctgcttcgcctgcttctcgtgcaagcgccagctgtccactggtgaggagttcggcctggtcgaggagaaggtgctctgccgcatccactacgacaccatgattgagaacctcaagagggccgccgagaacgggaacggcctcacgttggagggggcagtgccctcggaacaggacagtcaacccaagccggccaagcgcgcgcggacgtccttcaccgcggaacagctgcaggttatgcaggcgcagttcgcgcaggacaacaaccccgacgctcagacgctgcagaagctggcggacatgacgggcctcagccggagagtcatccaggtgtggtttcaaaactgccgggcgcgtcataaaaagcacacgccgcaacacccagtgccgccctcgggggcgcccccgtcccgccttccctccgccctgtccgacgacatccactacaccccgttcagcagccccgagcgggcgcgcatggtcaccctgcacggctacattgagagtcaggtacagtgcgggcaggtgcactgccggctgccttacaccgcaccccccgtccacctcaaagccgatatggatgggccgctctccaaccggggtgagaaggtcatcctttttcagtactaacgctgccggcacttccgcatctgcccgtgggcgccccacagctgcccctcagccgctgagatccagtgtccaagctgcggccaggagtccacccacctccgcatccacccccgtccgccatcctgcccaccaccaggtcggttcccgaggcctggcctttccctctcctgctgagaaccagaacccaccaggagcaccacagagtcctcctcttggaaggcagaactccctgaaatctggaatcagggtggaaacagcctgtttttcccatttaaacaggagtcctcttcaacttcagctgattacaataacaaaaggcggaattgaattgtgcgatgccaacggccttctcatttacaggtttttttcccccacattggcctttatttactacttccttggaaccatctctgaattctgaatagctgacaacccccaatgttatccactctgttgcttttgtctggaaaactctacagtgtttgtgggatgtccccaaaggaaagctatgttctaattttatcatttccatctgtctggttatgtcaagttaattcagaaagagaagagacagtgaccaaccctgagaggcctaatagggcagagatggaggcctgcccagactaggaggcagcggggatagacagggaatggggagaagaaagacccccattggtttggaaatcaaggagagggcggtgacatattggaccagaagaggcactagccattttaaggagaggaaagagaaaactctggggtcagggagagaccctacccccacctaattatccagcatatatgtaagaaacatagcagcgatggtattcgatctgtgccatgactcttctgaatgtttggacaggttagagttggggacccctgttggccacttgttgacctctcatagtggtgcttgggccaggtcttctcaatggaaggggaatcccttataggggagagggaacagagcccagtgaaatggcagtcagaatgttaaccctggatccatctctaagtagagagagggtgcccattgcctaggtgagtgtgccaagctcaggattccaactggtgcctctgagcttcccaatcaatacttcctggagccagccccacccacccctgagaacagaggtcagacacagctgcgtaacatccatcctgctacaactcttccaccccaaacaaaagggctcaggctacacacgaccatgatttatgttttcaggggatgcccatttgtcccaagcttatcctgtaattctagaattacctggtgtcctgatgcattttccactagaggttgctaatcagcatgttttagcccaagtccgccttcctgctgtggttaacctgttatgttgcttttggaaggagactctaagacagggaaagcaagttcatggtacatacgcagccattgtctctgtttttacccatggcagacattgctaatcaatggcagctctatttcactgagtctggataaggtttcagagttcaaatgcttgacgttggcacttaacatgaaagcctataggtcattcttgctctgggatctacaggcagggtaggcacaggtgcagcctaagaagggaacctgcttcctctcccttccaaagacagtgacagctgactgagggcaaagagcaggcaccactcagaacgtggtgagtacagctcagctcagcactcagtcagtggtaacttgtgcccagccctgtgctaggcgctgacattaacaggagcaaccagggcccaattcctggccttggagctcaaatctttcctttgatttttgctcctgatcatcaaggccccagtggcaaccatgtggtaagtggccaaccaagccctacccagggtcacccaacacactctgccttgagcctctcctcagggtctattccttgcgtggattatgtggccgtagcatgttacagttcaaacatgtctccactaccctgttaagagcagcctgggaacgtacaggccatcaagactatttatttaaatacaaaaaaaggggaaaacacacacacggaaaaaaaattgtaagcactttttttgtaaaaccaatgtctgttttgttacatacctttcatgtcgtgctttgtaaatgtcttatttgtgtaataaagttaatgcaagtagaagtgctggcactgaaatccagaac

SEQ ID NO: 179641 - DNA, 1179 bp, Artificial Sequence
  derived and/or modified sequence
atgtattggaaacatgagaacgcagcaccagctctgccggagggctgtcgcctgcccgccgaaggaggccctgccaccgaccaggtgatggcacagcctgggtctggctgcaaggccaccacccggtgtctggagggaacagctcctcccgctatggcccagagcgatgccgaagctcttgccggcgccttagataaggacgaggggcaagcctcgccctgtaccccctccactccaagtgtttgctcaccccccagtgcagcttcctctgtgcccagtgccggcaaaaacatctgctcttcttgcgggctggaaatcctggaccgctacttgcttaaggtgaacaacttgatatggcacgttcgttgccttgagtgcagtgtttgccgcaccagcctccgccagcaaaacagctgctacataaagaacaaagaaatcttctgtaaaatggattacttttctagatttggaactaagtgcgcccgttgtgggagacaaatctacgcttcagattgggtcaggcgcgctagagggaacgcctatcacctggcatgttttgcctgcttttcctgtaagcgacaattgtcaacaggggaagagtttggactcgtggaggagaaagttctgtgtaggatacattacgacactatgatcgaaaatctgaaacgtgctgctgaaaacggtaatggtcttactttagagggggctgtgcctagcgagcaagactcacagcctaaacccgccaagcgcgctaggaccagcttcacagcagagcagcttcaggtgatgcaggcccagtttgcccaggacaacaatccggacgcgcagactctccagaagctggccgacatgacaggactatcacggcgcgtgattcaggtgtggtttcaaaactgtagagctcgtcacaaaaagcatacacctcaacatcccgtccctcctagtggggccccaccaagtagacttccttctgctctaagcgacgacatacactatacaccctttagctctcctgagagagctcggatggtgaccctccacggctacattgagtcccaggtccaatgtggtcaggtccattgtcggctgccctacaccgctcctcccgttcacctgaaagctgatatggacggccccctgtctaaccgaggagagaaagtcattctgttccagtactag

SEQ ID NO: 179642 - DNA, 1179 bp, Artificial Sequence
  derived and/or modified sequence
atgtactggaagcatgaaaatgctgccccagccctgcctgagggctgccgcctgcctgctgagggcggccctgccacagaccaggtgatggcccagcccggcagcggctgcaaggccaccacccgctgcctggagggcacagcccccccagccatggcccagagtgatgctgaggccctggccggggccctggacaaggatgagggccaggccagcccctgcacccccagcacccccagcgtgtgcagcccccccagcgctgccagctctgtgcccagcgctgggaagaacatctgcagcagctgtggcctggagatcctggaccgctacctgctgaaggtgaacaacctgatctggcacgtgcgctgcctggagtgcagcgtgtgcaggaccagcctgcggcagcagaacagctgctacatcaagaacaaggagatcttctgcaagatggactacttcagccgcttcggcaccaagtgtgcccgctgtggccggcagatctatgccagtgactgggtgcggcgggcccggggaaatgcctaccacctggcctgctttgcctgcttcagctgcaagaggcagctgagcactggagaggagtttggcctggtggaggagaaggtgctgtgccgcatccactatgacaccatgattgagaacctgaagagagctgctgaaaatggaaatggcctgaccctggagggcgctgtgcccagcgagcaggacagccagcccaagccagccaagagggcccggaccagcttcaccgctgagcagctgcaggtgatgcaggcccagtttgcccaggacaacaacccagatgcccagaccctgcagaagctggccgacatgacaggcctgagcagaagagtcatccaggtgtggttccagaactgccgggcccggcacaagaagcacaccccccagcaccctgtgcccccatctggggccccacccagccggctgcccagcgccctgagtgatgacatccactacacccccttcagcagccctgagcgggccaggatggtgaccctgcacggctacatcgagagccaggtgcagtgtggccaggtgcactgccgcctgccctacacagcccctcctgtgcacctgaaggctgacatggatggccccctgagcaacagaggagagaaggtgatcctcttccagtactag

SEQ ID NO: 179643 - DNA, 1179 bp, Artificial Sequence
  derived and/or modified sequence
atgtactggaagcacgagaacgccgcccccgccctgcccgagggctgccggctgcccgcagagggcggccctgccacggatcaagtgatggcccaacccggctcaggttgtaaggctaccacccggtgtctcgaagggactgctccccccgcgatggcccagtccgacgctgaagcgctggccggagctctcgacaaagacgaagggcaagcttctccctgtacacccagcacccccagcgtgtgttcacccccatccgctgcgtccagcgtgccctcagctgggaagaatatctgttcatcatgtggcctggagattttggatcggtatctcctgaaagttaataatctaatctggcacgtcaggtgtctggagtgcagcgtgtgtagaactagcttgaggcagcagaatagctgctacattaaaaacaaggaaattttctgcaaaatggattatttttctagatttggaaccaagtgcgcgcggtgtggaaggcagatttacgcttccgattgggtacgcagagcccgcgggaacgcttatcacctggcttgtttcgcttgcttttcatgtaagagacagctcagcacaggggaggagtttgggctggtggaagagaaggtgctctgtcggattcattatgacacgatgattgagaatctaaagagagccgccgagaatggcaatgggctcactctcgagggggctgtaccctctgagcaagattctcagcccaagccagccaagcgggccagaaccagcttcactgcagagcaacttcaagtcatgcaagcacaattcgcacaggataacaacccggacgctcagacgctgcagaagttggccgacatgacagggctgtcgcgaagagtgatacaggtctggttccagaactgccgcgcccggcacaagaagcatactccacaacatcctgtgcctccatcaggagccccccctagtcggttaccctctgctctgtcagacgacatccactatacacccttttcatcccccgagcgggcaagaatggtcaccttgcacggctatattgaaagccaggtccagtgcgggcaggtacattgccgtttaccatacacggccccgcccgttcatctcaaggccgacatggacggcccactgtcaaatcggggtgaaaaggtgattctgttccagtactag

SEQ ID NO: 179644 - DNA, 1179 bp, Artificial Sequence
  derived and/or modified sequence
atgtactggaaacacgagaacgccgcacccgcactgccagaagggtgcaggctgcctgctgaaggtggccctgctaccgatcaggtgatggcccaacccggttctggatgcaaagctaccactaggtgtctggaaggtactgccccacctgccatggcccaatccgatgcggaggcactagcaggtgcattagacaaggacgaggggcaggctagtccatgtacccccagcacaccctcagtgtgttcccctcctagtgccgcttcgagcgtcccgtctgcaggtaagaacatctgttcttcttgcgggctggaaatactcgaccgatatctgctgaaagtgaacaacctcatttggcacgtccggtgcttggaatgctccgtgtgccgtacttctcttcgacaacagaatagctgctacataaagaataaggagatattctgcaaaatggactattttagtcggtttggaaccaaatgcgctcgttgcggcagacagatatatgcatctgactgggtgagaagagcgagaggtaatgcttatcacctggcctgtttcgcatgtttttcctgtaaacgacaactttcaaccggcgaggaatttggcttggtcgaagaaaaagttctgtgccgcatacattacgatacgatgattgaaaatctgaaacgggcagccgagaatggaaatgggctgaccctcgaaggcgctgtgccttcagaacaggacagtcaaccaaagcctgccaagagagcccgaacttcatttaccgctgaacagctccaggtaatgcaggcacagttcgcccaagataataacccagacgctcaaaccctgcaaaaactggccgacatgactggactgagtagaagggtgatccaggtatggtttcagaattgcagagcgaggcataagaagcacacaccacagcatcccgtccctcctagcggtgcgcctcctagcaggctgccgagtgcgttgtccgacgatattcattacacccccttcagtagcccagagcgcgctaggatggtgacactccatggatacatcgagtcccaagtacaatgcggccaggtccattgtcgcctcccctacaccgccccacctgtgcacctaaaagctgatatggacggacctctgagtaaccgaggtgaaaaagtgatacttttccaatattag

SEQ ID NO: 179645 - DNA, 1179 bp, Artificial Sequence
  derived and/or modified sequence
atgtactggaagcacgagaacgccgcccccgccctgcccgagggctgcagactgcccgccgagggcggccccgccaccgaccaggtgatggcccagcccggcagcggctgcaaggccaccaccagatgcctggagggcaccgccccccccgccatggcccagagcgacgccgaggccctggccggcgccctggacaaggacgagggccaggccagcccctgcacccccagcacccccagcgtgtgcagcccccccagcgccgccagcagcgtgcccagcgccggcaagaacatctgcagcagctgcggcctggagatcctggacagatacctgctgaaggtgaacaacctgatctggcacgtgagatgcctggagtgcagcgtgtgcagaaccagcctgagacagcagaacagctgctacatcaagaacaaggagatcttctgcaagatggactacttcagcagattcggcaccaagtgcgccagatgcggcagacagatctacgccagcgactgggtgagaagagccagaggcaacgcctaccacctggcctgcttcgcctgcttcagctgcaagagacagctgagcaccggcgaggagttcggcctggtggaggagaaggtgctgtgcagaatccactacgacaccatgatcgagaacctgaagagagccgccgagaacggcaacggcctgaccctggagggcgccgtgcccagcgagcaggacagccagcccaagcccgccaagagagccagaaccagcttcaccgccgagcagctgcaggtgatgcaggcccagttcgcccaggacaacaaccccgacgcccagaccctgcagaagctggccgacatgaccggcctgagcagaagagtgatccaggtgtggttccagaactgcagagccagacacaagaagcacaccccccagcaccccgtgccccccagcggcgccccccccagcagactgcccagcgccctgagcgacgacatccactacacccccttcagcagccccgagagagccagaatggtgaccctgcacggctacatcgagagccaggtgcagtgcggccaggtgcactgcagactgccctacaccgccccccccgtgcacctgaaggccgacatggacggccccctgagcaacagaggcgagaaggtgatcctgttccagtactag

SEQ ID NO: 179646 - protein, 460 aa, Artificial Sequence
  derived and/or modified sequence
MSRSLDSARSFLERLEARGGREGAVLAGEFSDIQACSAAWKADGVCSTVAGSRPENVRKNRYKDVLPYDQTRVILSLLQEEGHSDYINGNFIRGVDGSLAYIATQGPLPHTLLDFWRLVWEFGVKVILMACREIENGRKRCERYWAQEQEPLQTGLFCITLIKEKWLNEDIMLRTLKVTFQKESRSVYQLQYMSWPDRGVPSSPDHMLAMVEEARRLQGSGPEPLCVHCSAGCGRTGVLCTVDYVRQLLLTQMIPPDFSLFDVVLKMRKQRPAAVQTEEQYRFLYHTVAQMFCSTLQNASPHYQNIKENCAPLYDDALFLRTPQALLAIPRPPGGVLRSISVPGSPGHAMADTYAVVQKRGAPAGAGSGTQTGTGTGTGARSAEEAPLYSKVTPRAQRPGAHAEDARGTLPGRVPADQSPAGSGAYEDVAGGAQTGGLGFNLRIGRPKGPRDPPAEWTRV

SEQ ID NO: 179647 - DNA, 1383 bp, Artificial Sequence
  derived and/or modified sequence
atgtctaggtccctggacagcgcgagatctttcctggaacgattggaagcgcggggaggccgcgagggcgctgtcctcgccggtgaattctcagatattcaagcctgctctgctgcgtggaaggcagacggcgtatgctccaccgtagccggcagtcggccagagaacgtgcgcaaaaatcgctacaaggacgtactcccatatgaccagacacgtgttattctctctctgctccaagaagagggtcacagtgattatatcaatgggaactttattcggggcgtggatggcagtttggcgtatattgctactcagggtccgttgccacacactttgctggacttctggcgcttagtgtgggaattcggggtgaaggttatcctgatggcctgccgcgaaatagaaaatggccgtaagcggtgcgagagatattgggctcaggagcaggagccccttcagaccgggctgttctgtataactttaataaaagaaaaatggttgaacgaggatattatgctgcgcacgctcaaggtcaccttccagaaggagtcccgttctgtgtaccagttacagtacatgagctggcctgacagaggcgtgccgtcctctccagaccacatgcttgctatggtcgaggaggcacgtaggctccagggatccggacctgagcccctgtgtgtccactgcagtgctggatgcggacgcacgggcgtcctgtgcacagttgattacgtccgccaactgcttctgacccagatgatccccccagacttctccctttttgatgtggtcttaaagatgcggaaacagcggccagctgcggttcagacagaggaacaatatcggtttctgtaccatacagtggcacagatgttttgttccactttacagaacgcttcacctcactaccagaatatcaaggagaactgtgccccattgtatgacgacgcgctcttcttgagaacccctcaggctttgctcgccatcccgcgacctcctggaggggtgctgaggtccatctccgtccccgggagtccaggtcacgctatggcagatacctatgctgtcgtccagaaacggggcgcccctgcgggagccggctcgggaacccagaccggtaccggcaccggaacaggcgcgcgatctgccgaggaggcccctctgtattcaaaggtgacaccccgggcccagaggcctggagcccatgccgaggatgccagggggacacttccaggacgtgtgcccgcggaccaaagcccagccggctcaggggcctatgaagatgtggctgggggggctcaaacagggggcctcggctttaacctccgcatcggcagacctaaaggcccccgggacccgcctgctgaatggactagggtctag

SEQ ID NO: 179648 - DNA, 1383 bp, Artificial Sequence
  derived and/or modified sequence
atgagccgcagcctggacagcgcccggagcttcctggagcggctggaggcccggggcggccgggagggcgctgtgctggccggggagttcagtgacatccaggcctgcagcgctgcctggaaggcagatggagtgtgcagcacagtggccggcagcaggccagaaaatgtgaggaagaaccgctacaaggatgtgctgccctatgaccagaccagggtcatcctgagcctgctgcaggaggagggccacagcgactacatcaatggaaacttcatccggggcgtggatggcagcctggcctacatcgccacccagggccccctgccccacaccctgctggacttctggaggctggtgtgggagtttggagtgaaggtgatcctgatggcctgccgggagattgaaaatggaaggaagagatgtgagcgctactgggcccaggagcaggagcccctgcagacaggcctcttctgcatcaccctcatcaaggagaagtggctgaatgaagacatcatgctgcggaccctgaaggtgaccttccagaaggagagccgctctgtgtaccagctgcagtacatgtcctggccagacagaggagtgcccagcagcccagaccacatgctggccatggtggaggaggcccggcggctgcagggcagcggccctgagcccctgtgtgtgcactgcagcgctggctgcggccgcactggagtgctgtgcaccgtggactatgtgcggcagctgctgctgacccagatgatccccccagacttcagcctgtttgatgtggtgctgaagatgaggaagcagaggcctgctgctgtgcagacagaggagcagtaccgcttcctgtaccacacagtggcccagatgttctgcagcaccctgcagaatgccagcccccactaccagaacatcaaggagaactgtgcccccctgtatgatgatgccctcttcctgcggaccccccaggccctgctggccatcccccggcccccaggaggagtgctgcggagcatctctgtgcccggcagccctggccacgccatggctgacacctatgctgtggtgcagaagagaggagccccagctggggccggcagcggcacccagacaggcaccggcaccggcaccggggcccggtctgctgaggaggcccccctgtacagcaaggtgaccccccgggcccagaggcctggggcccatgctgaagatgcccggggcaccctgcccggccgggtgcctgctgaccagagccctgctggcagcggggcctatgaagatgtggccggcggggcccagacaggaggcctgggcttcaacctgcgcatcggccggcccaagggcccccgggaccccccagctgagtggaccagggtgtag

SEQ ID NO: 179649 - DNA, 1383 bp, Artificial Sequence
  derived and/or modified sequence
atgagccggagcctggacagcgcccggagcttcctggagcggctggaagcccgaggggggagagaaggcgctgtgttggccggggaatttagtgacatccaggcatgttccgctgcatggaaagcggacggagtgtgctctaccgttgctggctcccgaccagagaacgtccggaaaaacagatacaaggatgtcctgccgtatgatcagactagggtgatcctgagtcttcttcaggaggaaggtcactcagactacattaatggaaattttatcaggggtgtggacggctctctcgcctacatcgcaacacagggacctctgcctcataccttgcttgacttctggaggctggtgtgggagtttggcgtgaaagtcatacttatggcttgccgagagatcgaaaacggacgtaagagatgtgagagatattgggctcaagaacaggaaccattgcagactggcctcttctgtatcaccctcattaaagaaaaatggctgaacgaggacatcatgctgcggactctgaaggtgactttccagaaggagtctcgctccgtttaccagctacagtacatgtcgtggccggatagaggcgtgccaagctccccagatcacatgctggccatggtggaggaggctcggagactgcagggctccggtcccgaaccgttgtgtgtccattgctccgccgggtgcggacgcactggagtgctgtgcaccgtggattatgttcggcaattactcttaacacagatgattccacccgacttcagtttatttgatgttgtgctcaagatgagaaaacagagacctgcagccgtgcagacagaagaacagtatcggttcctgtaccatacggtggctcagatgttttgctccactcttcagaatgcaagcccacactaccagaacatcaaagagaattgcgcacccttgtacgatgacgcactgttcctgcggaccccacaggcccttctggcaatccccagacctcccggtggagtccttagatctatttcggtcccgggctctcctgggcatgcaatggcagacacttacgcggtagtgcagaagcggggagccccagctggcgccggcagcggcactcagacaggcacagggactggcaccggggcccgttctgccgaggaggctcctctgtacagtaaggtgacccccagagcccagcgcccaggggcacacgccgaggacgcccgcggcactctcccaggccgtgtgcctgccgaccagtctccggctggttcgggcgcctacgaggacgtggcggggggggcacaaactggaggacttggatttaatttgcggattggccgtccaaagggcccgagggaccctcccgcagaatggactagagtttag

SEQ ID NO: 179650 - DNA, 1383 bp, Artificial Sequence
  derived and/or modified sequence
atgtcccgctctttggattctgctaggagcttcttagagagactggaggcaagaggcggtcgagagggggctgttctggcaggggaatttagtgacatccaggcatgcagcgctgcgtggaaagctgacggagtgtgctcaacagtggctgggtccagacctgaaaacgtgaggaagaatcgttacaaggatgtgctcccatatgaccagactagggtgattctcagtctgcttcaggaagaagggcatagtgattacatcaacggcaacttcatcagaggcgtcgacggcagtctagcatatatcgctacgcagggccctctccctcacactctcctcgacttctggagactcgtgtgggagtttggtgtgaaggtcattctcatggcctgcagagaaattgaaaatggcagaaaaaggtgcgaaagatactgggcccaggaacaggaacccttgcaaaccgggctgttctgtattacccttattaaggagaaatggctcaatgaggatattatgctacggactctcaaagtcacatttcagaaggaatcacgttctgtttatcagctgcagtatatgtcatggcctgatcgcggagtgcctagctcaccagaccacatgttagcaatggtcgaagaagctagacgacttcagggctcaggcccagagcccctgtgtgtccattgtagcgccggatgcggtcggactggggtgctttgtacagtcgactatgtcagacaactccttctaacacagatgatcccacctgactttagtctattcgacgtggtgctgaaaatgaggaaacagcgcccagctgccgtccagaccgaggaacagtatagattcctgtaccatactgttgctcagatgttttgttcaaccctccagaacgcttcacctcactaccagaacatcaaagaaaattgcgcccctctgtatgatgatgctctgtttctgaggaccccacaagcactccttgccattcctcgtccgcctgggggtgtgctgagatcaattagcgtgcccggttctcccggacatgcaatggccgatacatatgcagtggtccagaagcgcggagcccctgcaggagctgggagtggtactcagactggcacgggcacgggcactggtgccaggagtgccgaagaagctcctctgtattccaaagtaactcccagggcccagaggccaggggcacacgcggaggatgcacgtggaaccctccctggaagagtcccagctgatcaatctcccgctgggagcggtgcctacgaggacgtggccggaggagcgcagactggaggcctgggctttaacctgcgtattggcaggcctaaaggccctcgcgaccctccggctgaatggactcgcgtttag

SEQ ID NO: 179651 - DNA, 3669 bp, Artificial Sequence
  derived and/or modified sequence
gaggcaagggcggggactcagtcaccggcctccgcctcccgcggcgtccacactcgccgcgcgcgcggcggccgggctggaccttgctggcccgcggcgccatgagccgcagcctggactcggcgcggagcttcctggagcggctggaagcgcggggcggccgggagggggcagtcctcgccggcgagttcagcgacatccaggcctgctcggccgcctggaaggctgacggcgtgtgctccaccgtggccggcagtcggccagagaacgtgaggaagaaccgctacaaagacgtgctgccttatgatcagacgcgagtaatcctctccctgctccaggaagagggacacagcgactacattaatggcaacttcatccggggcgtggatggaagcctggcctacattgccacgcaaggacccttgcctcacaccctgctagacttctggagactggtctgggagtttggggtcaaggtgatcctgatggcctgtcgagagatagagaatgggcggaaaaggtgtgagcggtactgggcccaggagcaggagccactgcagactgggcttttctgcatcactctgataaaggagaagtggctgaatgaggacatcatgctcaggaccctcaaggtcacattccagaaggagtcccgttctgtgtaccagctacagtatatgtcctggccagaccgtggggtccccagcagtcctgaccacatgctcgccatggtggaggaagcccgtcgcctccagggatctggccctgaacccctctgtgtccactgcagtgcgggttgtgggcgaacaggcgtcctgtgcaccgtggattatgtgaggcagctgctcctgacccagatgatcccacctgacttcagtctctttgatgtggtccttaagatgaggaagcagcggcctgcggccgtgcagacagaggagcagtacaggttcctgtaccacacggtggctcagatgttctgctccacactccagaatgccagcccccactaccagaacatcaaagagaattgtgccccactctacgacgatgccctcttcctccggactccccaggcacttctcgccataccccgcccaccaggaggggtcctcaggagcatctctgtgcccgggtccccgggccacgccatggctgacacctacgcggtggtgcagaagcgcggggctccagcgggcgccgggagtgggacgcagacggggacggggacggggacgggggcgcgcagcgcggaggaggcgccgctctacagcaaggtgacgccgcgcgcccagcgacccggggcgcacgcggaggacgcgagggggacgctgcctggccgcgttcctgctgaccaaagtcctgccggatctggcgcctacgaggacgtggcgggtggagctcagaccggtgggctaggtttcaacctgcgcattgggaggccgaagggtccccgggacccgcctgctgagtggacccgggtgtaagtctaacgccagttcctgcctgttgcctcttgtgagctcggactgctgatgccccggtgctgctgagcgccgtgcgcagaatggaaacagtgggcctggatcaaagttaaagtttctcagggtgggaaatgtgggggctttgccccaatgactgtagcattcaaggcttgaggctggaggaggtagctagggtatagtggctggtgaggctgcacagagcagattcaagaaagaagatcaggaaggggcatgacccctgagttatgaaggggagaagggacagatgagcttccggagactgctctcctcaccacacagcactagtccatcctcagcacctgagcctccctcacttggacactcaggggaccacacagagaagtggatggacacttcgccatccaggcagaactaagccaggcataaccacagccaagcagattaaccccaggcagaccgataaaaagacctccagataggcagacagacagatggaccaccaacctggacagacagccaaagcttcagagatacagtccacaggtggacaaagggatccccagccagagagagagagaccagccaacagcttgatagaccagtgcagccagagagaccaccaaacagagcccccaaaagacagacatctctgctagctggacagccaggtggaccccctaagttagattactagacagatataaacagatcccctgctgaacagatacacagagttctcagaccccacccccaccctcaggtgggctggctggctgacagaccttctggccagacagactcctaaccaaccagatggactgccagacaggcagacatcagccacatggaatcctgacatcccagccagccggccagactctcatcttgatgtcttgatggatggaccccagctagtcagacatgatcctccagattgacagacaagtcccccaaatgagtacacatctccagctattcagacagatggacccccagcaaatcaggacctatctaggcagaccccagccagacccccgccagacagactcccaaccagactgaccccttactattcacacagcctgccgagtagctgggactacaggtctaattttttttttttttaagaaatgagtttttgccatgttgcccagactggtcttgaactcccaacctcaagcaatcctcctgcctcagcctcccaaagtgctgagattacaggtgtgagccaccaggctcagccccctaagatttgaaacactttaaatggcccatggtagggttcctgctaggataaaacattaagcggctgttaaaagaaataaaaggaggacacgtctctgtgcactggtgtggacaaatctccaagtcactgcaaaatggaaaaagtataagatgctctttccctgaacctcaagggtcccgcccctctcactttcaggtctctggacctctgactgacactgtgcctgcccaggtccctgtatgcactgccacagtgccctgggccccatgtccacccctgtcctgcccttctctgggatagggctggccttcctctgcctctgcctggctgcatccatggtcgatctcaagtgccttggcatgaactccactctcctgcagccttcaatcaaggaatgatggggatgtgtacataccccaccccaccccttggcagggtgatgctgaggtgtggatttttaacagttcccagactttcccaggaggcttgggtttgggtgcccacagtgggagctggtgtgatatcataccttcgccggccgcctttccttcctgttctctgtgcccctactcccactctagagctgccccgtttctctgttttcgtgaaagagctgaccctgtgctgcctcccactctcccaatgcccctgccactcctgtgagcctgctgctggtgaggtcggtgctgacctctgtgttgctggataatgagtcatctatctctggaggagaagaaaggcaggtcctccacagccctgataaaatctccaagtctcccagtttcgggtccctctcctgggatgcagacccactgcctgcccagctggtacgatccacatgccctcttcttgggaataggggcatgggaaagtgactaaagatactgttctggctgctgtgttcactgtgagtaataaactgtccatttctccgattca

SEQ ID NO: 179652 - DNA, 1383 bp, Artificial Sequence
  derived and/or modified sequence
atgagcagaagcctggacagcgccagaagcttcctggagagactggaggccagaggcggcagagagggcgccgtgctggccggcgagttcagcgacatccaggcctgcagcgccgcctggaaggccgacggcgtgtgcagcaccgtggccggcagcagacccgagaacgtgagaaagaacagatacaaggacgtgctgccctacgaccagaccagagtgatcctgagcctgctgcaggaggagggccacagcgactacatcaacggcaacttcatcagaggcgtggacggcagcctggcctacatcgccacccagggccccctgccccacaccctgctggacttctggagactggtgtgggagttcggcgtgaaggtgatcctgatggcctgcagagagatcgagaacggcagaaagagatgcgagagatactgggcccaggagcaggagcccctgcagaccggcctgttctgcatcaccctgatcaaggagaagtggctgaacgaggacatcatgctgagaaccctgaaggtgaccttccagaaggagagcagaagcgtgtaccagctgcagtacatgagctggcccgacagaggcgtgcccagcagccccgaccacatgctggccatggtggaggaggccagaagactgcagggcagcggccccgagcccctgtgcgtgcactgcagcgccggctgcggcagaaccggcgtgctgtgcaccgtggactacgtgagacagctgctgctgacccagatgatcccccccgacttcagcctgttcgacgtggtgctgaagatgagaaagcagagacccgccgccgtgcagaccgaggagcagtacagattcctgtaccacaccgtggcccagatgttctgcagcaccctgcagaacgccagcccccactaccagaacatcaaggagaactgcgcccccctgtacgacgacgccctgttcctgagaaccccccaggccctgctggccatccccagaccccccggcggcgtgctgagaagcatcagcgtgcccggcagccccggccacgccatggccgacacctacgccgtggtgcagaagagaggcgcccccgccggcgccggcagcggcacccagaccggcaccggcaccggcaccggcgccagaagcgccgaggaggcccccctgtacagcaaggtgacccccagagcccagagacccggcgcccacgccgaggacgccagaggcaccctgcccggcagagtgcccgccgaccagagccccgccggcagcggcgcctacgaggacgtggccggcggcgcccagaccggcggcctgggcttcaacctgagaatcggcagacccaagggccccagagacccccccgccgagtggaccagagtgtag

SEQ ID NO: 179653 - protein, 338 aa, Artificial Sequence
  derived and/or modified sequence
MTALSSENCSFQYQLRQTNQPLDVNYLLFLIILGKILLNILTLGMRRKNTCQNFMEYFCISLAFVDLLLLVNISIILYFRDFVLLSIRFTKYHICLFTQIISFTYGFLHYPVFLTACIDYCLNFSKTTKLSFKCQKLFYFFTVILIWISVLAYVLGDPAIYQSLKAQNAYSRHCPFYVSIQSYWLSFFMVMILFVAFITCWEEVTTLVQAIRITSYMNETILYFPFSSHSSYTVRSKKIFLSKLIVCFLSTWLPFVLLQVIIVLLKVQIPAYIEMNIPWLYFVNSFLIATVYWFNCHKLNLKDIGLPLDPFVNWKCCFIPLTIPNLEQIEKPISIMIC

SEQ ID NO: 179654 - protein, 143 aa, Artificial Sequence
  derived and/or modified sequence
MTALSSENCSFQYQLRQTNQPLDVNYLLFLIILGKILLNILTLGMRRKNTCQNFMEYFCISLAFVDLLLLVNISIILYFRDFVLLSIRFTKYHICLFTQIISFTYGFLHYPVFLTACIDYCLNFSKTTKLSFKCQKLFYFFTV

SEQ ID NO: 179655 - protein, 88 aa, Artificial Sequence
  derived and/or modified sequence
MTALSSENCSFQYQLRQTNQPLDVNYLLFLIILGKILLNILTLGMRRKNTCQNFMEYFCISLAFVDLLLLVNISIILYFRDFVLLSIR

SEQ ID NO: 179656 - protein, 33 aa, Artificial Sequence
  derived and/or modified sequence
MTALSSENCSFQYQLRQTNQPLDVNYLLFLIIL

SEQ ID NO: 179657 - DNA, 1017 bp, Artificial Sequence
  derived and/or modified sequence
atgaccgccctgagcagcgagaactgcagcttccagtaccagctgagacagaccaaccagcccctggacgtgaactacctgctgttcctgatcatcctgggcaagatcctgctgaacatcctgaccctgggcatgagaagaaagaacacctgccagaacttcatggagtacttctgcatcagcctggccttcgtggacctgctgctgctggtgaacatcagcatcatcctgtacttcagagacttcgtgctgctgagcatcagattcaccaagtaccacatctgcctgttcacccagatcatcagcttcacctacggcttcctgcactaccccgtgttcctgaccgcctgcatcgactactgcctgaacttcagcaagaccaccaagctgagcttcaagtgccagaagctgttctacttcttcaccgtgatcctgatctggatcagcgtgctggcctacgtgctgggcgaccccgccatctaccagagcctgaaggcccagaacgcctacagcagacactgccccttctacgtgagcatccagagctactggctgagcttcttcatggtgatgatcctgttcgtggccttcatcacctgctgggaggaggtgaccaccctggtgcaggccatcagaatcaccagctacatgaacgagaccatcctgtacttccccttcagcagccacagcagctacaccgtgagaagcaagaagatcttcctgagcaagctgatcgtgtgcttcctgagcacctggctgcccttcgtgctgctgcaggtgatcatcgtgctgctgaaggtgcagatccccgcctacatcgagatgaacatcccctggctgtacttcgtgaacagcttcctgatcgccaccgtgtactggttcaactgccacaagctgaacctgaaggacatcggcctgcccctggaccccttcgtgaactggaagtgctgcttcatccccctgaccatccccaacctggagcagatcgagaagcccatcagcatcatgatctgctag

SEQ ID NO: 179658 - DNA, 432 bp, Artificial Sequence
  derived and/or modified sequence
atgaccgccctgagcagcgagaactgcagcttccagtaccagctgagacagaccaaccagcccctggacgtgaactacctgctgttcctgatcatcctgggcaagatcctgctgaacatcctgaccctgggcatgagaagaaagaacacctgccagaacttcatggagtacttctgcatcagcctggccttcgtggacctgctgctgctggtgaacatcagcatcatcctgtacttcagagacttcgtgctgctgagcatcagattcaccaagtaccacatctgcctgttcacccagatcatcagcttcacctacggcttcctgcactaccccgtgttcctgaccgcctgcatcgactactgcctgaacttcagcaagaccaccaagctgagcttcaagtgccagaagctgttctacttcttcaccgtgtag

SEQ ID NO: 179659 - DNA, 267 bp, Artificial Sequence
  derived and/or modified sequence
atgaccgccctgagcagcgagaactgcagcttccagtaccagctgagacagaccaaccagcccctggacgtgaactacctgctgttcctgatcatcctgggcaagatcctgctgaacatcctgaccctgggcatgagaagaaagaacacctgccagaacttcatggagtacttctgcatcagcctggccttcgtggacctgctgctgctggtgaacatcagcatcatcctgtacttcagagacttcgtgctgctgagcatcagatag

SEQ ID NO: 179660 - DNA, 102 bp, Artificial Sequence
  derived and/or modified sequence
atgaccgccctgagcagcgagaactgcagcttccagtaccagctgagacagaccaaccagcccctggacgtgaactacctgctgttcctgatcatcctgtag

SEQ ID NO: 179661 - DNA, 2039 bp, Artificial Sequence
  derived and/or modified sequence
ccggcccttgtttcgttgggcccggacgggacgtgcgcgctcaaaggttgcccgtctctgacgcccgcatttcctggtctggagccggctgagccacagcagggtcgccgcggggtcccggggccgtgctcccctgcccctcccgggagcgcgcggggcggggcggggcggggcgggaccaggcgggcgagctgggccctcgcccctccctcgggcggtcacctgggcacgggcgctgcaggtgtcggggcctcaaccttgcggagccgacagccatcgatcctcgggtggcctcgaggtggtggcagggccgccccctgcagtccggagacgaacgcacggaccgggcctccggaggcaggttcggctggaaggaaccgctctcgcttcgtcctacacttgcgcaaatgtctccgagcttactcacatagcatattggtatatcaaaatgaaatgcaaggaaccaaaaataacataattgaaggcagtaaaagtgaaattaaataggaagatcatcagtcaaggaagacccactggagaggacagaaaatgaagcagtgttttatcatgtgtatttcagcaggtcttcttgaaatttaactaaaaatatgactgctctctcttcagagaactgctcttttcagtaccagttacgtcaaacaaaccagcccctagatgttaactatctgctattcttgatcatacttgggaaaatattattaaatatccttacactaggaatgagaagaaaaaacacctgtcaaaattttatggaatatttttgcatttcactagcattcgttgatcttttacttttggtaaacatttccattatattgtatttcagggattttgtacttttaagcattaggttcactaaataccacatctgcctatttactcaaattatttcctttacttatggctttttgcattatccagttttcctgacagcttgtatagattattgcctgaatttctctaaaacaaccaagctttcatttaagtgtcaaaaattattttatttctttacagtaattttaatttggatttcagtccttgcttatgttttgggagacccagccatctaccaaagcctgaaggcacagaatgcttattctcgtcactgtcctttctatgtcagcattcagagttactggctgtcatttttcatggtgatgattttatttgtagctttcataacctgttgggaagaagttactactttggtacaggctatcaggataacttcctatatgaatgaaactatcttatattttcctttttcatcccactccagttatactgtgagatctaaaaaaatattcttatccaagctcattgtctgttttctcagtacctggttaccatttgtactacttcaggtaatcattgttttacttaaagttcagattccagcatatattgagatgaatattccctggttatactttgtcaatagttttctcattgctacagtgtattggtttaattgtcacaagcttaatttaaaagacattggattacctttggatccatttgtcaactggaagtgctgcttcattccacttacaattcctaatcttgagcaaattgaaaagcctatatcaataatgatttgttaatattattaattaaaagttacagctgtcataagatcataattttatgaacagaaagaactcaggacatattaaaaaataaactgaactaaaacaacttttgccccctgactgatagcatttcagaatgtgtcttttgaagggctatgataccagttattaaatagtgttttattttaaaaacaaaataattccaagaagtttttatagttattcagggacactatattacaaatattactttgttattaacacaaaaagtgataagagttaacatttggctatactgatgtttgtgttactcaaaaaaactactggatgcaaactgttatgtaaatctgagatttcactgacaactttaagatatcaacctaaacatttttattaaatgttcaaatgaaagcaagaaagtaaaaa

SEQ ID NO: 179662 - DNA, 783 bp, Artificial Sequence
  derived and/or modified sequence
agagcttactcacatagcatattggtatatcaaaatgaaatgcaaggaaccaaaaataacataattgaaggcagtaaaagtgaaattaaataggaagatcatcagtcaaggaagacccactggagactgaaaccacctgttttcagagcttcaggaaaagacttaatctgaaggatcctgcagctaaaaagctttgaaaactgtgttaaggggccccataagcatcgcttctaaacttcactgacaaaagggactggggtcatgctgtctggagtcagagtgagggacagaaaatgaagcagtgttttatcatgtgtatttcagcaggtcttcttgaaatttaactaaaaatatgactgctctctcttcagagaactgctcttttcagtaccagttacgtcaaacaaaccagcccctagatgttaactatctgctattcttgatcatacttgggaaaatattattaaatatccttacactaggaatgagaagaaaaaacacctgtcaaaattttatggaatatttttgcatttcactagcattcgttgatcttttacttttggtaaacatttccattatattgtatttcagggattttgtacttttaagcattaggttcactaaataccacatctgcctatttactcaaattatttcctttacttatggctttttgcattatccagttttcctgacagcttgtatagattattgcctgaatttctctaaaacaaccaagctttcatttaagtgtcaaaaattattttatttctttacagtaat

SEQ ID NO: 179663 - DNA, 740 bp, Artificial Sequence
  derived and/or modified sequence
ttatcgggctcaccaaatacagctgcagtatgaattccatcttctacacaacagtaaaccagaatgttcatgttcacagcgttcatctcccatcctgttgtctaacgcacatggtttttttaaacttttctaagattgcatgagattctgcaacacaactgattataaaaacacttgaagtttttacctttttttttactttccaactctcgtgaatgtacagaggactttccagaagctacatgatgtgtgatatttcagctgatgaaatgtagatgtatagagcttactcacatagcatattggtatatcaaaatgaaatgcaaggaaccaaaaataacataattgaaggcagtaaaagtgaaattaaataggaagatcatcagtcaaggaagacccactggagaggacagaaaatgaagcagtgttttatcatgtgtatttcagcaggtcttcttgaaatttaactaaaaatatgactgctctctcttcagagaactgctcttttcagtaccagttacgtcaaacaaaccagcccctagatgttaactatctgctattcttgatcatacttgggaaaatattattaaatatccttacactaggaatgagaagaaaaaacacctgtcaaaattttatggaatatttttgcatttcactagcattcgttgatcttttacttttggtaaacatttccattatattgtatttcagggattttgtacttttaagcattaggt

SEQ ID NO: 179664 - DNA, 1017 bp, Artificial Sequence
  derived and/or modified sequence
atgacggccctgagctcagagaattgtagttttcaataccagctgaggcagacaaaccagcccctggacgtgaactacttgctgtttctcattatactgggtaagattcttctcaacattctgaccctcggcatgcggcgcaagaacacatgccagaattttatggagtacttctgcattagtttagcgttcgttgatttgctactgctggtgaacatttccatcattctgtactttcgcgacttcgttctgcttagtatacggtttaccaaataccacatctgcctgttcacgcagattatctcttttacctatggattcttgcactatccggtatttctgactgcttgcattgactactgtcttaacttctctaaaacaaccaaacttagttttaagtgtcaaaagctgttttacttcttcactgtcatcctcatctggatttccgtgctggcatacgtactcggcgaccctgccatctaccagagtctgaaagcccagaacgcatacagtagacactgtcccttctatgtctcaattcagtcatactggttgagtttcttcatggtgatgatcctgtttgtggcattcattacctgctgggaggaggtgaccacactggtacaggccatccgcattacatcatatatgaatgagacaatcctctactttcccttttcaagccattctagttatacggttcgatctaaaaagatatttctgtccaagcttatcgtttgtttcctgtcaacctggcttccttttgtattgctccaggtgataatcgtgttactaaaggtgcaaattccagcatatattgaaatgaatattccgtggctgtacttcgttaacagcttcttgattgcgaccgtctactggtttaattgtcacaagctcaatctgaaagacattgggctcccactcgatccctttgtgaattggaagtgttgtttcattcctctgactattccaaacttagagcagatcgaaaaacctatttcgatcatgatttgctag

SEQ ID NO: 179665 - DNA, 432 bp, Artificial Sequence
  derived and/or modified sequence
atgacagccctatcatcagaaaactgttcctttcaatatcagctaaggcagacaaaccaaccacttgatgttaactatctgctattcctgattatcctcgggaaaatactgctgaacattttgactctggggatgcgccggaagaatacttgtcagaattttatggagtacttttgtatctctctggcttttgtggacctactgcttctggttaacatttcaatcatattatattttcgggattttgtcctattaagcatacggttcaccaaataccatatctgcctttttacgcagataattagcttcacttatggcttcttgcattatcctgttttccttacagcgtgcattgactattgcttaaacttcagtaagactacaaagctgtcgtttaagtgtcagaagctcttctacttttttaccgtttag

SEQ ID NO: 179666 - DNA, 267 bp, Artificial Sequence
  derived and/or modified sequence
atgacagctctgagcagcgaaaattgttccttccagtaccagttgcgccagactaaccagccactcgatgtgaactacctcctgttcctgataatcctcggtaagatcctcttaaacattcttacattgggaatgcggcgtaaaaatacctgtcagaactttatggaatatttctgcatcagcctggccttcgtcgatcttcttctgcttgtgaatatctcaattatcttgtattttcgtgacttcgtgctgctcagcatccgctag

SEQ ID NO: 179667 - DNA, 102 bp, Artificial Sequence
  derived and/or modified sequence
atgacagcactgtcctctgagaactgcagcttccagtaccaactcagacagacaaaccagccactggacgtcaactacttgcttttcctgatcatactgtag

SEQ ID NO: 179668 - DNA, 1017 bp, Artificial Sequence
  derived and/or modified sequence
atgacagccctgagcagcgagaactgcagcttccagtaccagctgcggcagaccaaccagcccctggatgtgaactacctgctcttcctgatcatcctgggcaagatcctgctgaacatcctgaccctgggcatgaggaggaagaacacctgccagaacttcatggagtacttctgcatcagcctggcctttgtggacctgctgctgctggtgaacatcagcatcatcctgtacttccgggactttgtgctgctgagcatccgcttcaccaagtaccacatctgcctcttcacccagatcatctccttcacctacggcttcctgcactaccctgtgttcctgacagcctgcatcgactactgcctgaacttcagcaagaccaccaagctgtccttcaagtgccagaagctgttctacttcttcaccgtcatcctgatctggatctctgtgctggcctacgtgctgggggaccctgccatctaccagagcctgaaggcccagaatgcctacagccgccactgccccttctacgtgtccatccagagctactggctgtccttcttcatggtgatgatcctgtttgtggccttcatcacctgctgggaggaggtgaccaccctggtgcaggccatccgcatcaccagctacatgaatgagaccatcctgtacttccccttcagcagccacagcagctacacagtgcgcagcaagaagatcttcctgagcaagctgattgtgtgcttcctgagcacctggctgccctttgtgctgctgcaggtgatcatcgtgctgctgaaggtgcagatcccagcctacatcgagatgaacatcccctggctgtactttgtgaacagcttcctgattgccaccgtgtactggttcaactgccacaagctgaacctgaaggacatcggcctgcccctggacccctttgtgaactggaagtgctgcttcatccccctgaccatccccaacctggagcagatcgagaagcccatcagcatcatgatctgctag

SEQ ID NO: 179669 - DNA, 432 bp, Artificial Sequence
  derived and/or modified sequence
atgacagccctgagcagcgagaactgcagcttccagtaccagctgcggcagaccaaccagcccctggatgtgaactacctgctcttcctgatcatcctgggcaagatcctgctgaacatcctgaccctgggcatgaggaggaagaacacctgccagaacttcatggagtacttctgcatcagcctggcctttgtggacctgctgctgctggtgaacatcagcatcatcctgtacttccgggactttgtgctgctgagcatccgcttcaccaagtaccacatctgcctcttcacccagatcatctccttcacctacggcttcctgcactaccctgtgttcctgacagcctgcatcgactactgcctgaacttcagcaagaccaccaagctgtccttcaagtgccagaagctgttctacttcttcaccgtgtag

SEQ ID NO: 179670 - DNA, 267 bp, Artificial Sequence
  derived and/or modified sequence
atgacagccctgagcagcgagaactgcagcttccagtaccagctgcggcagaccaaccagcccctggatgtgaactacctgctcttcctgatcatcctgggcaagatcctgctgaacatcctgaccctgggcatgaggaggaagaacacctgccagaacttcatggagtacttctgcatcagcctggcctttgtggacctgctgctgctggtgaacatcagcatcatcctgtacttccgggactttgtgctgctgagcatcagatag

SEQ ID NO: 179671 - DNA, 102 bp, Artificial Sequence
  derived and/or modified sequence
atgacagccctgagcagcgagaactgcagcttccagtaccagctgcggcagaccaaccagcccctggatgtgaactacctgctcttcctgatcatcctgtag

SEQ ID NO: 179672 - DNA, 1017 bp, Artificial Sequence
  derived and/or modified sequence
atgaccgccctgagcagcgagaactgcagcttccagtaccagctgaggcaaaccaaccagcccttggacgtgaattatctgttatttctgatcattctgggaaagatcctcctgaatattctcaccttaggtatgcgacgcaaaaacacatgccaaaattttatggagtatttttgcatctccctggcatttgtggacctgctactgcttgtaaatattagcatcatactctacttcagagactttgtgttactatctatcagattcacgaagtaccatatctgcttgtttacacagattatttctttcacatacggcttccttcattaccccgtctttctgactgcctgtatcgattattgtttaaatttcagtaaaacaaccaaactgtccttcaagtgccagaagctcttttacttttttaccgtcattctgatttggatttcagttctggcatatgttctgggagacccggccatttatcagtcactgaaggcccagaatgcgtattctcgccattgcccgttttacgtcagtattcagtcttactggctaagttttttcatggtgatgatcctgttcgtcgctttcattacttgctgggaggaggtgaccaccctcgtccaagccattcggattacatcctatatgaacgagactatactgtatttccccttttcttcccatagctcatatacagtgcggtcgaagaagatctttcttagcaagctaatcgtgtgctttctctccacctggctcccattcgtgttacttcaagtaatcatcgttttgctgaaggtccagattcctgcgtatatagagatgaatattccatggttatacttcgtgaacagtttcctgattgctacagtctactggtttaattgccataagctcaacctgaaggacatcggtttgcccctcgatcctttcgtgaactggaagtgttgttttatccctctgaccattcccaatctagagcagatcgaaaaaccaattagtattatgatctgctag

SEQ ID NO: 179673 - DNA, 432 bp, Artificial Sequence
  derived and/or modified sequence
atgaccgccctgagcagcgagaactgcagcttccagtaccagctgcggcaaaccaaccagcccctagacgttaactatttgttgttcttgattattctggggaaaatccttctcaacattcttacgttgggcatgcgccgtaagaacacctgccaaaatttcatggaatatttctgcattagtctggcttttgtggatttgctgctgctggtgaatatttccatcattctgtattttcgcgacttcgtgttactctcgatcaggtttacaaagtaccacatctgcctgttcacccagataattagttttacgtatggtttcctccattatcccgtgttcctaacggcctgcatcgattactgcctcaacttcagcaagactacgaaactctcttttaagtgccaaaaacttttttactttttcacggtgtag

SEQ ID NO: 179674 - DNA, 267 bp, Artificial Sequence
  derived and/or modified sequence
atgaccgccctgagcagcgagaactgcagcttccagtaccagctgagacagacaaaccagccgctggacgtcaactatctgttgttcttgatcatcctcggcaaaattctgctcaatattctgaccctgggcatgaggaggaaaaatacttgccagaatttcatggagtatttctgcatcagtcttgctttcgtggaccttctccttctagttaacatttccattattctgtactttcgcgactttgttttgcttagcattcggtag

SEQ ID NO: 179675 - DNA, 102 bp, Artificial Sequence
  derived and/or modified sequence
atgaccgccctgagcagcgagaactgcagcttccagtaccagctgcggcagaccaatcagccacttgacgtaaactatctcctttttctcatcattctctag

SEQ ID NO: 179676 - DNA, 1017 bp, Artificial Sequence
  derived and/or modified sequence
atgacagctttatctagcgagaactgctcctttcagtatcagctcagacaaacaaaccaacctctcgacgtgaattacctcttatttcttatcatactggggaagattctgctgaacatactgacattgggcatgcgcagaaagaacacctgtcagaatttcatggagtacttctgtatcagtctggcgtttgtggatttactgctgttagtgaacatttctattatcttatacttcagggactttgtgctgctcagcataagatttactaaatatcatatttgcttgtttacacagattatcagttttacctatggttttcttcactatccagtcttcctgactgcctgtatagactactgcctcaatttcagcaagacaaccaagctgagcttcaaatgtcagaagctattctatttcttcacggtcatccttatttggatttccgtgctagcatatgtactcggggaccctgccatttatcaaagtctgaaagcgcagaacgcatacagcaggcactgccccttttatgtttctattcagagctactggctgtcctttttcatggtaatgatcctgttcgttgccttcattacatgttgggaagaggtgacaactcttgtgcaagcaatccgcatcaccagttacatgaacgaaaccatcctctactttccattcagtagccactctagttatacggtgcggtccaagaagatcttcttaagcaagttaatagtttgctttctgagtacttggcttccctttgtgttgctgcaggtgataattgtcctactcaaagttcaaattccggcttacatcgagatgaatataccttggctgtattttgtgaattctttcctcattgcaacagtttattggttcaactgccataagctgaacttaaaagacatcggactgcccctggatccctttgtgaattggaagtgctgcttcataccacttaccattcccaatttagaacagattgagaaacctatctccatcatgatctgctag

SEQ ID NO: 179677 - DNA, 432 bp, Artificial Sequence
  derived and/or modified sequence
atgacagcactttcttccgagaattgctcttttcagtaccagctacgtcaaaccaatcagccgcttgacgttaactatctgctgtttctcattattcttggcaagatcctgctaaacatattaaccctcggcatgagacggaagaacacgtgtcaaaacttcatggaatatttttgcatcagcctggcgttcgtggatttactcctgttggttaacatatctattatcttgtattttagggattttgtgctgttgagtatccggtttaccaagtaccacatttgtctgttcacacagattattagcttcacatacggtttcctgcactaccctgtcttcctaacagcctgcattgattactgccttaacttctccaagactactaagctgtctttcaaatgtcaaaaactgttctacttcttcaccgtgtag

SEQ ID NO: 179678 - DNA, 267 bp, Artificial Sequence
  derived and/or modified sequence
atgacagccctaagtagtgaaaactgctcctttcagtaccagctgcgtcaaactaaccagcccctcgatgttaactacctcctgttcctcatcatcttgggcaagattctgctcaatattctgacactggggatgaggagaaaaaatacctgtcagaactttatggagtatttctgcatatccttagctttcgtggacctattgctgctggtgaatatatccataatcctttacttccgggatttcgtgttactgagtatacggtag

SEQ ID NO: 179679 - DNA, 102 bp, Artificial Sequence
  derived and/or modified sequence
atgacggctctgtcaagtgaaaattgcagctttcagtatcagctgcgtcagaccaatcaaccactcgacgtaaactacctgctcttccttattatcctgtag

SEQ ID NO: 179680 - protein, 621 aa, Artificial Sequence
  derived and/or modified sequence
MLLLPSAADGRGTAITHALTSASTLCQVEPVGRWFEAFVKRRNRNASASFQELEDKKELSEESEDEELQLEEFPMLKTLDPKDWKNQDHYAVLGLGHVRYKATQRQIKAAHKAMVLKHHPDKRKAAGEPIKEGDNDYFTCITKAYEMLSDPVKRRAFNSVDPTFDNSVPSKSEAKDNFFEVFTPVFERNSRWSNKKNVPKLGDMNSSFEDVDIFYSFWYNFDSWREFSYLDEEEKEKAECRDERRWIEKQNRATRAQRKKEEMNRIRTLVDNAYSCDPRIKKFKEEEKAKKEAEKKAKAEAKRKEQEAKEKQRQAELEAARLAKEKEEEEVRQQALLAKKEKDIQKKAIKKERQKLRNSCKTWNHFSDNEAERVKMMEEVEKLCDRLELASLQCLNETLTSCTKEVGKAALEKQIEEINEQIRKEKEEAEARMRQASKNTEKSTGGGGNGSKNWSEDDLQLLIKAVNLFPAGTNSRWEVIANYMNIHSSSGVKRTAKDVIGKAKSLQKLDPHQKDDINKKAFDKFKKEHGVVPQADNATPSERFEGPYTDFTPWTTEEQKLLEQALKTYPVNTPERWEKIAEAVPGRTKKDCMKRYKELVEMVKAKKAAQEQVLNASRAKK

SEQ ID NO: 179681 - protein, 202 aa, Artificial Sequence
  derived and/or modified sequence
MLLLPSAADGRGTAITHALTSASTLCQVEPVGRWFEAFVKRRNRNASASFQELEDKKELSEESEDEELQLEEFPMLKTLDPKDWKNQDHYAVLGLGHVRYKATQRQIKAAHKAMVLKHHPDKRKAAGEPIKEGDNDYFTCITKAYEMLSDPVKRRAFNSVDPTFDNSVPSKSEAKDNFFEVFTPVFERNSRVSISKKKKKKR

SEQ ID NO: 179682 - protein, 500 aa, Artificial Sequence
  derived and/or modified sequence
MPSSGRALLDSPLDSGSLTSLDSSVFCSEGEGEPLALGDCFTVNVGGSRFVLSQQALSCFPHTRLGKLAVVVASYRRPGALAAVPSPLELCDDANPVDNEYFFDRSSQAFRYVLHYYRTGRLHVMEQLCALSFLQEIQYWGIDELSIDSCCRDRYFRRKELSETLDFKKDTEDQESQHESEQDFSQGPCPTVRQKLWNILEKPGSSTAARIFGVISIIFVVVSIINMALMSAELSWLDLQLLEILEYVCISWFTGEFVLRFLCVRDRCRFLRKVPNIIDLLAILPFYITLLVESLSGSQTTQELENVGRIVQVLRLLRALRMLKLGRHSTGLRSLGMTITQCYEEVGLLLLFLSVGISIFSTVEYFAEQSIPDTTFTSVPCAWWWATTSMTTVGYGDIRPDTTTGKIVAFMCILSGILVLALPIAIINDRFSACYFTLKLKEAAVRQREALKKLTKNIATDSYISVNLRDVYARSIMEMLRLKGRERASTRSSGGDDFWF

SEQ ID NO: 179683 - protein, 376 aa, Artificial Sequence
  derived and/or modified sequence
MEQLCALSFLQEIQYWGIDELSIDSCCRDRYFRRKELSETLDFKKDTEDQESQHESEQDFSQGPCPTVRQKLWNILEKPGSSTAARIFGVISIIFVVVSIINMALMSAELSWLDLQLLEILEYVCISWFTGEFVLRFLCVRDRCRFLRKVPNIIDLLAILPFYITLLVESLSGSQTTQELENVGRIVQVLRLLRALRMLKLGRHSTGLRSLGMTITQCYEEVGLLLLFLSVGISIFSTVEYFAEQSIPDTTFTSVPCAWWWATTSMTTVGYGDIRPDTTTGKIVAFMCILSGILVLALPIAIINDRFSACYFTLKLKEAAVRQREALKKLTKNIATDSYISVNLRDVYARSIMEMLRLKGRERASTRSSGGDDFWF

SEQ ID NO: 179684 - DNA, 1503 bp, Artificial Sequence
  derived and/or modified sequence
atgccctcttccgggagagccctactggactcaccccttgattccggaagtctgactagcctggattcatccgtcttttgttctgaaggcgagggggagccccttgccctgggagactgtttcaccgtgaacgtggggggctcccgttttgtgctgtcccaacaggctttgagttgttttccccatacccgtctgggtaagcttgccgtggtggtggcaagttaccgcagacctggcgcgctggctgcggtgccttctcccctggaattatgtgacgatgccaacccggtcgacaatgaatatttcttcgatcgcagctcacaggctttcagatatgtactgcactactatcggactgggagacttcatgtaatggagcagctgtgcgccctcagtttcctacaggagatccagtactgggggattgatgagctgtccattgactcctgctgtagggacagatacttccggaggaaagagctctccgaaacgctcgacttcaagaaagataccgaggatcaggaaagtcaacacgagtcagagcaggatttttctcagggtccgtgccccacagtccgacaaaagctatggaacatcctagagaaacccggatcatccaccgccgcccgcatttttggcgtgatctctataatttttgtggtagtgtcaataatcaatatggcccttatgagtgccgagctgtcatggctcgatttacagctcttggagattttggaatacgtctgtatttcctggttcactggagaatttgtgctgcgattcctctgcgtcagagaccggtgccgcttcctcagaaaagtccccaatatcattgacttgctagccatcctgcctttttacattactcttctggtggagtccttatctgggagccagaccactcaggagttagaaaacgtggggagaattgtgcaggtacttcggctgcttagggcgcttcgcatgctgaagcttggccggcattcaaccgggctgcgctctctaggaatgacaatcacccagtgttatgaggaagtggggctcctgctgcttttcctcagtgtgggcattagtatcttttccacagttgaatacttcgctgagcagtctatacccgacacgacatttacaagtgtgccttgcgcctggtggtgggcaactacatcaatgacaacggtcgggtatggggacatccgtccagatactaccactggtaagattgttgcctttatgtgcatcctgagcggcattctggtcctggccctgcctatcgcgatcatcaatgatagattttccgcatgttattttaccttaaaactgaaagaagccgctgtgcgacaacgcgaagcactcaagaagctcactaagaatatcgctaccgacagctacatcagtgttaatctccgcgacgtgtacgcaaggtcaatcatggagatgctccgcctgaagggaagggagagggcttccacccggtcttctgggggtgatgatttctggttctag

SEQ ID NO: 179685 - DNA, 1503 bp, Artificial Sequence
  derived and/or modified sequence
atgccctcgtccggaagagcgttgctggacagtccgcttgattccggctcactcactagcctggatagctcagttttctgttcagagggcgagggagagcctctggccctaggcgactgctttacagttaatgtgggcggctcacgatttgtactgtcccagcaggccctgtcatgtttcccacacacaaggcttggaaagctcgcagtcgttgtggcttcttatagacgacctggcgccctggctgccgtcccttcaccactcgaattgtgtgacgacgccaaccctgtggacaatgagtactttttcgacagatcttcacaggctttccgctatgtgctgcattactaccgcaccgggagattgcacgtgatggagcaactctgcgcactttcgtttttgcaggaaatacagtattggggcattgacgagttgagcattgacagctgctgtcgcgatcggtactttcgacggaaggaactctcggagacactggactttaagaaggacactgaagatcaggagagccagcacgagtcagagcaggatttctcacagggaccatgtcctacagtcaggcaaaagctgtggaacatcttagaaaagccaggttcaagtacagcagccagaatcttcggagttatctctatcatcttcgtcgtggtgagtatcatcaacatggcccttatgagcgccgagctctcatggctagacctgcaactgctggagatccttgaatacgtctgcatctcttggtttacgggtgagttcgtactcaggtttctttgcgttcgcgatcgctgccgctttttgcgtaaagtgcccaatataatcgacctgctggccatactgccgttttatataaccctcctcgttgagagcctgagcggctctcaaacaactcaagaacttgaaaatgtcggtaggatagttcaggttcttcgcctgttgcgcgctctgcggatgctaaagctcggcagacactctacaggcctgagaagtctcggcatgactattactcagtgttatgaagaagtggggctccttctgctttttttatctgtagggatcagcatttttagcaccgtggagtatttcgccgagcagtctatcccagatacgacattcactagcgttccctgtgcctggtggtgggcaactacatctatgacaacagttggctatggtgatatccgacctgacaccacgacagggaagatcgtggcattcatgtgcatcttaagcggaatcctcgtcttggctctgccaattgctatcataaacgataggttttctgcctgttactttacgctgaaactcaaggaggcagctgtgaggcagcgggaggccctgaagaaattgactaaaaacatcgccaccgactcttacatcagcgtgaacctgcgcgatgtctatgccaggtccatcatggagatgctccgcctaaagggacgagagagagccagcacaagatcatcgggcggtgatgacttctggttctag

SEQ ID NO: 179686 - DNA, 1131 bp, Artificial Sequence
  derived and/or modified sequence
atggaacagctatgcgctctcagtttccttcaggagattcaatattggggcatcgatgaacttagcatcgacagctgctgcagagaccggtacttccgcagaaaggaactgtcagaaacccttgatttcaagaaggacacagaagaccaggagagtcagcatgagagcgaacaggacttctcccagggtccatgtccgacagtccgacaaaaattatggaatatcctggagaagcctggatcatctaccgcggcacgtatcttcggcgttatctctataatattcgtggtggtgtctataattaacatggcgctgatgtcagccgaactttcctggcttgatcttcagctcttggagatcctcgagtacgtctgtatatcttggtttacaggggaatttgtgctgcggtttctatgcgtgagggatcgatgtcggttcctgagaaaggtacctaatattattgacctactggccatcctgcctttctatatcaccctgctggtggagtccctgagcggcagccaaacgacccaggagctggagaatgtcggcaggatcgttcaggtgctgagacttctgagggccctgcgaatgctgaaactgggccgccattctaccggcctccggtctctggggatgaccattactcagtgctatgaggaggttggtcttctcctgctgttccttagcgttgggatctctattttctcaacagtggaatattttgcggaacaaagcatccccgacacgaccttcacctcggtgccttgtgcttggtggtgggctaccacgtcaatgaccaccgtgggctatggggacatacggccagatacaacaacaggcaagatcgtcgcctttatgtgcatactatctgggattctggttcttgctctgccaattgcgatcattaacgatagattcagtgcatgttactttactttaaaacttaaagaggcggccgtccgccagagggaagcgttgaagaaactcactaagaacatcgcgacggattcatatatcagcgtgaacctccgggacgtgtacgcaaggtccatcatggaaatgctgcggctgaagggtagagagagggcctctactcgtagcagcgggggcgatgacttctggttttag

SEQ ID NO: 179687 - DNA, 1503 bp, Artificial Sequence
  derived and/or modified sequence
atgcccagcagcggccgggccctgctggacagccccctggacagcggcagcctgaccagcctggacagcagcgtcttctgcagcgagggggagggggagcccctggccctgggggactgcttcaccgtgaatgtgggcggcagcagatttgtgctgagccagcaggccctgagctgcttcccccacacccggctgggcaagctggccgtggtggtggccagctacagaagacctggggccctggccgctgtgcccagccccctggagctgtgtgatgatgccaaccctgtggacaatgagtacttctttgacaggagcagccaggccttccgctacgtgctgcactactacagaacaggccgcctgcacgtgatggagcagctgtgtgccctgtccttcctgcaggagatccagtactggggcattgatgagctgagcattgacagctgctgccgggaccgctacttccggaggaaggagctgtctgagaccctggacttcaagaaggacacagaggaccaggagagccagcacgagagcgagcaggacttcagccagggcccctgccccaccgtgcggcagaagctgtggaacatcctggagaagccaggcagcagcacagctgcccgcatctttggagtcatcagcatcatctttgtggtggtgtccatcatcaacatggccctgatgtctgctgagctgtcctggctggacctgcagctgctggagatcctggagtatgtgtgcatctcctggttcaccggggagtttgtgctgcgcttcctgtgtgtgcgggaccgctgccgcttcctgaggaaggtgcccaacatcatcgacctgctggccatcctgcccttctacatcaccctgctggtggagagcctgagcggcagccagaccacccaggagctggagaatgtgggccgcatcgtgcaggtgctgcggctgctgcgggccctgaggatgctgaagctgggccgccacagcacaggcctgcggagcctgggcatgaccatcacccagtgctatgaggaggtgggcctgctgctgctcttcctgtctgtgggcatcagcatcttcagcacagtggagtactttgctgagcagagcatcccagacaccaccttcacctctgtgccctgtgcctggtggtgggccaccacctccatgaccaccgtgggctatggagacatccggccagacaccaccaccgggaagatcgtggccttcatgtgcatcctgagcggcatcctggtgctggccctgcccatcgccatcatcaatgaccgcttcagcgcctgctacttcaccctgaagctgaaggaggccgctgtgcggcagcgggaggccctgaagaagctgaccaagaacatcgccacagacagctacatctctgtgaacctgagagatgtgtatgcccggagcatcatggagatgctgcggctgaagggccgggagcgggccagcaccaggagcagtggaggagatgacttctggttctag

SEQ ID NO: 179688 - DNA, 1131 bp, Artificial Sequence
  derived and/or modified sequence
atggagcagctgtgtgccctgtccttcctgcaggagatccagtactggggcattgatgagctgagcattgacagctgctgccgggaccgctacttccggaggaaggagctgtctgagaccctggacttcaagaaggacacagaggaccaggagagccagcacgagagcgagcaggacttcagccagggcccctgccccaccgtgcggcagaagctgtggaacatcctggagaagccaggcagcagcacagctgcccgcatctttggagtcatcagcatcatctttgtggtggtgtccatcatcaacatggccctgatgtctgctgagctgtcctggctggacctgcagctgctggagatcctggagtatgtgtgcatctcctggttcaccggggagtttgtgctgcgcttcctgtgtgtgcgggaccgctgccgcttcctgaggaaggtgcccaacatcatcgacctgctggccatcctgcccttctacatcaccctgctggtggagagcctgagcggcagccagaccacccaggagctggagaatgtgggccgcatcgtgcaggtgctgcggctgctgcgggccctgaggatgctgaagctgggccgccacagcacaggcctgcggagcctgggcatgaccatcacccagtgctatgaggaggtgggcctgctgctgctcttcctgtctgtgggcatcagcatcttcagcacagtggagtactttgctgagcagagcatcccagacaccaccttcacctctgtgccctgtgcctggtggtgggccaccacctccatgaccaccgtgggctatggagacatccggccagacaccaccaccgggaagatcgtggccttcatgtgcatcctgagcggcatcctggtgctggccctgcccatcgccatcatcaatgaccgcttcagcgcctgctacttcaccctgaagctgaaggaggccgctgtgcggcagcgggaggccctgaagaagctgaccaagaacatcgccacagacagctacatctctgtgaacctgagagatgtgtatgcccggagcatcatggagatgctgcggctgaagggccgggagcgggccagcaccaggagcagtggaggagatgacttctggttctag

SEQ ID NO: 179689 - DNA, 1503 bp, Artificial Sequence
  derived and/or modified sequence
atgcccagcagcggccgggccctgctggacagccccctggacagcggttcgctgacttccctggacagctcggtcttttgttctgaaggcgagggcgaaccactggctctgggagattgcttcaccgtgaatgttggtggctcccggttcgtgttgtcacagcaagcactttcttgctttccccacacaagactgggaaagttggctgtggttgtcgcctcgtatcgtcgtccaggcgccctagccgccgtgccctccccactggagctgtgcgatgatgcaaaccctgtggataacgagtatttctttgatcggtcaagtcaggcatttaggtacgtacttcactactataggaccgggcgcctccacgtaatggaacaattatgcgccctgtctttcctacaggaaattcaatactggggaatagatgaacttagcattgattcgtgctgccgtgatcgatattttcgacggaaggagctgagtgagaccctcgacttcaagaaggatacagaagaccaggagtcgcagcacgagtcggaacaggatttctcacaaggtccgtgtccaaccgtgcggcagaaactgtggaacatcctggagaagccgggctcatcaaccgccgcgagaatattcggggtgatatctatcatctttgtcgtagttagcatcattaacatggcgctgatgtctgctgaattatcttggctggatctccaacttttagaaattcttgagtacgtttgtatctcttggttcacaggggaatttgtactccgatttctgtgtgtaagggaccgatgtcgctttctcagaaaggtccccaacatcatagacctccttgccattttaccattttacatcaccttgctggtcgaatcactgagtggcagccagactacgcaagaactggagaacgtggggcgaatagtgcaggtcctcagacttttgcgagctttgagaatgctgaaactggggcgccactctactgggctccggtctcttggcatgaccatcacgcagtgctacgaagaggtgggtctgttgctgctcttcctgtccgttggcattagcatctttagtacagttgaatatttcgcggagcagagcattcctgacacaactttcacctctgtcccctgtgcatggtggtgggctaccaccagcatgactaccgttggttacggcgacatccggcctgataccaccacggggaaaatagtagcttttatgtgcattcttagcgggatcttggttcttgcacttcccattgcaatcattaatgatcgcttctcagcctgctacttcaccctcaaactgaaagaagccgccgtacggcagagggaagccctaaaaaagctaaccaagaatattgccaccgacagttacatttccgtaaaccttagagacgtctatgcacgatctattatggagatgcttaggttgaaggggcgtgagagggcttccaccagatcttccggaggggacgacttttggttttag

SEQ ID NO: 179690 - DNA, 1503 bp, Artificial Sequence
  derived and/or modified sequence
atgcccagcagcggccgggccctgctggacagccccctggacagcggttccctgacgtcactggactcctcagtcttctgctcagagggagagggagagcctctcgctctgggagattgcttcacagtcaatgtgggcggatcacgctttgtgctgtctcagcaggcccttagttgttttccccatacccgactcggtaagctcgcggtggtcgtggcatcttaccgacgtccaggcgctctcgcggccgtgccaagcccactggagctatgcgacgatgccaaccccgtggacaatgagtatttcttcgatcgctctagccaggcatttcgctatgttttgcattactatcgcacaggccgcctccacgttatggaacagctgtgcgccctgtcattcttacaagagatccagtactggggtattgacgagttatccatcgatagctgttgccgggatcgatatttcagacggaaggagctgtctgaaaccctggactttaagaaagataccgaggatcaggagtcacagcacgagtcagagcaagacttctcacagggtccttgccctaccgtgcggcagaaactgtggaatatcctcgagaagccaggttctagtaccgctgctagaatcttcggagtgatatctatcatattcgtggtggtgtcgattatcaacatggcgttgatgtctgcagagctgagttggctggatctgcagttgctggagatcctggagtatgtgtgcatcagctggttcaccggcgagttcgtgctgcgatttttgtgcgttcgcgatcgttgtcggttcctgagaaaagtgcctaacattattgatctgttagcaatcctccccttttacattacgctcctggttgagagcctcagtggtagccagacaacccaagaactggagaacgtgggccgaatcgttcaggttttgaggctgcttcgcgcactgaggatgctgaaactgggccggcattccaccggcctgcgaagtctggggatgaccattacacaatgctacgaggaagtcggcctgttgcttcttttcctttcagtgggaatctctatcttctccaccgtcgaatatttcgcggagcagagcattcccgacacgaccttcacctctgtgccatgtgcgtggtggtgggccacaaccagcatgacaacagtggggtatggcgacatccggcccgacaccaccacgggaaaaattgtggcctttatgtgtattttatcaggcatcctggtcctcgctctccccatcgctatcatcaacgatagattctccgcctgttattttaccttgaaattaaaagaggcagccgtgaggcagcgagaagctcttaagaaactcacaaagaacatcgcaacagatagttatataagtgtaaatcttcgcgacgtgtatgcacggtctatcatggaaatgttgcgtctcaaaggcagagaaagggcaagcactcgcagcagcggcggcgacgacttttggttttag

SEQ ID NO: 179691 - DNA, 1131 bp, Artificial Sequence
  derived and/or modified sequence
atggagcagctgtgcgccctgagcttcctgcaggagatccagtactggggcattgacgagctctctattgactcctgctgccgggataggtatttccgtcgaaaagagctgtccgagaccctggatttcaaaaaagacacagaggaccaggagtctcagcacgagtcagaacaagacttttcccagggcccttgtccaacggtgcgccaaaagttgtggaacatacttgagaagcccgggagctcaacagccgcgcggatcttcggcgtgatcagcatcatctttgtggtggtgtccatcattaatatggctctgatgagcgccgaacttagctggcttgatctgcagctgctggagattttggaatacgtgtgtattagctggtttacaggggaatttgtgcttcgtttcttgtgtgtgcgcgaccgctgtcgctttctgcggaaggtccctaacataatcgatctgctggctatcttacccttctatataacgctgctggtcgaatcactgtccggtagccaaaccacccaagagcttgaaaatgtgggaaggatagttcaggtcctacgcctgttgagagctctgcggatgcttaagctggggagacacagcaccggcctgagaagtctgggcatgacaatcacccagtgttatgaagaggtcgggctgcttctacttttcctcagtgtgggaatctctatctttagcacggtggaatactttgctgaacagagtatccccgacacaacatttacctccgtgccatgtgcgtggtggtgggctactaccagcatgactacagtcggatatggcgacattcgaccagatactaccacaggtaaaattgtcgctttcatgtgcattctgtcaggaattttggtgcttgctttgccaatcgcaatcattaatgatcgctttagcgcctgttattttaccctcaagcttaaagaagccgctgtgcggcagagagaggcattaaagaagctgaccaagaatatcgctaccgattcgtacatatccgtgaatttgcgcgatgtgtatgccaggagcataatggagatgctccgattgaagggtagggagcgtgcctctactcggtcgtcaggaggcgacgatttctggttctag

SEQ ID NO: 179692 - DNA, 2927 bp, Artificial Sequence
  derived and/or modified sequence
ggtgacaacgtttgggaagggccagggcgaccggcagtgtgcacagggactgtgtcgggcttggacctcacctgatcctctctcttagcgcgacccttcctctgctccctgtctcctctttctgccacttgtgcgctgcttccgcgcactcccggctccctagcggcaggaggaggaaggcgcacagcgggtggagagggtgcgccaaggagaggtaaccccttcgggagcccggggaatcccggccgccaccaggggccgtgccaccgccctcgcgggaccaaagcttccggcgtgtccccaactttgtggcgccctcaggccgcggcgactgggttagagatgccttccagcggcagagcgctgctggactcgccgctggacagcggctccctgacctccctggactctagtgtcttctgcagcgagggtgaaggggagcccttggcgctcggggactgcttcacggtcaacgtgggcggcagccgcttcgtgctctcgcagcaggcgctgtcctgcttcccgcacacgcgccttggcaagctggccgtggtggtggcttcctaccgccgccccggggccctggccgccgtgcccagccctctggagctttgcgacgatgccaaccccgtggacaacgagtacttcttcgaccgcagctcgcaggcgttccgatatgtcctgcactactaccgcaccggccgcctgcatgtcatggagcagctgtgcgcgctctccttcctgcaggagatccagtactggggcatcgatgagctcagcatcgattcctgctgcagggacagatacttcagaaggaaagagctgagtgaaactttagacttcaagaaggacacagaagaccaggaaagtcaacatgagagtgaacaggacttctcccaaggaccttgtcccactgttcgccagaagctctggaatatcctggagaaacctggatcttccacagctgcccgtatctttggcgtcatctccattatcttcgtggtggtgtccatcattaacatggccctgatgtcagctgagttaagctggctggacctgcagctgctggaaatcctggagtatgtgtgcattagctggttcaccggggagtttgtcctccgcttcctgtgtgtgcgggacaggtgtcgcttcctaagaaaggtgccaaacatcatagacctccttgccatcttgcccttctacatcactcttctggtagagagcctaagtgggagccagaccacgcaggagctggagaacgtggggcgcattgtccaggtgttgaggctgctcagggctctgcgcatgctaaagctgggcagacattccacaggattacgctcccttgggatgacaatcacccagtgttacgaagaagtcggcctactgctcctatttctatccgtgggaatctctatattttcaactgtagaatactttgctgagcaaagcattcctgacacaaccttcacaagtgtcccttgtgcatggtggtgggccaccacctctatgactactgtgggatatggggacattagaccagacaccaccacaggcaaaatcgtggccttcatgtgtatattatcgggaattcttgtcttggccttgcctattgctattattaacgatcgcttctctgcttgctacttcaccttgaaactcaaggaagcagctgttagacagcgtgaagccctaaagaagcttaccaagaatatagccactgactcatatatcagtgttaacttgagagatgtctatgcccggagtatcatggagatgctgcgactgaaaggcagagaaagagcaagtactaggagcagcgggggagatgatttctggttttgaattaattttcaatttatttacaaaagctatgtacaattaactaaaatgataaagcagtgatgtggatttctgtattctgatgatgagtctcttcagagtactgctcatcttaattaatttttgctgatatattgcttcatctactagaatatttcacatcacctataacaactgcacagtgttctgacacatttgagtgtccaaaatagccaattaacacaaccaaatacaactgggccaatataaacatgtttgaattgtcaaatataaaataatgttattgcaatacatacaaaaaagttaaagattttatgtatcactaacattagaagttttttgcaccactaattttttaaaaatggaaggtaaactgcatagcccagagaaagataagtaaatatttaagaacatattgaacaactttgctatttaaagatattatccaagtacataaattactccgttctctatcagttaaagctattgaatataatacttagctttacaagagaaaacccatatttgatgggcagagattatatccctatcttctttttcatgtaaaccactggtcacaaatgaactgatctctgtatcccattattactataagaggtgggaatcccaaaactgcttagattgcagtacatgagtctacacaaagacttcaacaattgcacatcttcattctcccaactgagtgtagtatgtggagcataaaacagcatatttcttagtatttcatgaatatcagatggtctttaaatgtctctttatggatgtattgttcacattatggctttaaaataatgaatatgtaaaagtgaggtagtgaacatcctaaatttctacactggaattactaaataatcttatttcataaaatgggaaatatatgttaaatgacatcactggatgaacttgaagatcttttacttgttaacaaaaaaatactatggacagctttctgattgttggggtaaatagcaaatgttcaaactttgcaggcattttgacattcatcataacaacacaattcctagacattgtattatataattaaagccaaaacctctaaagct

SEQ ID NO: 179693 - DNA, 6979 bp, Artificial Sequence
  derived and/or modified sequence
agagcgggcggggcggacacgcttagcgtaagcgcaggggccaggagcccggagggaggtggaggcggggcaaggcaaggcagcaggcgctgggtagagctcagctggaacacagtttccctcctggaccggtcgagtcagacctcacgtgtagactaagaggatcaaaagaagagtacgttacctgcggcgccggttgtgcgcagaccagatgtgccgggagctgcaggaggtcagaacctaagggagacggcggaagaaaatggagcgtcagtgatcatcagactagaatgagagtgaattgggagaaaatggtgcggccccctcacccagagaaccctcccccacctgctcacacccccagcgaacaccccgggggaggcctatgaagcagcagtaaaagaaaagggaggaatataaattctcaagttggaagggacccggttaccacttcctttgctttctgaactttttgttttggtctcctgcgggcaggagtgagtctcgccatcccccttgcttgcttgcttgcttgcgttcagctaagagtcatcttctctcctcttcctcctcctccgccccacatctccctccttcctcccttccccaacccctccacccaccaagtagcgagtcattcaatctgtacacctcctgggctgggaatcgcaattgcgaagttgggaggcggggtgacaacgtttgggaagggccagggcgaccggcagtgtgcacagggactgtgtcgggcttggacctcacctgatcctctctcttagcgcgacccttcctctgctccctgtctcctctttctgccacttgtgcgctgcttccgcgcactcccggctccctagcggcaggaggaggaaggcgcacagcgggtggagagggtgcgccaaggagaggtaaccccttcgggagcccggggaatcccggccgccaccaggggccgtgccaccgccctcgcgggaccaaagcttccggcgtgtccccaactttgtggcgccctcaggccgcggcgactgggttagagatgccttccagcggcagagcgctgctggactcgccgctggacagcggctccctgacctccctggactctagtgtcttctgcagcgagggtgaaggggagcccttggcgctcggggactgcttcacggtcaacgtgggcggcagccgcttcgtgctctcgcagcaggcgctgtcctgcttcccgcacacgcgccttggcaagctggccgtggtggtggcttcctaccgccgccccggggccctggccgccgtgcccagccctctggagctttgcgacgatgccaaccccgtggacaacgagtacttcttcgaccgcagctcgcaggcgttccgatatgtcctgcactactaccgcaccggccgcctgcatgtcatggagcagctgtgcgcgctctccttcctgcaggagatccagtactggggcatcgatgagctcagcatcgattcctgctgcagggacagatacttcagaaggaaagagctgagtgaaactttagacttcaagaaggacacagaagaccaggaaagtcaacatgagagtgaacaggacttctcccaaggaccttgtcccactgttcgccagaagctctggaatatcctggagaaacctggatcttccacagctgcccgtatctttggcgtcatctccattatcttcgtggtggtgtccatcattaacatggccctgatgtcagctgagttaagctggctggacctgcagctgctggaaatcctggagtatgtgtgcattagctggttcaccggggagtttgtcctccgcttcctgtgtgtgcgggacaggtgtcgcttcctaagaaaggtgccaaacatcatagacctccttgccatcttgcccttctacatcactcttctggtagagagcctaagtgggagccagaccacgcaggagctggagaacgtggggcgcattgtccaggtgttgaggctgctcagggctctgcgcatgctaaagctgggcagacattccacaggattacgctcccttgggatgacaatcacccagtgttacgaagaagtcggcctactgctcctatttctatccgtgggaatctctatattttcaactgtagaatactttgctgagcaaagcattcctgacacaaccttcacaagtgtcccttgtgcatggtggtgggccaccacctctatgactactgtgggatatggggacattagaccagacaccaccacaggcaaaatcgtggccttcatgtgtatattatcgggaattcttgtcttggccttgcctattgctattattaacgatcgcttctctgcttgctacttcaccttgaaactcaaggaagcagctgttagacagcgtgaagccctaaagaagcttaccaagaatatagccactgactcatatatcagtgttaacttgagagatgtctatgcccggagtatcatggagatgctgcgactgaaaggcagagaaagagcaagtactaggagcagcgggggagatgatttctggttttgaattaattttcaatttatttacaaaagctatgtacaattaactaaaatgataaagcagtgatgtggatttctgtattctgatgatgagtctcttcagagtactgctcatcttaattaatttttgctgatatattgcttcatctactagaatatttcacatcacctataacaactgcacagtgttctgacacatttgagtgtccaaaatagccaattaacacaaccaaatacaactgggccaatataaacatgtttgaattgtcaaatataaaataatgttattgcaatacatacaaaaaagttaaagattttatgtatcactaacattagaagttttttgcaccactaattttttaaaaatggaaggtaaactgcatagcccagagaaagataagtaaatatttaagaacatattgaacaactttgctatttaaagatattatccaagtacataaattactccgttctctatcagttaaagctattgaatataatacttagctttacaagagaaaacccatatttgatgggcagagattatatccctatcttctttttcatgtaaaccactggtcacaaatgaactgatctctgtatcccattattactataagaggtgggaatcccaaaactgcttagattgcagtacatgagtctacacaaagacttcaacaattgcacatcttcattctcccaactgagtgtagtatgtggagcataaaacagcatatttcttagtatttcatgaatatcagatggtctttaaatgtctctttatggatgtattgttcacattatggctttaaaataatgaatatgtaaaagtgaggtagtgaacatcctaaatttctacactggaattactaaataatcttatttcataaaatgggaaatatatgttaaatgacatcactggatgaacttgaagatcttttacttgttaacaaaaaaatactatggacagctttctgattgttggggtaaatagcaaatgttcaaactttgcaggcattttgacattcatcataacaacacaattcctagacattgtattatataattaaagccaaaacctctaaagctaagaactagctcatgattcccattattttagtaaatgagattctacaacctaagaataacaaggaatgcatcactttaatacctacatttccaatataatagagcccccaaggggaagaaaattggttcttgaggaaaaaaaaatcttatcacttcatttacaaaacacagataagcatattgagtatatctgtggtattaacatttcatgggggtgagatgttagggaaaaaagcctagaaggctctttgccaggggtgaatggtgataagaaataaacattgaggactgctttaatatatagctataaggtatttcataaactctatttaagacatcatattatgctatgcactaccaagaaagaaagatgccagtcaattgtaagatgccattaactgtaaaatgcatccggatttcagatatgtaaaaatttaaaataagcaccttaaaatcaatgaaatatcgcatgtactacctcctgttttctggtatgcatggttaagctctgaaaacattttcactgatggcatgagttttagattgtgtgctaaagtactttaattcatttaacttgtttccacttctcctaaatattataaaaggttcaggagatatgaatattagtaagataaatattttacttcttacacacatacatgggtgctagattgtggcacagggccactagtcatagtataaatcccttccacaatctgaagggaaagtagaagttagacacagaaggtaaacttactccagcttttctagaactttccctaataagaatagttactctgatccaggactatgctctgtattcatcatgtattatgccattttatcctcaaaatatccctattatataattactattcttatactcttcaaaatacatattttatatatttattaactcaacaaatatttattaaggatctttggtgttctggggactagggagtctttcttaaacaagactaggtcctgttttcttgtagttaatattctgttcaaaggtgtgtgaggaaaagacagcgaaactgaaacattaaaaggtataaacttgcctaaattcacacaggctatagatggcagagccagcgctgaataccaatctgcctgacccggaaaacgacactcctaaaagtcaaattgcagatttcattcttcctacacaagctctgcatagaaatttattttttaggcaggcaagccaacttcttgtgcatggagaagttcaatatgccttaagtaaaatatcagcttattctcagaggtggaatggtgcttttaagaaaaggctgtggtgacaccttatagtcattattagattaaaaatatattatctttagagtaaatagtagttggaaataaaaaaaattaaaaactatgtgtatacatatgtatatatgtttttatcatggaggatcctaaacatcttctctacaaatgtgctgttagctatataaatgttgtcaagatgtaggtcttcagaaagaagttttaaaatatcattgcttactcaattttgctgttaaataaaatatcattttatttattcaatgaatgtatatataagcaaaccaaatttcatttaggtaaaaaaatcaaggcaggaactctgccaattttataacccattattttaaaacagtaaacactttttaaacatctaagaattattgttataaaacaatatttaattttttaaaatataaaataattgaattattgtctttctctaagctatttagagaacactactttctttgttttgttttggtttggttttttgagacggagtgtccgtctgtcgcccaggctggagtgccagtggcgcgatctcggctcactgcaagctccacctcttgggttcacaccattctcctgcgtcaacctcgcgagtagctgggactagaggcgcccgccaccacgcctggctaattttttgtatttttagcagagacggggtttcaccgtgttagccactttctttgttaatttaactgttattttaagttcagggatacatgtgcgggtttgttatacaggtaatcttgtgtcatgagagtttttttgcacggattatttcatcacccaggtattaaacctagcaccagttatttttcctgattctctccctcctcctacccagcaccctctgataggccccaatgtgtgttgtttccctctatgtgttcatgtgctctcatcatttagctcccacttataagtgagaacatgtggtatttggttttctcttcctgcattagtttgctaaggataatagcctccagctccatccatgtccctgcaaatgacatgatctcattctttcatatggctggatagtacttcatggtgtatacatacattttctttatccagtctacagttgatgggcatttaggtttattccatgtctttgctactgtgaataatgctgcattgaacatacgtgtgcatgtatctttataataaaacaatttatatttcttgggtatatacccattaatgggattgctggatccagtggtatttctgtttttaggtctttgaggaattgccacactctcacatggctgaactaatttacactcccagtatcagtgtatatgcgttccaattgctccataacttcgccagcatctgcttttttttttttgctttttaataatagccattctgactagtgtgagatggtatctcattatggttttgatttgcgtttctctaatgatcagtgatattgaggctttttttcatatcattgttggctgcatgtatgttttcttttgaaaagtgtctgttcatatcctttgcccactttttaatgggatttttttttcttgtaaatttgtttaagtttcttatagatgctggaatattagacttttgtagatgtatagtttgcaaatattttcccccaatctgtaggttgtctgttcactctgttgataggttcctttgctctgacaaagctctagagtttaattagatcccatttgccaatttttgctttcgttgcaaccaccttttgtgtcttcatcatgaaatctttgcctgttagaaaacactactttcagacatttaaatgcatataggcaatgcttaagtacctaaaaaagcaattttaagaaattactgaggtatctctattaagagtgacatattcatattttattttatgtatatattatttctataacatacaagaaattgttgcatttatcattttaatgcaaagtagtatcaagtataatggattagatgcaaaaataactgaggtaggaatctcagttctgtgttttaatgtggaattcttatgcttattaaaatattttgattagctgttgca

SEQ ID NO: 179694 - DNA, 1940 bp, Artificial Sequence
  derived and/or modified sequence
aatctgtacacctcctgggctgggaatcgcaattgcgaagttgggaggcggggtgacaacgtttgggaagggccagggcgaccggcagtgtgcacagggactgtgtcgggcttggacctcacctgatcctctctcttagcgcgacccttcctctgctccctgtctcctctttctgccacttgtgcgctgcttccgcgcactcccggctccctagcggcaggaggaggaaggcgcacagcgggtggagagggtgcgccaaggagaggtaaccccttcgggagcccggggaatcccggccgccaccaggggccgtgccaccgccctcgcgggaccaaagcttccggcgtgtccccaactttgtggcgccctcaggccgcggcgactgggttagagatgccttccagcggcagagcgctgctggactcgccgctggacagcggctccctgacctccctggactctagtgtcttctgcatgtcatggagcagctgtgcgcgctctccttcctgcaggagatccagtactggggcatcgatgagctcagcatcgattcctgctgcagggacagatacttcagaaggaaagagctgagtgaaactttagacttcaagaaggacacagaagaccaggaaagtcaacatgagagtgaacaggacttctcccaaggaccttgtcccactgttcgccagaagctctggaatatcctggagaaacctggatcttccacagctgcccgtatctttggcgtcatctccattatcttcgtggtggtgtccatcattaacatggccctgatgtcagctgagttaagctggctggacctgcagctgctggaaatcctggagtatgtgtgcattagctggttcaccggggagtttgtcctccgcttcctgtgtgtgcgggacaggtgtcgcttcctaagaaaggtgccaaacatcatagacctccttgccatcttgcccttctacatcactcttctggtagagagcctaagtgggagccagaccacgcaggagctggagaacgtggggcgcattgtccaggtgttgaggctgctcagggctctgcgcatgctaaagctgggcagacattccacaggattacgctcccttgggatgacaatcacccagtgttacgaagaagtcggcctactgctcctatttctatccgtgggaatctctatattttcaactgtagaatactttgctgagcaaagcattcctgacacaaccttcacaagtgtcccttgtgcatggtggtgggccaccacctctatgactactgtgggatatggggacattagaccagacaccaccacaggcaaaatcgtggccttcatgtgtatattatcgggaattcttgtcttggccttgcctattgctattattaacgatcgcttctctgcttgctacttcaccttgaaactcaaggaagcagctgttagacagcgtgaagccctaaagaagcttaccaagaatatagccactgactcatatatcagtgttaacttgagagatgtctatgcccggagtatcatggagatgctgcgactgaaaggcagagaaagagcaagtactaggagcagcgggggagatgatttctggttttgaattaattttcaatttatttacaaaagctatgtacaattaactaaaatgataaagcagtgatgtggatttctgtattctgatgatgagtctcttcagagtactgctcatcttaattaatttttgctgatatattgcttcatctactagaatatttcacatcacctataacaactgcacagtgttctgacacatttgagtgtccaaaatagccaattaacacaaccaaatacaactgggccaatataaacatgtttgaattgtcaaatataaaataatgttattgcaatacatacaaaaaagttaaagattttatgtatcactaacattaga

SEQ ID NO: 179695 - DNA, 1503 bp, Artificial Sequence
  derived and/or modified sequence
atgcccagttcaggcagggccctactagacagcccgctcgacagtggatccctgaccagtctggatagcagcgtattctgcagcgagggcgagggagaacccctagcactaggcgattgtttcaccgtaaacgtgggcggaagccgattcgtcttaagtcagcaggctctgagctgcttcccgcacacccgcctaggcaaacttgccgtggtggtcgcatcatacaggagacccggagcgctggctgccgtgccgagccccttagagctgtgtgacgacgcaaacccagtcgataatgagtacttctttgacagatctagccaggcctttcgctatgtgcttcactattaccgcaccggcagattgcacgttatggagcagctctgcgctttgtctttcctgcaagagattcagtactgggggattgacgagctgtcaatcgacagttgctgtcgggacaggtactttaggcggaaggaactctcagaaaccttggatttcaagaaagataccgaagatcaggagagccaacatgaatcggagcaggacttctcacaagggccttgcccaacagttcgacagaaactgtggaatattctggaaaaacctggatcatctacagcggcaagaatattcggcgtaatttctatcatcttcgtggtcgtaagcattatcaatatggcactgatgtcagctgagctctcttggctagacctgcagctgttagaaattctcgaatacgtttgtatcagttggttcacgggcgagttcgtgctaagatttctgtgtgtacgcgacaggtgtcgtttccttcgtaaagtgcctaacatcatcgatctgctcgctatcctaccattctacataactctgctggtggagagtttgtctggatcccagacaacacaggaactggagaacgtaggccgaatcgtacaggtgttacgcctccttcgggcactgagaatgctaaagctgggacggcacagtactgggctgcgcagtctgggtatgaccattacgcagtgttatgaggaggtagggctcctactcctgttcttgtccgtgggaatcagcatattctccacagtcgagtactttgctgagcagtccatacccgacacaacgtttacgtctgtgccttgtgcttggtggtgggctaccactagcatgacaacagtgggttacggcgatatccgtccagataccacaactgggaagattgtggcgtttatgtgtattttatcagggatcttggtgctggccctgccaattgcaattatcaacgatcgcttttcagcatgctacttcacactgaaactcaaggaagccgcagtcaggcagcgcgaggcgctgaagaagctcacgaagaacatagccaccgactcgtatatcagcgtgaatctgagggatgtatacgctcggagcatcatggagatgctccggctgaagggccgagaaagagcaagtactcggtcttccggcggagacgatttctggttctag

SEQ ID NO: 179696 - DNA, 1503 bp, Artificial Sequence
  derived and/or modified sequence
atgcccagcagcggcagggcactgcttgactcacctctcgactcaggctctctcacaagcctggacagctccgtgttctgtagcgaaggggagggcgaaccgctcgcccttggcgattgctttacagtgaacgtggggggatctcgattcgtcctctcccaacaggctttatcgtgctttcctcacacacgcttgggaaaactggctgtagttgttgcctcatataggcggccaggcgcacttgctgccgtgccgtctccgctcgaactttgtgacgacgccaaccctgtggataacgagtacttttttgatcgcagcagtcaggctttccgatatgttctccattattatcggaccgggaggcttcatgtgatggagcaactgtgtgctttaagtttcctgcaggagatccagtattggggtattgacgaactgagtattgattcttgttgccgggatcggtatttcagacggaaagagctaagcgagacattagactttaagaaggacacagaggaccaggaatctcagcatgagagtgagcaggacttctcacagggcccatgccccactgtacgtcaaaagctgtggaatatactggaaaagccagggtcctctaccgctgctcggatcttcggggtcataagcattatcttcgtagtagtaagcataatcaatatggctctcatgagtgcagagctgagctggctagatctgcagctgttggagatcctcgaatacgtgtgtatctcatggttcacaggcgagttcgtgttgcgatttctttgcgttagggaccggtgccgcttcctgaggaaggtccccaacatcattgatctgctagccatcctccctttctacatcactctgttggttgaatcactctccggaagccagacaacccaggagctggagaacgtggggcgaatcgtgcaggtgctccggctcctgcgcgcactacgtatgttgaaactcggtaggcactcaaccggtctgaggagtttgggcatgactataacacaatgctacgaggaagtgggactccttctgctgttcctgagcgtcggtatttccatcttctcgacggtggaatacttcgccgagcagtccattcctgatacaacctttaccagcgtaccatgtgcctggtggtgggctactacctcaatgacaaccgtggggtacggcgatatccgtccagacactacaacaggaaaaatcgtggccttcatgtgcatcctgagtggtatcctagttttggcacttccgattgccattatcaacgaccgtttttccgcctgctacttcacattaaagctgaaggaggcggcagtgcgccagagagaagcacttaagaaactgacaaagaacattgccaccgactcctatatctctgtgaacctcagagacgtctatgcgcgtagtattatggaaatgctgagactcaagggcagggaaagggccagcaccagatccagcggcggtgatgatttctggttttag

SEQ ID NO: 179697 - DNA, 1131 bp, Artificial Sequence
  derived and/or modified sequence
atggaacagctgtgcgcactatccttcctccaggaaatacagtactggggcattgacgaactctctattgattcctgctgccgggaccgatactttcgcagaaaggagttaagcgaaactttggatttcaagaaggacactgaggaccaggaaagccagcatgaaagcgaacaagacttcagccagggcccttgtccaacggtgcggcaaaagttgtggaacattcttgagaaacctgggtcctctacggcggctcgcatttttggagtgatatctattatattcgtcgtggtctccattattaacatggctctcatgagcgccgagctgtcatggctggatctgcagctgctggagattctggagtacgtatgtattagttggtttaccggcgagttcgtcctgaggtttttgtgtgtccgcgatcggtgcagatttttaagaaaggtcccaaacatcatcgacttactggcgatcctgccgttttatattactctcctagttgaatccctgagcggatctcagaccacacaggagttggagaacgtcggaaggattgtccaggtgctgagacttctacgggctctgcgtatgttaaagctcggcaggcatagcacgggcctcaggagtctcggaatgactatcacccaatgttatgaagaggtgggactgctactgctgttcttatccgttgggatatctatcttttccaccgtggagtacttcgctgagcaaagcattcctgacactacattcacgtccgtaccctgtgcttggtggtgggctacgacatctatgaccaccgttggctacggagatatccgacccgatactaccaccggaaaaattgtggcctttatgtgtatcctgagtgggatcttagtcctggctctccccattgcaatcatcaacgatcgcttctccgcgtgctatttcacccttaaactaaaggaagccgctgtgagacagagggaggctttgaagaagctgaccaaaaatattgctactgattcttacatttcagtgaacctgagggatgtatacgctagatcaattatggagatgcttagattaaagggccgagaaagggcttcaacgagatcttcaggcggagacgatttctggttttag

SEQ ID NO: 179698 - DNA, 1503 bp, Artificial Sequence
  derived and/or modified sequence
atgcccagcagcggcagagccctgctggacagccccctggacagcggcagcctgaccagcctggacagcagcgtgttctgcagcgagggcgagggcgagcccctggccctgggcgactgcttcaccgtgaacgtgggcggcagcagattcgtgctgagccagcaggccctgagctgcttcccccacaccagactgggcaagctggccgtggtggtggccagctacagaagacccggcgccctggccgccgtgcccagccccctggagctgtgcgacgacgccaaccccgtggacaacgagtacttcttcgacagaagcagccaggccttcagatacgtgctgcactactacagaaccggcagactgcacgtgatggagcagctgtgcgccctgagcttcctgcaggagatccagtactggggcatcgacgagctgagcatcgacagctgctgcagagacagatacttcagaagaaaggagctgagcgagaccctggacttcaagaaggacaccgaggaccaggagagccagcacgagagcgagcaggacttcagccagggcccctgccccaccgtgagacagaagctgtggaacatcctggagaagcccggcagcagcaccgccgccagaatcttcggcgtgatcagcatcatcttcgtggtggtgagcatcatcaacatggccctgatgagcgccgagctgagctggctggacctgcagctgctggagatcctggagtacgtgtgcatcagctggttcaccggcgagttcgtgctgagattcctgtgcgtgagagacagatgcagattcctgagaaaggtgcccaacatcatcgacctgctggccatcctgcccttctacatcaccctgctggtggagagcctgagcggcagccagaccacccaggagctggagaacgtgggcagaatcgtgcaggtgctgagactgctgagagccctgagaatgctgaagctgggcagacacagcaccggcctgagaagcctgggcatgaccatcacccagtgctacgaggaggtgggcctgctgctgctgttcctgagcgtgggcatcagcatcttcagcaccgtggagtacttcgccgagcagagcatccccgacaccaccttcaccagcgtgccctgcgcctggtggtgggccaccaccagcatgaccaccgtgggctacggcgacatcagacccgacaccaccaccggcaagatcgtggccttcatgtgcatcctgagcggcatcctggtgctggccctgcccatcgccatcatcaacgacagattcagcgcctgctacttcaccctgaagctgaaggaggccgccgtgagacagagagaggccctgaagaagctgaccaagaacatcgccaccgacagctacatcagcgtgaacctgagagacgtgtacgccagaagcatcatggagatgctgagactgaagggcagagagagagccagcaccagaagcagcggcggcgacgacttctggttctag

SEQ ID NO: 179699 - DNA, 1131 bp, Artificial Sequence
  derived and/or modified sequence
atggagcagctgtgcgccctgagcttcctgcaggagatccagtactggggcatcgacgagctgagcatcgacagctgctgcagagacagatacttcagaagaaaggagctgagcgagaccctggacttcaagaaggacaccgaggaccaggagagccagcacgagagcgagcaggacttcagccagggcccctgccccaccgtgagacagaagctgtggaacatcctggagaagcccggcagcagcaccgccgccagaatcttcggcgtgatcagcatcatcttcgtggtggtgagcatcatcaacatggccctgatgagcgccgagctgagctggctggacctgcagctgctggagatcctggagtacgtgtgcatcagctggttcaccggcgagttcgtgctgagattcctgtgcgtgagagacagatgcagattcctgagaaaggtgcccaacatcatcgacctgctggccatcctgcccttctacatcaccctgctggtggagagcctgagcggcagccagaccacccaggagctggagaacgtgggcagaatcgtgcaggtgctgagactgctgagagccctgagaatgctgaagctgggcagacacagcaccggcctgagaagcctgggcatgaccatcacccagtgctacgaggaggtgggcctgctgctgctgttcctgagcgtgggcatcagcatcttcagcaccgtggagtacttcgccgagcagagcatccccgacaccaccttcaccagcgtgccctgcgcctggtggtgggccaccaccagcatgaccaccgtgggctacggcgacatcagacccgacaccaccaccggcaagatcgtggccttcatgtgcatcctgagcggcatcctggtgctggccctgcccatcgccatcatcaacgacagattcagcgcctgctacttcaccctgaagctgaaggaggccgccgtgagacagagagaggccctgaagaagctgaccaagaacatcgccaccgacagctacatcagcgtgaacctgagagacgtgtacgccagaagcatcatggagatgctgagactgaagggcagagagagagccagcaccagaagcagcggcggcgacgacttctggttctag

SEQ ID NO: 179700 - DNA, 336 bp, Artificial Sequence
  derived and/or modified sequence
atggccaacatacaccaggagaacgaggaaatggagcaaccgatgcaaaatggtgaggaggatcgcccgttgggaggaggcgaaggccatcagccggccggaaaccgtaggggacaggcgcgacgcctggcacccaattttaggtgggcgatacctaaccgccagattaacgatggcatggggggggacggggatgacatggaaattttcatggaggagatgagggagatcaggcgtaagttgagggaactccaattgaggaattgtctgcggatccttatgggcgaactgtcaaaccatcacgaccatcacgacgaattctgcctcatgccttag

SEQ ID NO: 179701 - DNA, 336 bp, Artificial Sequence
  derived and/or modified sequence
atggccaacattcaccaggaaaatgaggagatggagcagcctatgcagaatggggaagaggacaggccccttgggggtggcgaagggcaccaacccgccggcaatcgaagggggcaggcccgtaggttggcccctaattttagatgggcaatccccaaccgccagataaacgatggaatggggggagacggagatgatatggagatctttatggaggagatgcgagaaatccgaaggaagctccgtgagctgcagctgagaaattgcttgagaatacttatgggtgaactgagcaatcatcatgaccaccacgacgaattctgcctgatgccttag

SEQ ID NO: 179702 - DNA, 336 bp, Artificial Sequence
  derived and/or modified sequence
atggcaaacattcaccaagaaaatgaagaaatggaacaacctatgcagaacggagaggaagatcgtcctctgggcgggggtgaaggccatcagcctgctggcaatcggcgggggcaagcgagaagacttgctccaaacttccgctgggcaatccccaaccgtcagatcaacgacggtatgggtggcgacggggatgacatggaaatcttcatggaagaaatgcgcgaaattcgccggaagttgagagaactgcagctgagaaactgtttacgcatcttgatgggtgaattgtcgaaccatcacgaccatcacgacgaattttgcttaatgccctag

SEQ ID NO: 179703 - DNA, 336 bp, Artificial Sequence
  derived and/or modified sequence
atggccaacatccaccaggagaatgaggagatggagcagcccatgcagaatggagaggaggaccggcccctgggcggcggggagggccaccagcctgctggcaacagaagaggccaggcccggcggctggcccccaacttccgctgggccatccccaaccggcagatcaatgatggcatgggaggagatggagatgacatggagatcttcatggaggagatgagggagatccggaggaagctgcgggagctgcagctgaggaactgcctgcgcatcctgatgggagagctgagcaaccaccacgaccaccatgatgagttctgcctgatgccctag

SEQ ID NO: 179704 - DNA, 336 bp, Artificial Sequence
  derived and/or modified sequence
atggccaacatccaccaggagaacgaggagatggagcagcccatgcagaacggagaggaggacaggccactgggtgggggggaaggtcatcagcctgccgggaacagaagggggcaggccaggcgcctggcccccaatttccgttgggcaatccccaaccgtcagattaacgatgggatgggcggcgacggcgacgatatggaaatcttcatggaagaaatgagagagataaggcgtaaactccgggagctccagttaagaaactgcctccgcatcctaatgggcgaactttcgaatcatcatgatcaccacgatgaattttgcctgatgccctag

SEQ ID NO: 179705 - DNA, 336 bp, Artificial Sequence
  derived and/or modified sequence
atggccaacatccaccaggagaacgaggagatggagcagcccatgcagaacggcgaggaagatagacccctgggtgggggcgagggacaccagcccgccggcaacaggaggggccaagcccggaggttagcccctaacttcaggtgggctatcccaaatcgccaaattaatgacggaatgggcggcgatggagatgatatggaaatattcatggaagagatgagagagattaggcgcaagttacgcgagcttcagcttcgcaactgccttaggatcttaatgggtgagctcagcaaccaccacgatcatcacgatgaattctgcctgatgccctag

SEQ ID NO: 179706 - DNA, 336 bp, Artificial Sequence
  derived and/or modified sequence
atggccaacatccaccaggagaacgaggagatggagcagcccatgcaaaacggtgaggaagataggcccctgggagggggggaaggccaccagccggccggcaaccggagggggcaggcccggcggcttgcaccgaactttaggtgggcaatccccaaccggcagatcaacgatggaatgggcggagacggggacgatatggaaatttttatggaagagatgcgggagattagaagaaaactgagagaattgcagctgcgcaactgtttgaggatcctcatgggtgagctttctaaccaccacgaccaccatgacgagttctgcctcatgccatag

SEQ ID NO: 179707 - DNA, 336 bp, Artificial Sequence
  derived and/or modified sequence
atggcgaacatccaccaggagaacgaagagatggagcagccaatgcagaatggggaggaggaccgtcccctgggcggaggcgagggccatcagcccgctgggaaccgtagaggacaggcgcgtaggctggcccctaacttccgctgggctatccccaatcggcagattaacgacggaatgggcggagacggcgacgatatggagatctttatggaagagatgagggagatcaggcgtaagttgagagagctgcagctaagaaattgtctgcgcattctgatgggggagttgtctaatcatcacgaccatcacgacgaattctgcctcatgccatag

SEQ ID NO: 179708 - DNA, 336 bp, Artificial Sequence
  derived and/or modified sequence
atggccaatattcaccaagagaacgaagagatggagcagcctatgcagaatggcgaggaggacaggcctctcgggggaggcgaaggccatcaacccgcaggcaatcggagaggtcaagcccgtaggctggcccctaattttcgctgggcgatcccaaatcgacagataaacgatggaatgggtggcgacggagacgatatggaaatcttcatggaggagatgcgcgagattagacggaaactgcgggaactacagctgaggaactgtctgcggattttaatgggggaactctccaatcatcacgaccatcatgacgagttttgcctgatgccctag

SEQ ID NO: 179709 - DNA, 336 bp, Artificial Sequence
  derived and/or modified sequence
atggccaatattcatcaggaaaacgaagagatggaacagcccatgcagaacggagaagaagataggcccctcggcggtggcgagggtcaccagccagctggcaaccggagagggcaagcgaggaggctggcccctaacttcaggtgggccatacccaaccgccagatcaacgacggcatgggtggagatggagatgatatggagatctttatggaggaaatgagagagattcgaagaaagctgagggaactgcagttgagaaattgcctgcgaattctgatgggggaattgtctaatcaccacgaccaccatgatgagttttgtctcatgccctag

SEQ ID NO: 179710 - DNA, 336 bp, Artificial Sequence
  derived and/or modified sequence
atggccaacatccaccaggagaacgaggagatggagcagcccatgcagaacggcgaggaggacagacccctgggcggcggcgagggccaccagcccgccggcaacagaagaggccaggccagaagactggcccccaacttcagatgggccatccccaacagacagatcaacgacggcatgggcggcgacggcgacgacatggagatcttcatggaggagatgagagagatcagaagaaagctgagagagctgcagctgagaaactgcctgagaatcctgatgggcgagctgagcaaccaccacgaccaccacgacgagttctgcctgatgccctag

SEQ ID NO: 179711 - protein, 1429 aa, Artificial Sequence
  derived and/or modified sequence
MIKCLSVEVQAKLRSGLAISSLGQCVEELALNSIDAEAKCVAVRVNMETFQVQVIDNGFGMGSDDVEKVGNRYFTSKCHSVQDLENPRFYGFRGEALANIADMASAVEISSKKNRTMKTFVKLFQSGKALKACEADVTRASAGTTVTVYNLFYQLPVRRKCMDPRLEFEKVRQRIEALSLMHPSISFSLRNDVSGSMVLQLPKTKDVCSRFCQIYGLGKSQKLREISFKYKEFELSGYISSEAHYNKNMQFLFVNKRLVLRTKLHKLIDFLLRKESIICKPKNGPTSRQMNSSLRHRSTPELYGIYVINVQCQFCEYDVCMEPAKTLIEFQNWDTLLFCIQEGVKMFLKQEKLFVELSGEDIKEFSEDNGFSLFDATLQKRVTSDERSNFQEACNNILDSYEMFNLQSKAVKRKTTAENVNTQSSRDSEATRKNTNDAFLYIYESGGPGHSKMTEPSLQNKDSSCSESKMLEQETIVASEAGENEKHKKSFLEHSSLENPCGTSLEMFLSPFQTPCHFEESGQDLEIWKESTTVNGMAANILKNNRIQNQPKRFKDATEVGCQPLPFATTLWGVHSAQTEKEKKKESSNCGRRNVFSYGRVKLCSTGFITHVVQNEKTKSTETEHSFKNYVRPGPTRAQETFGNRTRHSVETPDIKDLASTLSKESGQLPNKKNCRTNISYGLENEPTATYTMFSAFQEGSKKSQTDCILSDTSPSFPWYRHVSNDSRKTDKLIGFSKPIVRKKLSLSSQLGSLEKFKRQYGKVENPLDTEVEESNGVTTNLSLQVEPDILLKDKNRLENSDVCKITTMEHSDSDSSCQPASHILNSEKFPFSKDEDCLEQQMPSLRESPMTLKELSLFNRKPLDLEKSSESLASKLSRLKGSERETQTMGMMSRFNELPNSDSSRKDSKLCSVLTQDFCMLFNNKHEKTENGVIPTSDSATQDNSFNKNSKTHSNSNTTENCVISETPLVLPYNNSKVTGKDSDVLIRASEQQIGSLDSPSGMLMNPVEDATGDQNGICFQSEESKARACSETEESNTCCSDWQRHFDVALGRMVYVNKMTGLSTFIAPTEDIQAACTKDLTTVAVDVVLENGSQYRCQPFRSDLVLPFLPRARAERTVMRQDNRDTVDDTVSSESLQSLFSEWDNPVFARYPEVAVDVSSGQAESLAVKIHNILYPYRFTKGMIHSMQVLQQVDNKFIACLMSTKTEENGEADSYEKQQAQGSGRKKLLSSTLIPPLEITVTEEQRRLLWCYHKNLEDLGLEFVFPDTSDSLVLVGKVPLCFVEREANELRRGRSTVTKSIVEEFIREQLELLQTTGGIQGTLPLTVQKVLASQACHGAIKFNDGLSLQESCRLIEALSSCQLPFQCAHGRPSMLPLADIDHLEQEKQIKPNLTKLRKMAQAWRLFGKAECDTRQSLQQSMPPCEPP

SEQ ID NO: 179712 - DNA, 4290 bp, Artificial Sequence
  derived and/or modified sequence
atgatcaagtgcctgagcgtggaggtgcaggccaagctgagaagcggcctggccatcagcagcctgggccagtgcgtggaggagctggccctgaacagcatcgacgccgaggccaagtgcgtggccgtgagagtgaacatggagaccttccaggtgcaggtgatcgacaacggcttcggcatgggcagcgacgacgtggagaaggtgggcaacagatacttcaccagcaagtgccacagcgtgcaggacctggagaaccccagattctacggcttcagaggcgaggccctggccaacatcgccgacatggccagcgccgtggagatcagcagcaagaagaacagaaccatgaagaccttcgtgaagctgttccagagcggcaaggccctgaaggcctgcgaggccgacgtgaccagagccagcgccggcaccaccgtgaccgtgtacaacctgttctaccagctgcccgtgagaagaaagtgcatggaccccagactggagttcgagaaggtgagacagagaatcgaggccctgagcctgatgcaccccagcatcagcttcagcctgagaaacgacgtgagcggcagcatggtgctgcagctgcccaagaccaaggacgtgtgcagcagattctgccagatctacggcctgggcaagagccagaagctgagagagatcagcttcaagtacaaggagttcgagctgagcggctacatcagcagcgaggcccactacaacaagaacatgcagttcctgttcgtgaacaagagactggtgctgagaaccaagctgcacaagctgatcgacttcctgctgagaaaggagagcatcatctgcaagcccaagaacggccccaccagcagacagatgaacagcagcctgagacacagaagcacccccgagctgtacggcatctacgtgatcaacgtgcagtgccagttctgcgagtacgacgtgtgcatggagcccgccaagaccctgatcgagttccagaactgggacaccctgctgttctgcatccaggagggcgtgaagatgttcctgaagcaggagaagctgttcgtggagctgagcggcgaggacatcaaggagttcagcgaggacaacggcttcagcctgttcgacgccaccctgcagaagagagtgaccagcgacgagagaagcaacttccaggaggcctgcaacaacatcctggacagctacgagatgttcaacctgcagagcaaggccgtgaagagaaagaccaccgccgagaacgtgaacacccagagcagcagagacagcgaggccaccagaaagaacaccaacgacgccttcctgtacatctacgagagcggcggccccggccacagcaagatgaccgagcccagcctgcagaacaaggacagcagctgcagcgagagcaagatgctggagcaggagaccatcgtggccagcgaggccggcgagaacgagaagcacaagaagagcttcctggagcacagcagcctggagaacccctgcggcaccagcctggagatgttcctgagccccttccagaccccctgccacttcgaggagagcggccaggacctggagatctggaaggagagcaccaccgtgaacggcatggccgccaacatcctgaagaacaacagaatccagaaccagcccaagagattcaaggacgccaccgaggtgggctgccagcccctgcccttcgccaccaccctgtggggcgtgcacagcgcccagaccgagaaggagaagaagaaggagagcagcaactgcggcagaagaaacgtgttcagctacggcagagtgaagctgtgcagcaccggcttcatcacccacgtggtgcagaacgagaagaccaagagcaccgagaccgagcacagcttcaagaactacgtgagacccggccccaccagagcccaggagaccttcggcaacagaaccagacacagcgtggagacccccgacatcaaggacctggccagcaccctgagcaaggagagcggccagctgcccaacaagaagaactgcagaaccaacatcagctacggcctggagaacgagcccaccgccacctacaccatgttcagcgccttccaggagggcagcaagaagagccagaccgactgcatcctgagcgacaccagccccagcttcccctggtacagacacgtgagcaacgacagcagaaagaccgacaagctgatcggcttcagcaagcccatcgtgagaaagaagctgagcctgagcagccagctgggcagcctggagaagttcaagagacagtacggcaaggtggagaaccccctggacaccgaggtggaggagagcaacggcgtgaccaccaacctgagcctgcaggtggagcccgacatcctgctgaaggacaagaacagactggagaacagcgacgtgtgcaagatcaccaccatggagcacagcgacagcgacagcagctgccagcccgccagccacatcctgaacagcgagaagttccccttcagcaaggacgaggactgcctggagcagcagatgcccagcctgagagagagccccatgaccctgaaggagctgagcctgttcaacagaaagcccctggacctggagaagagcagcgagagcctggccagcaagctgagcagactgaagggcagcgagagagagacccagaccatgggcatgatgagcagattcaacgagctgcccaacagcgacagcagcagaaaggacagcaagctgtgcagcgtgctgacccaggacttctgcatgctgttcaacaacaagcacgagaagaccgagaacggcgtgatccccaccagcgacagcgccacccaggacaacagcttcaacaagaacagcaagacccacagcaacagcaacaccaccgagaactgcgtgatcagcgagacccccctggtgctgccctacaacaacagcaaggtgaccggcaaggacagcgacgtgctgatcagagccagcgagcagcagatcggcagcctggacagccccagcggcatgctgatgaaccccgtggaggacgccaccggcgaccagaacggcatctgcttccagagcgaggagagcaaggccagagcctgcagcgagaccgaggagagcaacacctgctgcagcgactggcagagacacttcgacgtggccctgggcagaatggtgtacgtgaacaagatgaccggcctgagcaccttcatcgcccccaccgaggacatccaggccgcctgcaccaaggacctgaccaccgtggccgtggacgtggtgctggagaacggcagccagtacagatgccagcccttcagaagcgacctggtgctgcccttcctgcccagagccagagccgagagaaccgtgatgagacaggacaacagagacaccgtggacgacaccgtgagcagcgagagcctgcagagcctgttcagcgagtgggacaaccccgtgttcgccagataccccgaggtggccgtggacgtgagcagcggccaggccgagagcctggccgtgaagatccacaacatcctgtacccctacagattcaccaagggcatgatccacagcatgcaggtgctgcagcaggtggacaacaagttcatcgcctgcctgatgagcaccaagaccgaggagaacggcgaggccgacagctacgagaagcagcaggcccagggcagcggcagaaagaagctgctgagcagcaccctgatcccccccctggagatcaccgtgaccgaggagcagagaagactgctgtggtgctaccacaagaacctggaggacctgggcctggagttcgtgttccccgacaccagcgacagcctggtgctggtgggcaaggtgcccctgtgcttcgtggagagagaggccaacgagctgagaagaggcagaagcaccgtgaccaagagcatcgtggaggagttcatcagagagcagctggagctgctgcagaccaccggcggcatccagggcaccctgcccctgaccgtgcagaaggtgctggccagccaggcctgccacggcgccatcaagttcaacgacggcctgagcctgcaggagagctgcagactgatcgaggccctgagcagctgccagctgcccttccagtgcgcccacggcagacccagcatgctgcccctggccgacatcgaccacctggagcaggagaagcagatcaagcccaacctgaccaagctgagaaagatggcccaggcctggagactgttcggcaaggccgagtgcgacaccagacagagcctgcagcagagcatgcccccctgcgagcccccctag

SEQ ID NO: 179713 - DNA, 4290 bp, Artificial Sequence
  derived and/or modified sequence
atgatcaaatgtctgagtgtggaggttcaggccaagttgagaagcggcctagccataagctcattgggacagtgtgtggaggagttggccctcaactctatcgatgccgaagccaaatgcgtagctgtccgggtaaatatggaaacttttcaggtccaggtaatcgacaatggattcggaatgggttcagacgacgtggaaaaagtcggcaacagatactttacctctaagtgccattcagtgcaggacctcgaaaacccccggttttacggatttcgcggagaggccctcgctaatatcgccgatatggcaagtgccgtagaaatctcatcaaagaagaatcgaactatgaagacattcgtgaagttgtttcaaagtggcaaagccctcaaggcatgcgaggcggatgtgactcgggcttccgccgggaccacggtgaccgtttacaatcttttttatcagctacccgttcggagaaagtgtatggacccacggctggagttcgaaaaggtcaggcaacgtattgaggccttaagcttgatgcaccctagtataagtttcagcctgcggaatgacgtctctgggagcatggtgctccagcttccgaagacaaaggacgtttgttctagattctgtcagatctatggccttggcaagtctcagaagctcagggaaatcagttttaaatacaaggaattcgagctctcaggatatatttcttctgaagctcattacaataagaacatgcagttcttgtttgtgaacaaaagacttgtattacgaaccaagctccacaagctgatcgacttcctgctccgaaaagaatccatcatctgtaaaccgaaaaacgggccaacttctaggcagatgaacagttccttaaggcatcgctccaccccagagctttatggaatatatgtgatcaacgtgcagtgtcagttttgtgaatacgatgtgtgcatggagcccgctaagaccctgattgaattccagaactgggatacgttgttgttttgcattcaagagggagtcaaaatgttcctgaagcaagaaaagctgtttgttgaactgagcggggaggacataaaagagttttctgaggacaacggtttctcactgttcgatgctacgttgcagaaacgagtgacaagcgacgaacgttcgaatttccaggaggcctgcaacaatattttagactcttacgaaatgtttaaccttcaatctaaagccgttaaacggaagacgacagctgagaatgttaacactcaatcttccagggacagcgaagccacacgaaaaaacacaaatgacgcgtttctgtacatttacgaaagtggaggcccaggtcatagcaagatgacagaaccatctctgcagaacaaggacagctcctgtagtgagtcaaagatgttggagcaggaaaccatcgtggcatcggaggctggtgagaacgagaagcacaagaaaagctttttagaacactcctccctggagaatccctgcggaacctcgctggagatgttcctgagcccgttccagaccccatgccacttcgaagaatctgggcaggatctggagatctggaaagagtccaccacggtgaacgggatggccgccaacattctgaagaacaatagaatccagaatcaacccaaaagattcaaggatgccacagaagtgggctgccagcccctacctttcgccaccaccctatggggggtccattccgctcaaactgagaaggaaaaaaagaaagaaagcagcaactgtggccgcagaaacgtgtttagctacgggcgggtaaagctgtgcagcaccggatttattacacacgtcgtgcaaaacgagaaaacaaagtcaaccgagacggaacattcattcaaaaactatgttcgccccggcccaacaagggcccaggaaactttcggtaataggacgcgacactctgtcgagactcccgacatcaaggatctggcaagcacattgtcaaaggagagcggccagctcccaaataagaagaactgtagaactaatatttcctatgggcttgagaacgaaccaaccgctacctatacaatgttttctgcattccaggaagggtctaagaaatcccaaacggactgtattttgagtgatacttccccaagttttccatggtacaggcacgtaagcaatgatagtcgtaaaacggataagctgatcggattcagtaagccaattgtgaggaagaaactgagcttgtcaagccagctgggaagcctggagaagttcaaacggcaatatggaaaagtcgagaaccctctggacaccgaagtagaggagagcaacggagtgacaacgaacctttctctgcaagtggaacccgatatcctattgaaggacaaaaatcgactcgaaaactccgacgtgtgtaagatcacaacaatggaacattcagacagcgactccagttgtcagcccgcatctcacatcctgaattcagaaaagttcccattctctaaagatgaggattgcctcgagcaacaaatgcctagtcttagggaatcccctatgaccctcaaggagctgtccctgttcaatcgtaagccactggatctggagaaaagcagcgaatctctcgcatccaagctatctaggcttaagggctctgagagggagacccagacaatgggcatgatgagtaggttcaacgaattaccaaacagtgacagttctagaaaggacagtaaattgtgctctgtcctcacccaggacttttgtatgctgttcaacaataaacatgaaaaaaccgaaaacggcgtcattccaacctcggacagcgctacgcaggataatagtttcaacaaaaactcaaagactcattctaattctaacactaccgagaattgcgtaatctccgagacccccctcgtgctaccatataataattcaaaagtaaccggtaaggatagtgacgtcctcattcgcgctagcgaacagcaaattggctctctggactccccttctggtatgctgatgaatcccgtggaagatgcaacaggtgatcagaatggcatctgctttcaatcagaggaaagtaaggctcgcgcctgtagtgagactgaggagagcaatacatgctgctctgattggcagcgccattttgacgtggcattgggccgcatggtgtacgtgaataagatgaccggtctgtccacttttatcgcacccaccgaagatattcaagccgcctgcaccaaagatctgacaactgtcgccgtcgacgtcgtgctggagaacggatcacaataccgatgccagcctttcagatcagaccttgtgcttccgtttctgccaagagcccgagccgagcgcacggtcatgaggcaggataacagggacactgtggatgacaccgtttcctccgagtcccttcaatcacttttctcagaatgggacaacccagtgtttgctcgttaccctgaggtggcggtggacgtgagcagcggccaggcggaatctctggccgtaaaaattcacaacatcctgtatccctaccgcttcacgaaaggtatgatccatagcatgcaagtgttgcagcaagtcgataataaattcattgcttgcttaatgtcaaccaaaaccgaagagaacggtgaggcagactcatacgaaaagcagcaggctcagggcagcggaaggaagaagttgctgagctccaccctgattccaccactcgaaatcaccgtgaccgaggaacagcggcgcctgctctggtgttatcataaaaacctggaagatcttgggctcgagtttgtgttccctgataccagtgactccctagtgttagtgggcaaggtgccactctgctttgtggagcgggaagctaacgagctgcgcagaggtagatccacagttactaagagcattgtcgaggagttcatacgggagcagcttgaacttttgcagactactggcgggatccagggtaccctaccactgacagtccaaaaagtactggcctcccaagcctgccatggggccatcaaatttaacgacgggctttctctgcaggaaagttgccggttgattgaggcactgagttcttgtcaactgccgtttcagtgcgcacacggacggccgtcaatgctgcctctggccgacatcgaccacttagaacaggaaaaacagattaagcctaacctgaccaagttaagaaagatggcccaggcatggaggctcttcggcaaggctgaatgcgacacacggcaatcattgcagcagtctatgcccccatgcgagcctccttag

SEQ ID NO: 179714 - DNA, 4290 bp, Artificial Sequence
  derived and/or modified sequence
atgatcaagtgcctgtctgtggaggtgcaggccaagctgcggagcggcctggccatcagcagcctgggccagtgtgtggaggagctggccctgaacagcattgatgctgaggccaagtgtgtggccgtgcgggtgaacatggagaccttccaggtgcaggtgattgacaatggatttggcatgggcagtgatgatgtggagaaggtgggcaaccgctacttcaccagcaagtgccacagcgtgcaggacctggagaacccccgcttctacggcttccggggggaggccctggccaacattgctgacatggccagcgctgtggagatcagcagcaagaagaacagaaccatgaagacctttgtgaagctgttccagagcggcaaggccctgaaggcctgtgaggctgatgtgacccgggccagcgctggcaccaccgtgacagtgtacaacctcttctaccagctgcctgtgcggaggaagtgcatggacccccggctggagtttgagaaggtgcggcagagaattgaggccctgagcctgatgcaccccagcatctccttcagcctgagaaatgatgtgtctggctccatggtgctgcagctgcccaagaccaaggatgtgtgcagccgcttctgccagatctacggcctgggcaagagccagaagctgcgggagatctccttcaagtacaaggagtttgagctgagcggctacatcagcagcgaggcccactacaacaagaacatgcagttcctgtttgtgaacaagaggctggtgctgcggaccaagctgcacaagctgattgacttcctgctgaggaaggagagcatcatctgcaagcccaagaatggccccaccagccggcagatgaacagcagcctgcggcacaggagcaccccagagctgtatggcatctacgtgatcaacgtgcagtgccagttctgtgaatatgatgtgtgcatggagcccgccaagaccctcatcgagttccagaactgggacaccctgctcttctgcatccaggagggcgtgaagatgttcctgaagcaggagaagctgtttgtggagctgagcggggaggacatcaaggagttctctgaagataatggcttcagcctgtttgatgccaccctgcagaagagggtgaccagtgatgagaggagcaacttccaggaggcctgcaacaacatcctggacagctatgagatgttcaacctgcagagcaaggctgtgaagaggaagaccacagcagaaaatgtgaacacccagagcagccgggacagcgaggccaccaggaagaacaccaatgatgccttcctgtacatctatgaaagtggcggccctggccacagcaagatgacagagcccagcctgcagaacaaggacagcagctgcagcgagagcaagatgctggagcaggagaccatcgtggccagcgaggccggagaaaatgagaagcacaagaagagcttcctggagcacagcagcctggagaacccctgtggcaccagcctggagatgttcctgagccccttccagaccccctgccactttgaggagagcggccaggacctggagatctggaaggagagcaccaccgtgaatggcatggccgccaacatcctgaagaacaaccgcatccagaaccagcccaagcgcttcaaggatgccacagaggtgggctgccagcccctgccctttgccaccaccctgtggggcgtgcacagcgcccagacagagaaggagaagaagaaggagagcagcaactgtggcagaagaaatgtgttctcctatggccgggtgaagctgtgcagcacaggcttcatcacccacgtggtgcagaatgagaagaccaagagcacagaaacagagcacagcttcaagaactacgtgcggcccggccccacccgggcccaggagaccttcggcaacagaaccaggcacagcgtggagaccccagacatcaaggacctggccagcaccctgagcaaggagagcggccagctgcccaacaagaagaactgcaggaccaacatctcctatggcctggagaatgagcccacagccacctacaccatgttttctgccttccaggagggcagcaagaagagccagacagactgcatcctgagtgacaccagccccagcttcccctggtaccgccacgtgtccaatgacagcaggaagacagacaagctgattggcttcagcaagcccatcgtgaggaagaagctgagcctgagcagccagctgggcagcctggagaagttcaagaggcagtatggcaaggtggagaaccccctggacacagaggtggaggagagcaatggagtgaccaccaacctgagcctgcaggtggagccagacatcctgctgaaggacaagaaccggctggagaacagtgatgtgtgcaagatcaccaccatggagcacagcgacagcgacagcagctgccagcctgccagccacatcctgaacagcgagaagttccccttcagcaaggatgaggactgcctggagcagcagatgcccagcctgcgggagagccccatgaccctgaaggagctgagcctcttcaacaggaagcccctggacctggagaagagcagcgagagcctggccagcaagctgagccggctgaagggcagcgagcgggagacccagaccatgggcatgatgagccgcttcaatgagctgcccaacagcgacagcagcaggaaggacagcaagctgtgcagcgtgctgacccaggacttctgcatgctgttcaacaacaagcatgagaagacagaaaatggagtcatccccaccagtgacagcgccacccaggacaacagcttcaacaagaacagcaagacccacagcaacagcaacaccacagagaactgtgtgatcagcgagacccccctggtgctgccctacaacaacagcaaggtgacaggcaaggacagtgatgtgctgatccgggccagcgagcagcagatcggcagcctggacagccccagcggcatgctgatgaaccctgtggaggatgccactggagaccagaatggcatctgcttccagagcgaggagagcaaggcccgggcctgcagcgagacagaggagagcaacacctgctgcagcgactggcagaggcactttgatgtggccctgggccgcatggtgtatgtgaacaagatgacaggcctgagcaccttcatcgcccccacagaggacatccaggccgcctgcaccaaggacctgaccaccgtggccgtggatgtggtgctggagaatggcagccagtaccgctgccagcccttcagaagtgacctggtgctgcccttcctgccccgggcccgggcagagaggacagtgatgaggcaggacaacagagacacagtggatgacacagtgtcctctgagagcctgcagagcctcttcagcgagtgggacaaccctgtgtttgcccgctacccagaggtggccgtggatgtgagcagcggccaggccgagagcctggccgtgaagatccacaacatcctgtacccctaccgcttcaccaagggcatgatccacagcatgcaggtgctgcagcaggtggacaacaagttcatcgcctgcctgatgagcaccaagacagaggagaatggagaggccgacagctatgagaagcagcaggcccagggcagcggcaggaagaagctgctgagcagcaccctcatcccccccctggagatcaccgtgacagaggagcagaggcggctgctgtggtgctaccacaagaacctggaggacctgggcctggagtttgtgtttcctgacaccagtgacagcctggtgctggtgggcaaggtgcccctgtgctttgtggagcgggaggccaatgagctgcggcggggccgcagcacagtgaccaagagcatcgtggaggagttcatccgggagcagctggagctgctgcagaccaccggcggcatccagggcaccctgcccctgactgtgcagaaggtgctggccagccaggcctgccacggggccatcaagttcaatgatggcctgagcctgcaggagagctgccgcctgattgaggccctgagcagctgccagctgcccttccagtgtgcccacggccggcccagcatgctgcccctggccgacatcgaccacctggagcaggagaagcagatcaagcccaacctgaccaagctgaggaagatggcccaggcctggaggctgtttgggaaggccgagtgtgacacccggcagagcctgcagcagagcatgccaccctgtgagcccccatag

SEQ ID NO: 179715 - DNA, 4290 bp, Artificial Sequence
  derived and/or modified sequence
atgatcaagtgcctgagcgtggaggtgcaggccaagctgcggagcggcttggctatatcctctcttggacaatgtgtcgaggaactggctttgaatagcattgatgctgaggctaaatgcgtagcggtcagagtgaacatggagacattccaggtccaggtgatcgacaacggatttggcatgggcagcgacgatgtggaaaaggtcggtaacaggtactttacctcgaaatgtcacagcgtccaggaccttgaaaatccgcgattttacggctttcgaggggaggctctggctaatattgctgatatggcgtcagccgtggagattagcagcaagaagaaccgcactatgaaaacttttgtcaaactgttccaaagcgggaaagcattaaaagcttgcgaggcagacgtgactcgagcctctgcggggacaaccgtcaccgtgtacaaccttttttatcagctacctgtgcgccgaaaatgtatggaccctcgcctagaatttgagaaggtgcgccagcgcatcgaggccctctctctcatgcatccctcaatttccttctctctaagaaacgacgtttccggctctatggtccttcagttgcccaaaaccaaagacgtgtgctcccggttctgtcagatttatggtctgggaaagtcacaaaaattacgcgagattagtttcaaatacaaggaattcgagttgtcaggatacatttctagtgaggcacattataacaaaaacatgcagttcctgtttgttaataagaggttggttctccgcactaagctgcacaagctgatagattttcttcttaggaaggagtcaattatttgtaagcccaagaatggtccaacctcaagacaaatgaattcttcactgaggcatcggtctactcctgaactctacggtatatacgtgattaacgtgcagtgtcagttttgcgaatacgacgtgtgcatggaacccgccaaaactctaatcgaatttcagaactgggatacactgctgttctgcatccaggaaggcgtgaagatgttcctgaagcaggaaaaactattcgttgaactctctggagaagacatcaaagagttcagcgaggacaatgggttctcgctctttgacgccaccctgcagaaacgtgtgacttcagacgaaagatccaactttcaagaggcctgcaacaatattcttgattcctacgaaatgtttaacttacagagcaaggccgtgaaacggaagaccactgccgaaaatgtgaacactcagtccagccgcgatagcgaagcaacgagaaaaaacacgaatgacgcctttctgtacatttacgagagtggcggcccagggcatagcaagatgacagaaccatctctgcagaacaaggattcctcatgctcggagagcaagatgctggagcaggagactatcgtcgcgtctgaagccggcgagaatgagaagcacaagaagtcctttctggaacactcatctctggaaaacccctgcggaacatccctggaaatgtttctcagccctttccaaacgccgtgtcacttcgaggaatccgggcaagatcttgaaatttggaaggagtccacaacagtgaacggcatggctgccaacatcctgaagaacaacagaattcaaaatcagccgaagcggttcaaggacgccaccgaagtgggctgtcaacctctgcccttcgccaccactctgtggggggttcacagcgcacaaacggagaaggaaaaaaagaaggaatccagcaactgcgggagacggaacgtgttcagctacggacgggtgaaactgtgctcaactggcttcattacgcatgtggttcagaacgaaaaaactaagtcaaccgaaacagaacattccttcaagaactatgtaagacccggtccaacccgcgcacaggagacgttcggtaacaggacacgtcattccgtggagaccccagatattaaggacttggcatcaaccctttcaaaggaaagtggacaactgcccaataaaaagaattgccgaactaacatctcgtatgggctcgagaacgaaccgacggctacatacacaatgttctccgcctttcaagagggatcaaagaagtctcagacagattgcatcttgtctgacacctccccctcatttccatggtatcgacacgttagcaatgacagtcggaagacagacaagctcatcggtttttctaagccaattgtccgcaaaaagttgagcctgagctctcagctggggtctctcgaaaagtttaaacgccagtatggtaaagtcgagaacccacttgataccgaagtggaagaaagtaacggagtgaccaccaatctttctctccaggtggagcccgacatcctgctgaaggacaaaaaccgacttgagaattccgatgtctgcaaaatcaccacaatggagcattctgacagtgactcctcatgccagcctgctagccatatcttaaattcagaaaaatttccgtttagtaaggatgaagactgtctggagcaacaaatgccaagtctccgggaatccccgatgacgcttaaagagctgtctttgttcaatagaaagcccctggatctggagaagtccagtgaaagcctcgcctctaaactttctagactgaagggaagcgaacgcgagacccagaccatggggatgatgtcacgcttcaacgaactgccaaatagtgacagcagtcgcaaagacagcaaactctgttcggtccttacccaagacttctgcatgctttttaataacaagcatgaaaagacagagaatggcgtgattccgacgtccgattccgctactcaagataactcatttaacaagaattctaagactcactctaatagcaataccaccgagaattgtgtgatcagcgagacaccgcttgtacttccctacaacaactcaaaagtcaccggcaaggactctgacgtacttatacgcgctagcgaacagcagatcggctctctggactctcctagtggaatgttgatgaatcccgttgaagacgcaacaggcgatcagaacggcatctgtttccaatcagaggagtctaaggcaagagcttgcagcgagacagaggaaagtaatacttgttgctctgattggcagcgacatttcgacgtggcactggggcgcatggtgtacgtaaacaaaatgaccggactgtcaacatttatcgcaccgacagaagacattcaggcggcctgcaccaaggatctcactacagtcgccgtcgatgtggtgctggagaacggatctcaatataggtgccagccgttccgtagcgatctggtcttgccgtttctccctagggctcgcgcagagaggactgttatgcgccaggacaacagggacactgtggatgacaccgtgtcaagcgaatccttgcagtctcttttctccgagtgggacaatcctgtcttcgcccggtatccagaagttgctgtggacgtaagttccgggcaggccgaaagccttgccgtcaagatccataatatactgtacccctatagatttaccaagggcatgatccattctatgcaggtgctgcagcaggttgataacaagttcatagcatgtcttatgagcacaaaaactgaagagaatggagaggctgattcctacgaaaagcagcaggctcagggctccggtcggaagaaactcctgtcttctacgctcatccctcctctggaaattacagtgacagaagaacagaggagactcttatggtgttatcataaaaacctggaggatctgggtcttgagtttgtatttcctgacaccagtgacagccttgtattggttgggaaagtgcccctgtgcttcgtggagcgggaagcaaatgagcttaggagaggcaggtcaactgtcactaagtccatagtggaagagtttattcgggagcagttagaactgttgcagactacaggcggcatccagggtacactgccgctcactgtgcaaaaggttctcgcctcccaggcttgccacggggcgattaaattcaatgatgggctgtcgctccaggaatcgtgccgccttatagaggcactatcctcctgccagcttccgtttcagtgcgcccacggcagacccagcatgttgcctcttgctgatatcgaccatctggagcaagagaagcagattaaaccaaatttgacaaagctgagaaaaatggcgcaggcttggcgattatttggtaaagccgaatgcgacacacgccaatctctgcagcaatcaatgcccccatgtgaaccgccatag

SEQ ID NO: 179716 - DNA, 5233 bp, Artificial Sequence
  derived and/or modified sequence
aacaactggtgcgcatgcgcactggtgtctcgcggcctggcgcgccccctccgaagcgcatgctcgtgggcacgcacgagcctcaagatccaaggtgcgcgcgtcggcgtccgaggcggttggtgtcggagaatttgttaagcgggactccaggcaattatttccagtcagagaaggaaaccagtgcctggcattctcaccatctttctacctaccatgatcaagtgcttgtcagttgaagtacaagccaaattgcgttctggtttggccataagctccttgggccaatgtgttgaggaacttgccctcaacagtattgatgctgaagcaaaatgtgtggctgtcagggtgaatatggaaaccttccaagttcaagtgatagacaatggatttgggatggggagtgatgatgtagagaaagtgggaaatcgttatttcaccagtaaatgccactcggtacaggacttggagaatccaaggttttatggtttccgaggagaggccttggcaaatattgctgacatggccagtgctgtggaaatttcgtccaagaaaaacaggacaatgaaaacttttgtgaaactgtttcagagtggaaaagccctgaaagcttgtgaagctgatgtgactagagcaagcgctgggactactgtaacagtgtataacctattttaccagcttcctgtaaggaggaaatgcatggaccctagactggagtttgagaaggttaggcagagaatagaagctctctcactcatgcacccttccatttctttctctttgagaaatgatgtttctggttccatggttcttcagctccctaaaaccaaagacgtatgttcccgattttgtcaaatttatggattgggaaagtcccaaaagctaagagaaataagttttaaatataaagagtttgagcttagtggctatatcagctctgaagcacattacaacaagaatatgcagtttttgtttgtgaacaaaagactagttttaaggacaaagctacataaactcattgactttttattaaggaaagaaagtattatatgcaagccaaagaatggtcccaccagtaggcaaatgaattcaagtcttcggcaccggtctaccccagaactctatggcatatatgtaattaatgtgcagtgccaattctgtgagtatgatgtgtgcatggagccagccaaaactctgattgaatttcagaactgggacactctcttgttttgcattcaggaaggagtgaaaatgtttttaaagcaagaaaaattatttgtggaattatcaggtgaggatattaaggaatttagtgaagataatggttttagtttatttgatgctactcttcagaagcgtgtgacttccgatgagaggagcaatttccaggaagcatgtaataatattttagattcctatgagatgtttaatttgcagtcaaaagctgtgaaaagaaaaactactgcagaaaacgtaaacacacagagttctagggattcagaagctaccagaaaaaatacaaatgatgcatttttgtacatttatgaatcaggtggtccaggccatagcaaaatgacagagccatctttacaaaacaaagacagctcttgctcagaatcaaagatgttagaacaagagacaattgtagcatcagaagctggagaaaatgagaaacataaaaaatctttcctggaacatagctctttagaaaatccgtgtggaaccagtttagaaatgtttttaagcccttttcagacaccatgtcactttgaggagagtgggcaggatctagaaatatggaaagaaagtactactgttaatggcatggctgccaacatcttgaaaaataatagaattcagaatcaaccaaagagatttaaagatgctactgaagtgggatgccagcctctgccttttgcaacaacattatggggagtacatagtgctcagacagagaaagagaaaaaaaaagaatctagcaattgtggaagaagaaatgtttttagttatgggcgagttaaattatgttccactggctttataactcatgtagtacaaaatgaaaaaactaaatcaactgaaacagaacattcatttaaaaattatgttagacctggtcccacacgtgcccaagaaacatttggaaatagaacacgtcattcagttgaaactccagacatcaaagatttagccagcactttaagtaaagaatctggtcaattgcccaacaaaaaaaattgcagaacgaatataagttatgggctagagaatgaacctacagcaacttatacaatgttttctgcttttcaggaaggtagcaaaaaatcacaaacagattgcatattatctgatacatccccctctttcccctggtatagacacgtttccaatgatagtaggaaaacagataaattaattggtttctccaaaccaatcgtccgtaagaagctaagcttgagttcacagctaggatctttagagaagtttaagaggcaatatgggaaggttgaaaatcctctggatacagaagtagaggaaagtaatggagtcactaccaatctcagtcttcaagttgaacctgacattctgctgaaggacaagaaccgcttagagaactctgatgtttgtaaaatcactactatggagcatagtgattcagatagtagttgtcaaccagcaagccacatccttaactcagagaagtttccattctccaaggatgaagattgtttagaacaacagatgcctagtttgagagaaagtcctatgaccctgaaggagttatctctctttaatagaaaacctttggaccttgagaagtcatctgaatcactagcctctaaattatccagactgaagggttccgaaagagaaactcaaacaatggggatgatgagtcgttttaatgaacttccaaattcagattccagtaggaaagacagcaagttgtgcagtgtgttaacacaagatttttgtatgttatttaacaacaagcatgaaaaaacagagaatggtgtcatcccaacatcagattctgccacacaggataattcctttaataaaaatagtaaaacacattctaacagcaatacaacagagaactgtgtgatatcagaaactcctttggtattgccctataataattctaaagttaccggtaaagattcagatgttcttatcagagcctcagaacaacagataggaagtcttgactctcccagtggaatgttaatgaatccggtagaagatgccacaggtgaccaaaatggaatttgttttcagagtgaggaatctaaagcaagagcttgttctgaaactgaagagtcaaacacgtgttgttcagattggcagcggcatttcgatgtagccctgggaagaatggtttatgtcaacaaaatgactggactcagcacattcattgccccaactgaggacattcaggctgcttgtactaaagacctgacaactgtggctgtggatgttgtacttgagaatgggtctcagtacaggtgtcaaccttttagaagcgaccttgttcttcctttccttccgagagctcgagcagagaggactgtgatgagacaggataacagagatactgtggatgatactgttagtagcgaatcgcttcagtctttgttctcagaatgggacaatccagtatttgcccgttatccagaggttgctgttgatgtaagcagtggccaggctgagagcttagcagttaaaattcacaacatcttgtatccctatcgtttcaccaaaggaatgattcattcaatgcaggttctccagcaagtagataacaagtttattgcctgtttgatgagcactaagactgaagagaatggcgaggcagattcctacgagaagcaacaggcacaaggctctggtcggaaaaaattactgtcttctactctaattcctccgctagagataacagtgacagaggaacaaaggagactcttatggtgttaccacaaaaatctggaagatctgggccttgaatttgtatttccagacactagtgattctctggtccttgtgggaaaagtaccactatgttttgtggaaagagaagccaatgaacttcggagaggaagatctactgtgaccaagagtattgtggaggaatttatccgagaacaactggagctactccagaccaccggaggcatccaagggacattgccactgactgtccagaaggtgttggcatcccaagcctgccatggggccattaagtttaatgatggcctgagcttacaggaaagttgccgccttattgaagctctgtcctcatgccagctgccattccagtgtgctcacgggagaccttctatgctgccgttagctgacatagaccacttggaacaggaaaaacagattaaacccaacctcactaaacttcgcaaaatggcccaggcctggcgtctctttggaaaagcagagtgtgatacaaggcagagcctgcagcaatccatgcctccctgtgagccaccatgagaacagaatcactggtctaaaaggaacaaagggatgttcactgtatgcctctgagcagagagcagcagcagcaggtaccagcacggccctgactgaatcagcccagtgtccctgagcagcttagacagcagggctctctgtatcagtctttcttgagcagatgattcccctagttgagtagccagatgaaattcaagcctaaagacaattcattcatttgcatccatgggcacagaaggttgctatatagtatctaccttttgctacttatttaatgataaaatttaatgacagtttgattggttgcttggtttgttatttgaagggtgtgatttttgtttttgtacagttttttttcaagcttcacatttgcgtgtatctaattcagctgatgctcaagtccaaggggtagtctgccttcccaggctgcccccagggtttctgcactggtcccctcttttcccttcagtcttcttcacttccctatgctgctgcttcatgtgctacatctcagacttaaagagtttctctactacagtgaaaacattctctagggtctttcatcaggcctttagttattttagggataaaaactattgataaaaaggacaaggatagaacagagaaaatttaaagtcctgttccgggttttttgttatgttttctttaaaaactcagagactgatgttcaatatcccaaaccagtaaaatggtgaaaatactatga

SEQ ID NO: 179717 - DNA, 4290 bp, Artificial Sequence
  derived and/or modified sequence
atgattaaatgcttatctgtggaagtgcaggctaagctccgttctggactggcaatcagctccctggggcagtgcgtagaggagctggccctgaattctatagacgcggaggccaagtgtgtcgccgtccgcgtcaacatggaaacctttcaagtccaggtgatcgataatggcttcggtatggggagtgatgatgtggaaaaagttggcaacaggtactttacgtctaagtgccattccgtgcaagacctggagaacccacgcttctacgggttccgaggggaggctctcgcaaatattgctgacatggcgtctgccgtggaaatctccagtaagaaaaatcgcacaatgaagacctttgtgaaactcttccagagcggtaaggcacttaaggcatgtgaggccgacgtaactcgcgcaagcgccggaaccacagtgacagtgtataatctgttttaccagttacctgtgcggaggaaatgcatggatcccaggttggagtttgaaaaggtgcgacagcggattgaggccctgagcttgatgcatcctagtatatcattctccttacggaacgacgtcagcgggagtatggtcctgcaacttccaaagactaaggatgtttgctcacggttttgccagatttatggcctcggaaagagtcagaagctcagggagatcagtttcaagtacaaggaattcgaactgagcggatacatttcatctgaagcccattataacaaaaacatgcagttcttgttcgtgaacaagcggctggtattgaggacgaagctccataaacttatcgactttttacttcgcaaagagagcattatttgcaaacccaaaaacggcccaacctcaagacagatgaatagcagccttcgtcaccggagcactccagaactttacggcatctatgtcatcaacgtgcaatgtcagttttgtgaatacgacgtatgtatggaacccgctaagaccctgattgagttccagaattgggacacccttctcttctgtatacaggaaggtgtaaagatgtttctgaagcaagaaaaattattcgtggaactgtccggcgaggacatcaaagagttcagtgaggataacggattttcactgtttgacgctacactgcagaaacgagtaacgagcgacgagcggagcaactttcaggaagcttgtaacaatatcttagattcatacgagatgttcaatctccaatctaaggctgtgaaacgaaaaaccaccgccgagaacgttaatactcaatcatctagggacagcgaggcaacccgaaaaaacactaacgatgcctttctgtatatatacgaatcagggggacctgggcactcgaagatgaccgagccctcactgcagaataaagattcctcatgctcagagagcaaaatgttggaacaggagactatagttgcaagcgaggccggtgaaaacgagaagcacaagaaatccttccttgaacacagtagtctagagaacccatgcggaacaagcctggagatgtttctgtctcccttccagaccccctgtcatttcgaggagtccggacaggatctggaaatctggaaggagtccaccaccgtgaatgggatggccgctaacatcctgaaaaataataggatccaaaaccagccaaagcggttcaaagatgccactgaagtggggtgtcagcctttgccttttgcgaccaccttgtggggcgttcactccgctcaaaccgagaaggagaagaaaaaggaatcctccaattgtggcagacgcaacgtgttcagctatgggagggttaagctgtgcagtacagggttcataacccacgtggtgcagaacgaaaagacaaaatccaccgaaaccgaacactcttttaaaaactacgtgcgcccaggcccaacgcgggctcaggaaaccttcgggaacagaactcggcattccgtggagactccggatataaaagacctcgcttcaacgctgagcaaagagagtggacagttgcccaataagaagaattgccgaacaaatatatcttacggacttgaaaatgaacctactgcgacatataccatgttcagcgccttccaggaggggtccaaaaaatcccagactgattgcatcttgtctgacacttctccatcgtttccttggtatcgacatgtgagtaacgatagtcggaagaccgacaagttgattggtttttccaagcctattgtgcgcaaaaagctgagcctgtcttctcaattgggttccctcgagaagttcaaacgccagtatggaaaagtggagaaccctttggatacagaggtagaggagtctaacggggtgacaacgaatctctcactacaagtggaacccgatatattactgaaagacaagaatcggctggagaactccgacgtgtgcaaaataaccaccatggaacactcagacagcgatagctcctgccagcctgcaagccacatattaaactctgagaaatttcctttctctaaagatgaagattgcctcgaacagcagatgccaagcttgcgagagagtcccatgacacttaaagagctttccttgttcaaccgaaagccattggacttagagaagtccagtgaatctctggcctccaagctcagtcgtttgaaaggctctgaacgggaaacacagacgatgggaatgatgagccgctttaacgagctgccgaactcagactctagccgtaaggactctaaactttgctctgtactgacacaggacttctgcatgttgttcaataataaacatgagaagacggaaaatggagtgattcccacaagtgatagcgcaacgcaggacaacagttttaacaaaaattctaaaacacattctaactcaaacactacggaaaactgcgtaatcagtgaaacgcctttagtattgccgtacaataacagtaaggtcaccggtaaagattcggacgtgctcattcgcgcatctgagcagcagatcggcagtttggactctccatccggaatgttgatgaaccctgtggaggatgccaccggagatcaaaatggcatctgtttccagtcggaagaatccaaggcccgagcctgtagtgaaaccgaagagagcaacacatgctgctcagattggcagcgacacttcgacgtcgctttgggccgtatggtgtatgtcaataaaatgaccggtttgtctacgtttatcgcccctacagaagacatccaggcagcctgtacaaaggaccttactacggtggccgtggatgttgtactggagaatggctcccaatatcgatgccagcctttccggtcggatcttgtacttccgttcctgcctcgggctcgggctgaaagaactgtcatgcgacaagacaatagagatacggtcgatgacacggtgtcctccgagtctctccagtccctgtttagcgaatgggacaacccagttttcgccaggtaccccgaggtcgctgtagacgtgagctcaggacaagcagagtccctggccgtcaaaattcacaatattctttatccataccggttcaccaaagggatgattcactctatgcaagttctgcagcaggtcgacaataagttcattgcctgcttgatgtcaacaaaaaccgaggagaacggcgaggccgactcctacgaaaagcagcaggctcaggggtccggtcgaaagaaactgctgtccagcacgctgattccccctctcgaaattaccgtgaccgaggagcaacggagattgttgtggtgctaccataaaaatctggaagatctgggactggaattcgtgtttccggacacatcagattctctggtgttggtcggcaaggtgcccctgtgttttgtggaacgcgaagccaacgagctgcgccgtgggagaagcaccgttacaaagagcatcgtggaggagtttattcgagagcagctcgaactgctgcagaccactggagggatacaaggcacgctccccctcaccgtgcagaaagtgttggcatcccaagcttgtcacggcgctatcaagtttaacgacggactctctctccaagagagttgccggctgatagaggctctgtcatcctgccagctccctttccagtgtgctcatggcagaccctccatgcttccgcttgcagacatcgatcacctggaacaggagaaacagatcaagccgaacctgactaaactgcgcaaaatggcgcaggcctggagactattcggcaaggcagagtgtgataccaggcaatctttacagcagtcgatgcctccctgtgaacctccctag

SEQ ID NO: 179718 - protein, 919 aa, Artificial Sequence
  derived and/or modified sequence
MKVARFQKIPNGENETMIPVLTSKKASELPVSEVASILQADLQNGLNKCEVSHRRAFHGWNEFDISEDEPLWKKYISQFKNPLIMLLLASAVISVLMHQFDDAVSITVAILIVVTVAFVQEYRSEKSLEELSKLVPPECHCVREGKLEHTLARDLVPGDTVCLSVGDRVPADLRLFEAVDLSIDESSLTGETTPCSKVTAPQPAATNGDLASRSNIAFMGTLVRCGKAKGVVIGTGENSEFGEVFKMMQAEEAPKTPLQKSMDLLGKQLSFYSFGIIGIIMLVGWLLGKDILEMFTISVSLAVAAIPEGLPIVVTVTLALGVMRMVKKRAIVKKLPIVETLGCCNVICSDKTGTLTKNEMTVTHIFTSDGLHAEVTGVGYNQFGEVIVDGDVVHGFYNPAVSRIVEAGCVCNDAVIRNNTLMGKPTEGALIALAMKMGLDGLQQDYIRKAEYPFSSEQKWMAVKCVHRTQQDRPEICFMKGAYEQVIKYCTTYQSKGQTLTLTQQQRDVYQQEKARMGSAGLRVLALASGPELGQLTFLGLVGIIDPPRTGVKEAVTTLIASGVSIKMITGDSQETAVAIASRLGLYSKTSQSVSGEEIDAMDVQQLSQIVPKVAVFYRASPRHKMKIIKSLQKNGSVVAMTGDGVNDAVALKAADIGVAMGQTGTDVCKEAADMILVDDDFQTIMSAIEEGKGIYNNIKNFVRFQLSTSIAALTLISLATLMNFPNPLNAMQILWINIIMDGPPAQSLGVEPVDKDVIRKPPRNWKDSILTKNLILKILVSSIIIVCGTLFVFWRELRDNVITPRDTTMTFTCFVFFDMFNALSSRSQTKSVFEIGLCSNRMFCYAVLGSIMGQLLVIYFPPLQKVFQTESLSILDLLFLLGLTSSVCIVAEIIKKVERSREKIQKHVSSTSSSFLEV

SEQ ID NO: 179719 - protein, 903 aa, Artificial Sequence
  derived and/or modified sequence
MIPVLTSKKASELPVSEVASILQADLQNGLNKCEVSHRRAFHGWNEFDISEDEPLWKKYISQFKNPLIMLLLASAVISVLMHQFDDAVSITVAILIVVTVAFVQEYRSEKSLEELSKLVPPECHCVREGKLEHTLARDLVPGDTVCLSVGDRVPADLRLFEAVDLSIDESSLTGETTPCSKVTAPQPAATNGDLASRSNIAFMGTLVRCGKAKGVVIGTGENSEFGEVFKMMQAEEAPKTPLQKSMDLLGKQLSFYSFGIIGIIMLVGWLLGKDILEMFTISVSLAVAAIPEGLPIVVTVTLALGVMRMVKKRAIVKKLPIVETLGCCNVICSDKTGTLTKNEMTVTHIFTSDGLHAEVTGVGYNQFGEVIVDGDVVHGFYNPAVSRIVEAGCVCNDAVIRNNTLMGKPTEGALIALAMKMGLDGLQQDYIRKAEYPFSSEQKWMAVKCVHRTQQDRPEICFMKGAYEQVIKYCTTYQSKGQTLTLTQQQRDVYQQEKARMGSAGLRVLALASGPELGQLTFLGLVGIIDPPRTGVKEAVTTLIASGVSIKMITGDSQETAVAIASRLGLYSKTSQSVSGEEIDAMDVQQLSQIVPKVAVFYRASPRHKMKIIKSLQKNGSVVAMTGDGVNDAVALKAADIGVAMGQTGTDVCKEAADMILVDDDFQTIMSAIEEGKGIYNNIKNFVRFQLSTSIAALTLISLATLMNFPNPLNAMQILWINIIMDGPPAQSLGVEPVDKDVIRKPPRNWKDSILTKNLILKILVSSIIIVCGTLFVFWRELRDNVITPRDTTMTFTCFVFFDMFNALSSRSQTKSVFEIGLCSNRMFCYAVLGSIMGQLLVIYFPPLQKVFQTESLSILDLLFLLGLTSSVCIVAEIIKKVERSREKIQKHVSSTSSSFLEV

SEQ ID NO: 179720 - protein, 120 aa, Artificial Sequence
  derived and/or modified sequence
MKVARFQKIPNGENETMIPVLTSKKASELPVSEVASILQADLQNGLNKCEVSHRRAFHGWNEFDISEDEPLWKKYISQFKNPLIMLLLASAVISVLMHQFDDAVSITVAILIVVTVAFVQ

SEQ ID NO: 179721 - protein, 102 aa, Artificial Sequence
  derived and/or modified sequence
MKVARFQKIPNGENETMIPVLTSKKASELPVSEVASILQADLQNGLNKCEVSHRRAFHGWNEFDISEDEPLWKKYISQFKNPLIMLLLASAVISVLMHQFDD

SEQ ID NO: 179722 - protein, 487 aa, Artificial Sequence
  derived and/or modified sequence
MSLPPIRLPSPYGSDRLVQLAARLRPALCDTLITVGSQEFPAHSLVLAGVSQQLGRRGQWALGEGISPSTFAQLLNFVYGESVELQPGELRPLQEAARALGVQSLEEACWRARGDRAKKPDPGLKKHQEEPEKPSRNPERELGDPGEKQKPEQVSRTGGREQEMLHKHSPPRGRPEMAGATQEAQQEQTRSKEKRLQAPVGQRGADGKHGVLTWLRENPGGSEESLRKLPGPLPPAGSLQTSVTPRPSWAEAPWLVGGQPALWSILLMPPRYGIPFYHSTPTTGAWQEVWREQRIPLSLNAPKGLWSQNQLASSSPTPGSLPQGPAQLSPGEMEESDQGHTGALATCAGHEDKAGCPPRPHPPPAPPARSRPYACSVCGKRFSLKHQMETHYRVHTGEKPFSCSLCPQRSRDFSAMTKHLRTHGAAPYRCSLCGAGCPSLASMQAHMRGHSPSQLPPGWTIRSTFLYSSSRPSRPSTSPCCPSSSTT

SEQ ID NO: 179723 - DNA, 1960 bp, Artificial Sequence
  derived and/or modified sequence
gccgtcatctctaagaaacaaccataccactgaatgctactgtgtacttacaaaccacactcatattcgtcacgtcatttcatcttcacccccacctccaaatgaggcttgaaatgagatgagatgttcctccctcccctttcaaccatggacctcacactgtggacttcctcttagagcctctgagttaggtacccaagccaaggcacaatgtccctgccccccataagactgcccagcccctatggctctgatcggctggtacagctagcagccaggctccggccagcactctgtgatactctgatcaccgtagggagccaggagttccccgcccacagcctggtgctagcaggtgtcagccagcagctgggccgcaggggccagtgggctctgggagaaggcatcagcccttctacctttgcccagctcctgaactttgtgtatggggagagtgtagagctgcagcctggagagctaaggccccttcaggaggcggccagggccttgggagtgcagtccctggaagaggcatgctggagggctcgaggggacagggctaaaaagccagatccaggcctgaagaaacatcaggaggagccagagaaaccctcaaggaatcctgagagagaactgggggaccctggagagaagcagaaaccagaacaggtttctagaactggtgggagagaacaggagatgttgcacaagcactcgccaccaagaggcagacccgagatggcaggagcaacgcaggaggctcagcaggaacagaccaggtcaaaggagaaacgcctccaagcccctgttggccaaaggggagcagatgggaagcatggagtgctcacgtggttgagggaaaatccagggggctctgaggaaagtctgcgcaagctccctggcccccttcccccagcaggctccctgcaaaccagcgtcacccctaggccctcgtgggctgaggccccttggttggtggggggccagcctgccctgtggagcatcctgctgatgccgcccagatatggcattcccttctaccatagcacccccaccactggagcctggcaggaggtctggcgggaacagaggatcccactgtccctaaatgcccccaaagggctctggagccagaaccagttggcctcctccagccctaccccaggttccctcccccagggccccgcacagctcagccctggggagatggaagagtctgatcaggggcacacaggcgcacttgcaacctgtgcgggtcatgaggacaaggcaggctgcccacctcgcccgcaccctcccccggcccctcctgctcggtctcggccctatgcgtgctctgtctgtggaaagaggttttcactcaagcatcagatggagacgcactaccgagtccacacaggagagaagcccttctcctgtagcctttgtcctcagcgctcccgggacttctcggccatgaccaagcacctgcggacacacggggccgctccgtaccgctgctccctgtgcggggccggctgtcccagcctggcctccatgcaggcgcacatgcgcggtcactcgcccagccaactcccgcccggatggaccatccgctccaccttcctctactcctcctcgaggccgtctcggccctcgacctctccctgttgtccttcttcctccaccacctgacggggtgtcggtagcgtcttagccaagagtccaattaaagaacgaaaagcgggccggctcggcttctgacctggcaccgctgctacggcggcctagcaaattccgccccagaagcgccccaggaagggcgccgagtgccctctcctggacgatcgcgggtcgcagaagcccaggccagcgagccctacagagtgaggacactgaagtgtgcaggagcgaaggttaacagtaggggagattgtcgatctcatcaccataataaagagtttcctgtgccctcccttca

SEQ ID NO: 179724 - DNA, 1464 bp, Artificial Sequence
  derived and/or modified sequence
atgagcctgccccccatcagactgcccagcccctacggcagcgacagactggtgcagctggccgccagactgagacccgccctgtgcgacaccctgatcaccgtgggcagccaggagttccccgcccacagcctggtgctggccggcgtgagccagcagctgggcagaagaggccagtgggccctgggcgagggcatcagccccagcaccttcgcccagctgctgaacttcgtgtacggcgagagcgtggagctgcagcccggcgagctgagacccctgcaggaggccgccagagccctgggcgtgcagagcctggaggaggcctgctggagagccagaggcgacagagccaagaagcccgaccccggcctgaagaagcaccaggaggagcccgagaagcccagcagaaaccccgagagagagctgggcgaccccggcgagaagcagaagcccgagcaggtgagcagaaccggcggcagagagcaggagatgctgcacaagcacagcccccccagaggcagacccgagatggccggcgccacccaggaggcccagcaggagcagaccagaagcaaggagaagagactgcaggcccccgtgggccagagaggcgccgacggcaagcacggcgtgctgacctggctgagagagaaccccggcggcagcgaggagagcctgagaaagctgcccggccccctgccccccgccggcagcctgcagaccagcgtgacccccagacccagctgggccgaggccccctggctggtgggcggccagcccgccctgtggagcatcctgctgatgccccccagatacggcatccccttctaccacagcacccccaccaccggcgcctggcaggaggtgtggagagagcagagaatccccctgagcctgaacgcccccaagggcctgtggagccagaaccagctggccagcagcagccccacccccggcagcctgccccagggccccgcccagctgagccccggcgagatggaggagagcgaccagggccacaccggcgccctggccacctgcgccggccacgaggacaaggccggctgcccccccagaccccaccccccccccgccccccccgccagaagcagaccctacgcctgcagcgtgtgcggcaagagattcagcctgaagcaccagatggagacccactacagagtgcacaccggcgagaagcccttcagctgcagcctgtgcccccagagaagcagagacttcagcgccatgaccaagcacctgagaacccacggcgccgccccctacagatgcagcctgtgcggcgccggctgccccagcctggccagcatgcaggcccacatgagaggccacagccccagccagctgccccccggctggaccatcagaagcaccttcctgtacagcagcagcagacccagcagacccagcaccagcccctgctgccccagcagcagcaccacctag

SEQ ID NO: 179725 - DNA, 1464 bp, Artificial Sequence
  derived and/or modified sequence
atgtccctgcctcctataaggctgcccagtccttacggttccgacagactggtgcaactggcagcccgtctgcgacccgccttgtgcgatacattgatcacagtaggaagccaggagttcccggcccactctctcgttcttgccggcgtatcgcaacagctgggcaggcgaggacagtgggccctgggcgaggggatttctccctcaacctttgcacagctgttgaattttgtgtacggagaatccgtggagctgcaacctggcgaactgagaccgttacaggaagccgcgcgggcactaggcgtacaatcactggaggaggcctgttggagggcgcgcggagatcgtgctaaaaagcctgatccaggcctgaaaaagcaccaggaagagcctgaaaaaccttcccgtaaccctgaacgggagcttggagacccaggagagaagcaaaagcctgagcaggtctctaggaccggcggacgggagcaggagatgctgcataaacactccccaccgagaggccggcccgagatggccggcgccacacaggaggctcagcaagagcagacccgatctaaggagaaacggctgcaagcacctgtagggcagcggggtgccgatggtaaacatggtgtcctaacttggctgcgcgagaatcctgggggctccgaggagagtctccggaagcttcctggccctttgcccccggccggaagcttacagaccagtgtaacccctcggccctcctgggccgaggccccctggctagtagggggtcagccggcgctctggagcattctcctcatgccaccacggtatggcatcccattctaccattccacacccaccactggggcttggcaggaggtttggcgcgagcagaggattcctctgtccttgaacgcacccaaggggctgtggagccagaatcagctggcaagctcttcgcccactcccggctcactgccccaggggcccgcccagttgtcacccggtgagatggaggagtccgatcagggacacacgggagccttagccacatgcgcggggcacgaggacaaggcaggttgccctccacggccgcatccccctccagcacctcccgcccgcagccggccctacgcctgctcggtatgtggcaagagattctccctcaagcatcagatggagactcattatcgggtgcacaccggcgaaaaacccttctcatgcagtctttgtccacagcgatctcgcgatttcagcgccatgactaaacaccttagaacacatggggctgccccatatagatgttccctgtgcggggccggatgcccaagtttagcaagtatgcaggcccacatgcggggacatagtcccagtcaactgccaccaggctggacaattcgctctacattcctgtattcctccagccgcccaagtcggcctagcacatccccatgttgtccaagctcttctacaacttag

SEQ ID NO: 179726 - DNA, 1464 bp, Artificial Sequence
  derived and/or modified sequence
atgtcgctgcctcctattcgccttccatcaccatatggctcagaccggctggtgcagctagccgcacggctgcgccccgcgctttgcgataccctgatcacagtcgggagccaggaatttccggcgcattcactggtgcttgctggtgtgagccagcaactggggagacgtgggcagtgggccctcggagaagggatatctccttcaactttcgctcagctcctgaatttcgtttatggagaatccgtggagcttcaacctggtgaactgcgccccttacaagaagccgccagagccctgggcgtgcaatcgctcgaggaagcatgctggagagctcgaggagacagggcaaaaaaaccagaccctgggctgaagaaacaccaggaagagcccgagaagccctctagaaaccctgagagagaattgggggatcccggcgaaaaacagaaaccagagcaggtttccaggactggcggaagagaacaggagatgctgcacaaacactccccccctcgtggaagaccagagatggctggggcaactcaggaggcccagcaagaacagacacgaagtaaagagaagcgtctccaggcccctgtcggtcagagaggggccgacggtaaacatggcgtactgacttggctgagagaaaatccagggggatccgaggagtctctgcggaagctgccagggcctctacctcctgccggatccttgcagacctccgtaacaccacgaccctcatgggcagaggctccatggctcgtgggcggtcagcccgcactctggagtattttgttaatgcctccccgctatggaatcccgttctaccatagtacgccaacgacaggtgcctggcaagaggtttggcgcgagcagaggatccctctgagtttgaatgcacccaaaggcctgtggtcccagaatcagctggcctcctctagccctactccaggaagtttgccccagggtccagctcagctcagtccaggagaaatggaggaatcagaccagggccataccggcgctcttgccacatgcgccggccacgaggacaaagctgggtgtcctcccagaccacatccgccacccgcccctcctgctaggtcgaggccatacgcatgttctgtctgtggaaagcggttctcgttgaagcatcagatggagacgcactatcgggtgcacacaggtgagaaacctttttcatgttccctctgtcctcaaagatccagagattttagtgcaatgacaaaacaccttaggacacacggcgccgccccctacaggtgcagtctctgcggggcaggttgcccgagcttggcgtccatgcaggcacatatgagggggcactctcccagccagctgcctcccgggtggaccatcagaagtacattcctgtattcttcctcccggccaagtcgaccctctacctctccgtgttgcccctccagctctacaacatag

SEQ ID NO: 179727 - DNA, 1464 bp, Artificial Sequence
  derived and/or modified sequence
atgagcctgccccccatccggctgcccagcccctacggcagtgaccggctggtgcagctggccgcccggctgcggcctgccctgtgtgacaccctcatcaccgtgggcagccaggagttccctgcccacagcctggtgctggccggcgtgtcccagcagctgggccggcggggccagtgggccctgggggagggcatcagccccagcacctttgcccagctgctgaactttgtgtatggagagagcgtggagctgcagcctggagagctgcggcccctgcaggaggccgcccgggccctgggcgtgcagagcctggaggaggcctgctggagggcccggggggaccgggccaagaagccagaccccggcctgaagaagcaccaggaggagcctgagaagcccagcaggaaccctgagcgggagctgggggaccctggagagaagcagaagccagagcaggtgtccaggactggaggccgggagcaggagatgctgcacaagcacagccccccccggggccggcctgagatggccggggccacccaggaggcccagcaggagcagaccaggagcaaggagaagaggctgcaggcccctgtgggccagagaggagcagatggcaagcatggagtgctgacctggctgagagaaaatcctgggggcagcgaggagagcctgaggaagctgcccggccccctgcccccagctggcagcctgcagacctctgtgaccccccggcccagctgggccgaggccccctggctggtgggcggccagcctgccctgtggagcatcctgctgatgccacccaggtatggcatccccttctaccacagcacccccaccactggagcctggcaggaggtgtggagggagcagaggatccccctgagcctgaatgcccccaagggcctgtggagccagaaccagctggccagcagcagccccaccccaggcagcctgccccagggccctgcccagctgagccctggagagatggaggagagtgaccagggccacactggagccctggccacctgtgccggccacgaggacaaggccggctgccccccccggccccaccccccaccagcccccccagcccggagccggccctatgcctgcagcgtgtgtgggaagcgcttcagcctgaagcaccagatggagacccactacagagtgcacactggagagaagcccttcagctgcagcctgtgcccccagaggagccgggacttcagcgccatgaccaagcacctgcggacccatggagctgccccctaccgctgcagcctgtgtggggccggctgccccagcctggcctccatgcaggcccacatgaggggccacagccccagccagctgcccccaggctggaccatccgcagcaccttcctgtacagcagcagccggcccagccggcccagcaccagcccctgctgccccagcagcagcaccacctag

SEQ ID NO: 179728 - DNA, 1464 bp, Artificial Sequence
  derived and/or modified sequence
atgagcctgccccccatccggctgcccagcccctacggcagcgacaggctggtacaattggcagccagactgcggccggcgctgtgcgacaccctgattactgtcggcagccaagagtttcctgcgcactccctggtgttggccggggtgtctcaacagctgggccgcaggggccagtgggccttgggcgaaggaatctcacctagcaccttcgcacagctcctgaacttcgtgtatggagaatctgtggagctgcagccaggtgagctgagacctctgcaagaagcagccagggccctcggggtgcagtcactagaggaggcatgttggcgcgcgagaggagaccgcgccaagaagcctgatcctggcctgaaaaaacatcaagaggagcctgaaaaaccttcccgcaacccggaaagggaattaggtgatcccggagaaaagcagaagcccgagcaagtctcaaggactggcggccgggaacaggaaatgttgcacaagcatagtcctcctcggggccgtccagagatggccggcgccacccaggaggctcagcaggagcagactagaagcaaggaaaaacgtctgcaggctcctgttgggcaacgaggagccgacggcaagcacggggtgctaacctggctgcgggaaaaccctggtggatctgaagaatccttgcgcaaactgcccgggcctctcccacctgcgggtagtctgcaaactagcgtgacacctaggccctcatgggccgaggctccttggttagtcggcggacagcctgccttgtggtccatcctgcttatgccgccaagatatggaatccccttctatcacagtacccctacaactggcgcatggcaggaagtgtggcgggagcaacgaattccgctgtctcttaacgcgcccaaaggactctggtcacagaaccagctggcaagctcatccccaactcccggctctctgccccagggacccgctcagctttccccaggagagatggaggaatcagatcaaggacacacaggcgcactcgcaacctgtgccggccatgaggacaaagctggctgtccacctaggcctcacccaccccccgcaccccctgcacgctcacgcccctacgcttgttcagtgtgtggtaaaagattcagcctgaaacaccagatggagacgcattatagggtgcacactggtgagaagccgttttcctgcagtctatgccctcaacgctcccgagatttcagtgctatgacaaaacacctcaggacccacggagctgcaccctacagatgctccctgtgcggcgcaggttgtccttccctggctagcatgcaggcacacatgaggggccacagcccctctcagttaccccccggatggactatccgcagtacctttctttactcttctagtagaccttccagaccctccaccagcccctgctgtccctctagctctacaacttag

SEQ ID NO: 179729 - DNA, 1464 bp, Artificial Sequence
  derived and/or modified sequence
atgagcctgccccccatccggctgcccagcccctacggcagcgaccgcctcgtccagttggctgcgaggctacgacccgctctatgtgacacgcttattactgtgggttcgcaggaattccctgcccactcgctggtgcttgctggggtatcacagcagttaggacggaggggccaatgggctctgggcgaggggatctcaccaagcacatttgcacagctgctcaatttcgtgtatggcgaaagcgtggagcttcagcctggcgaattgaggccacttcaagaggccgcccgagcgctgggtgtgcagtcattagaagaagcttgctggcgcgcgaggggggacagggctaagaagccggatccaggcctgaagaaacatcaagaagagccagaaaagccttccaggaatccagagagggagctgggcgaccctggagagaagcagaagcctgaacaggttagccgcaccggcggccgcgagcaggagatgctgcacaagcacagccctcctcgagggaggcctgagatggcgggcgccacgcaggaggctcaacaggaacagacgcgctccaaggaaaaaagactgcaggcacccgtcggccagagaggcgccgacggtaagcatggtgtactgacttggctccgggagaatccaggggggtcagaggaaagcctgcgcaaactcccgggtccactacctcccgctggctccctacaaacatcggttaccccaaggccctcatgggcagaggcaccatggctggtgggcgggcagcctgctctctggtccatcctactgatgccacctagatacggtattcctttttaccactctacgccaactaccggagcctggcaggaggtgtggcgcgagcagcgcatcccactcagcctgaatgctcctaaaggattgtggagccaaaaccagcttgcgagctcttctcccacgcccgggagcctcccccagggccctgcccagttgagcccgggtgaaatggaagaatctgatcaggggcacacaggagcactcgctacgtgcgccgggcacgaagacaaagccgggtgtccaccaaggccccacccgcctccagccccaccagcaagatcaaggccgtacgcctgctccgtgtgcgggaagcgcttcagtcttaagcaccagatggaaactcactaccgggtgcacaccggagagaagcctttctcatgttctctgtgcccacaacggagccgcgatttctcagcgatgaccaagcatttgcgcacgcacggtgctgcaccctataggtgctcactctgtggagccgggtgcccgtctctcgcttctatgcaggcccacatgagggggcacagtccgagccagctcccacctggctggaccatcaggagcactttcctctattcaagcagcagaccaagcaggccaagtacttctccttgttgtcctagcagcagcactacatag

SEQ ID NO: 179730 - DNA, 1464 bp, Artificial Sequence
  derived and/or modified sequence
atgtcgctgcctccaattagactcccctccccatacgggtccgataggctggttcaactggccgcacgattaagacctgctctgtgtgacacattaatcaccgtggggagccaggagtttcccgctcattcgctcgtgcttgcgggagttagccaacagctggggagaagaggccaatgggccttgggagaggggatatcaccctccacgtttgcccagcttttgaattttgtgtacggcgaaagcgtagaactgcagcctggagagctgcgtccccttcaggaggcggcacgtgctctgggcgtccagagcctggaggaagcgtgttggagagcccgtggggatcgcgcaaagaagcccgatcctggtctcaagaagcaccaagaggagcctgaaaaaccttcccggaatcctgaacgggagctgggagatcccggagaaaagcagaagcccgagcaagtgtcacggacgggcggacgagaacaggagatgctgcacaaacactctccacccagaggcaggcctgagatggcaggagccacccaggaagcacagcaggagcagacacggagtaaggaaaaaagacttcaagccccagtcggccaaagaggcgctgacgggaaacacggggtgctcacttggctgcgagagaacccaggtggcagcgaagagagcctccgaaaactgcccggacctctccccccagctgggtcgctccagaccagtgtgaccccaagaccatcttgggccgaagcgccatggctggtggggggtcagcccgctctttggtccatcctgcttatgccacctaggtacggtattcctttttaccactctacacccacaaccggcgcatggcaggaggtatggagggagcagcgcatcccactgtccctgaatgctcctaagggcctgtggtcccagaaccagctcgcaagcagttcccccactccagggagcctgcctcagggtccagcccaattgagccccggagaaatggaggagtcagaccagggacacacgggggctcttgccacatgcgccggtcacgaggacaaggcaggatgtcctcccagaccacatccaccaccagccccacctgcaaggtctagaccttacgcatgttcagtgtgcgggaagagattcagcctgaagcaccaaatggaaacacattaccgggtgcataccggagaaaaacctttttcctgctctctttgtcctcagagaagccgggacttctccgctatgacaaagcatctgcgcacacacggagctgccccatataggtgttccctgtgtggagccggttgtcctagcctcgcctccatgcaagcccacatgagagggcactccccctcgcagctgccccctggctggaccattaggtcaacatttctgtattcatcttcacggccatccagaccctccacaagtccttgttgcccctcctcatctacgacttag

SEQ ID NO: 179731 - DNA, 1464 bp, Artificial Sequence
  derived and/or modified sequence
atgagtctccctcctattcgattgccgagcccttatggttcagaccgcctcgtgcagctggcagccagactccgacccgctctgtgtgataccctcattaccgtgggttcccaggagttcccagcacacagcctcgtcctagctggagtctcgcagcagcttggtcgacgaggacagtgggcactcggagaaggcatcagccctagtacattcgcacagctcctcaatttcgtgtatggggaatctgtagaactgcaaccgggagagctaagacccctgcaggaagcggctcgtgcactgggggtgcagagcctggaggaagcctgctggcgcgctcgcggtgatcgcgctaaaaagcctgacccaggactgaaaaaacatcaggaagaaccagaaaaacctagtagaaaccccgagcgcgagcttggcgatccaggggagaagcagaaacccgaacaggtcagtcgaaccggcggaagagagcaggaaatgttgcataaacatagccctcctaggggcagacctgaaatggctggggctactcaagaggcgcagcaggagcagacacgcagcaaggaaaaacgcctgcaagcaccggtcggtcaacggggtgctgacggaaaacacggcgtcttgacttggctgagagagaaccctggagggtccgaagaatcgctgagaaagctgccagggcctctccccccagctggaagtctacagaccagcgtcactccacggccaagctgggctgaagcaccatggttagttggaggccagccggctctgtggtcaatcttgttaatgccgccacgctatggcatcccattttaccacagcacaccaacaaccggcgcatggcaggaggtgtggagggaacagcgcattcctttgagcctgaacgctcctaaaggactatggtcacagaaccaattggcgagtagctccccaacaccaggttcactcccacagggtccagcgcagctcagtccaggcgagatggaagaatctgaccaaggccacacaggcgcactggctacgtgcgcaggccatgaggacaaagccggatgcccaccgaggcctcaccccccacccgcacctcccgcaagatctcggccttatgcgtgcagcgtgtgtgggaagagattcagcttgaagcaccaaatggagacacactatcgagtccataccggtgagaaacccttttcatgcagcctgtgcccacaacgatctagagatttcagcgccatgactaaacatttaaggacccacggagccgctccttacaggtgctccttatgtggggcaggttgtccaagcctggcaagcatgcaagcacacatgaggggccattctccctcgcaacttccacccggttggacaatccggtccacatttctgtactccagctccaggccatcgagaccttccacctctccatgttgtccaagttcatctacgacatag

SEQ ID NO: 179732 - DNA, 1464 bp, Artificial Sequence
  derived and/or modified sequence
atgtccctgccccccataagactgcccagcccctatggctctgatcggctggtacagctagcagccaggctccggccagcactctgtgatactctgatcaccgtagggagccaggagttccccgcccacagcctggtgctagcaggtgtcagccagcagctgggccgcaggggccagtgggctctgggagaaggcatcagcccttctacctttgcccagctcctgaactttgtgtatggggagagtgtagagctgcagcctggagagctaaggccccttcaggaggcggccagggccttgggagtgcagtccctggaagaggcatgctggagggctcgaggggacagggctaaaaagccagatccaggcctgaagaaacatcaggaggagccagagaaaccctcaaggaatcctgagagagaactgggggaccctggagagaagcagaaaccagaacaggtttctagaactggtgggagagaacaggagatgttgcacaagcactcgccaccaagaggcagacccgagatggcaggagcaacgcaggaggctcagcaggaacagaccaggtcaaaggagaaacgcctccaagcccctgttggccaaaggggagcagatgggaagcatggagtgctcacgtggttgagggaaaatccagggggctctgaggaaagtctgcgcaagctccctggcccccttcccccagcaggctccctgcaaaccagcgtcacccctaggccctcgtgggctgaggccccttggttggtggggggccagcctgccctgtggagcatcctgctgatgccgcccagatatggcattcccttctaccatagcacccccaccactggagcctggcaggaggtctggcgggaacagaggatcccactgtccctaaatgcccccaaagggctctggagccagaaccagttggcctcctccagccctaccccaggttccctcccccagggccccgcacagctcagccctggggagatggaagagtctgatcaggggcacacaggcgcacttgcaacctgtgcgggtcatgaggacaaggcaggctgcccacctcgcccgcaccctcccccggcccctcctgctcggtctcggccctatgcgtgctctgtctgtggaaagaggttttcactcaagcatcagatggagacgcactaccgagtccacacaggagagaagcccttctcctgtagcctttgtcctcagcgctcccgggacttctcggccatgaccaagcacctgcggacacacggggccgctccgtaccgctgctccctgtgcggggccggctgtcccagcctggcctccatgcaggcgcacatgcgcggtcactcgcccagccaactcccgcccggatggaccatccgctccaccttcctctactcctcctcgaggccgtctcggccctcgacctctccctgttgtccttcttcctccaccacctga

SEQ ID NO: 179733 - protein, 415 aa, Artificial Sequence
  derived and/or modified sequence
MLWSGCRRFGARLGCLPGGLRVLVQTGHRSLTSCIDPSMGLNEEQKEFQKVAFDFAAREMAPNMAEWDQKELFPVDVMRKAAQLGFGGVYIQTDVGGSGLSRLDTSVIFEALATGCTSTTAYISIHNMCAWMIDSFGNEEQRHKFCPPLCTMEKFASYCLTEPGSGSDAASLLTSAKKQGDHYILNGSKAFISGAGESDIYVVMCRTGGPGPKGISCIVVEKGTPGLSFGKKEKKVGWNSQPTRAVIFEDCAVPVANRIGSEGQGFLIAVRGLNGGRINIASCSLGAAHASVILTRDHLNVRKQFGEPLASNQYLQFTLADMATRLVAARLMVRNAAVALQEERKDAVALCSMAKLFATDECFAICNQALQMHGGYGYLKDYAVQQYVRDSRVHQILEGSNEVMRILISRSLLQE

SEQ ID NO: 179734 - protein, 272 aa, Artificial Sequence
  derived and/or modified sequence
MGLNEEQKEFQKVAFDFAAREMAPNMAEWDQKELFPVDVMRKAAQLGFGGVYIQTDVGGSGLSRLDTSVIFEALATGCTSTTAYISIHNMCAWMIDSFGNEEQRHKFCPPLCTMEKFASYCLTEPGSGSDAASLLTSAKKQGDHYILNGSKAFISGAGESDIYVVMCRTGGPGPKGISCIVVEKGTPGLSFGKKEKKVGWNSQPTRAVIFEDCAVPVANRIGSEGQGFLIAVRGLNGGRINIASCSLGCPRLCHPHPRPPQCPEAVWRASGQ

SEQ ID NO: 179735 - protein, 226 aa, Artificial Sequence
  derived and/or modified sequence
MKSRKNFKKWPLTLLPERWLQIWQSGTRSMCAWMIDSFGNEEQRHKFCPPLCTMEKFASYCLTEPGSGSDAASLLTSAKKQGDHYILNGSKAFISGAGESDIYVVMCRTGGPGPKGISCIVVEKGTPGLSFGKKEKKVGWNSQPTRAVIFEDCAVPVANRIGSEGQGFLIAVRGLNGGRINIASCSLGAAHASVILTRDHLNVRKQFGEPLASNQKKQETLKLWIT

SEQ ID NO: 179736 - DNA, 1248 bp, Artificial Sequence
  derived and/or modified sequence
atgctttggtctgggtgtcgaagattcggagccagacttggttgtctgcccggtggcctgcgggtgctagtgcagaccggtcaccgaagcctgacatcctgtattgatccatctatgggtttgaatgaggaacagaaagaatttcagaaggtcgcatttgacttcgccgcccgcgagatggctccgaatatggctgaatgggatcaaaaggaactcttccccgttgatgtgatgcgcaaggccgcgcagctgggcttcggcggggtctacatccaaacagacgtcggaggatccggtctgtctcgcctcgacacttctgtaatattcgaagcgctcgcaacagggtgtacatcaactacggcctacatctcaatccataacatgtgcgcatggatgattgatagctttggcaatgaggagcaaaggcacaagttctgccccccgctttgcacaatggaaaagttcgccagctattgtctgacagaacctggctcaggaagtgatgctgctagtctgcttactagcgctaaaaagcagggggaccactacattttgaacgggtcaaaagcctttatttcgggggcaggggagtcagatatttatgtcgtgatgtgtagaaccggcggtcctggtcctaagggtatctcatgcattgtcgtcgagaaaggaacccctggactgtccttcggaaagaaagaaaagaaggtagggtggaactcccagcccacgcgcgctgtcatttttgaagattgtgccgtgcctgtcgctaatagaatcggatctgagggccaggggtttttgattgccgtgaggggtttgaatgggggacgcattaatattgcttcatgttcactgggtgccgcccatgcatctgtgatcctcactagagaccacctgaatgttagaaagcagtttggagaaccgctggcctctaaccagtatctccaatttaccctggccgatatggccacacggctggtagcagctcggctcatggttcgtaatgccgccgtggcgctgcaagaggagcggaaggatgccgtggccttatgcagtatggcaaagctgttcgccacagacgaatgttttgcgatttgtaatcaggctctgcagatgcatggcggctatggctacctcaaagattatgccgtacagcagtacgtacgcgattcccgagtacatcaaatcctggaagggagtaacgaggtcatgcggattctgatttcccgaagtctcctgcaggaatag

SEQ ID NO: 179737 - DNA, 819 bp, Artificial Sequence
  derived and/or modified sequence
atgggccttaatgaggagcagaaagagttccagaaggtagcctttgacttcgccgcccgggaaatggcgcctaatatggctgagtgggaccaaaaagagttgttccctgtggatgttatgcggaaggcggctcagttaggatttgggggtgtgtacatccagaccgacgtcggcggcagcggcctgtcacgtctcgatacgtcagttatctttgaggccttagcaaccggatgcacctcaactactgcatacatctcaattcataacatgtgtgcctggatgattgattcctttggcaacgaggaacagcggcataaattttgccctcctctttgtaccatggaaaagtttgccagctactgtcttacagagcccggcagtggttccgatgcagcctccctgctgacttcagcaaaaaaacagggcgaccattacattctcaatggctcaaaagcctttatttcaggggcaggggagtccgatatatacgtcgtgatgtgcagaacgggtggtcccggccccaagggaatttcttgtatcgtagtggaaaaagggacacccggtctgagcttcgggaagaaagaaaagaaggttgggtggaattcccagcctacccgagcagtcatttttgaggattgtgccgttccagtagcaaatcggatcggctcagagggccagggatttttgatcgctgtccggggcttgaatggcggcagaatcaacatcgctagctgcagcctcggctgtccccgcctgtgccacccacaccctcgccctccccagtgtcctgaggccgtatggcgtgcttctggacagtag

SEQ ID NO: 179738 - DNA, 681 bp, Artificial Sequence
  derived and/or modified sequence
atgaagagcagaaagaactttaagaaatggcccctgactctcctgcctgagcggtggctgcagatatggcaatcgggcacacgaagcatgtgtgcctggatgatcgacagctttggaaacgaagagcaaaggcacaagttttgccctcccctatgcacgatggaaaagtttgcatcgtactgtctcaccgaaccaggatccggatccgatgcggcatcactcctcaccagcgccaagaagcagggtgaccactatatcttgaacggctctaaagcctttatttctggggcaggagagtctgacatttacgtggtgatgtgccgcacaggaggcccaggccccaagggaattagctgtattgttgttgagaaaggcactccgggacttagcttcgggaagaaagagaaaaaggtgggctggaatagtcagccaacacgagctgtaatcttcgaggattgtgccgtcccagtggctaacagaattgggagcgagggtcaaggttttctgattgcagtacgtggcctgaacggagggcgcattaatattgctagttgttcccttggcgctgcccacgcctctgtgatcctgaccagggaccatctgaatgtgcgtaagcagtttggagaaccactcgccagcaaccagaagaaacaggaaacgctgaaactgtggatcacttag

SEQ ID NO: 179739 - DNA, 1248 bp, Artificial Sequence
  derived and/or modified sequence
atgctgtggagcggctgcagaagatttggagcccggctgggctgcctgcccggcggcctgcgggtgctggtgcagacaggccacaggagcctgaccagctgcatcgaccccagcatgggcctgaatgaggagcagaaggagttccagaaggtggcctttgattttgctgcccgggagatggcccccaacatggccgagtgggaccagaaggagctgtttcctgtggatgtgatgaggaaggccgcccagctgggctttggaggagtgtacatccagacagatgtgggcggcagcggcctgagccggctggacaccagcgtcatctttgaggccctggccaccggctgcaccagcaccacagcctacatcagcatccacaacatgtgtgcctggatgattgacagctttggaaatgaggagcagaggcacaagttctgcccccccctgtgcaccatggagaagtttgccagctactgcctgacagagcccggcagcggcagtgatgctgccagcctgctgaccagcgccaagaagcagggcgaccactacatcctgaatggcagcaaggccttcatctctggagctggggagagtgacatctacgtggtgatgtgcaggactggaggccctggccccaagggcatcagctgcatcgtggtggagaagggcaccccaggcctgagctttgggaagaaggagaagaaggtgggctggaacagccagcccaccagggctgtgatctttgaggactgtgctgtgcctgtggccaacagaattggcagcgagggccagggcttcctgattgctgtgcggggcctgaatggaggccgcatcaacatcgccagctgcagcctgggcgccgcccacgccagcgtcatcctgacccgggaccacctgaatgtgaggaagcagtttggagagcccctggccagcaaccagtacctgcagttcaccctggccgacatggccacccggctggtggccgcccggctgatggtgagaaatgctgctgtggccctgcaggaggagaggaaggatgctgtggccctgtgcagcatggccaagctgtttgccacagatgaatgttttgccatctgcaaccaggccctgcagatgcatggaggctacggctacctgaaggactatgctgtgcagcagtatgtgcgggacagccgggtgcaccagatcctggagggcagcaatgaggtgatgaggatcctgatcagccgcagcctgctgcaggagtag

SEQ ID NO: 179740 - DNA, 819 bp, Artificial Sequence
  derived and/or modified sequence
atgggcctgaatgaggagcagaaggagttccagaaggtggcctttgattttgctgcccgggagatggcccccaacatggccgagtgggaccagaaggagctgtttcctgtggatgtgatgaggaaggccgcccagctgggctttggaggagtgtacatccagacagatgtgggcggcagcggcctgagccggctggacaccagcgtcatctttgaggccctggccaccggctgcaccagcaccacagcctacatcagcatccacaacatgtgtgcctggatgattgacagctttggaaatgaggagcagaggcacaagttctgcccccccctgtgcaccatggagaagtttgccagctactgcctgacagagcccggcagcggcagtgatgctgccagcctgctgaccagcgccaagaagcagggcgaccactacatcctgaatggcagcaaggccttcatctctggagctggggagagtgacatctacgtggtgatgtgcaggactggaggccctggccccaagggcatcagctgcatcgtggtggagaagggcaccccaggcctgagctttgggaagaaggagaagaaggtgggctggaacagccagcccaccagggctgtgatctttgaggactgtgctgtgcctgtggccaacagaattggcagcgagggccagggcttcctgattgctgtgcggggcctgaatggaggccgcatcaacatcgccagctgcagcctgggctgcccccggctgtgccacccccaccccaggcctccccagtgcccagaggccgtgtggagggccagcggccagtag

SEQ ID NO: 179741 - DNA, 681 bp, Artificial Sequence
  derived and/or modified sequence
atgaagagcaggaagaacttcaagaagtggcccctgaccctgctgcctgagcgctggctgcagatctggcagagcggcaccaggtccatgtgtgcctggatgattgacagctttggaaatgaggagcagaggcacaagttctgcccccccctgtgcaccatggagaagtttgccagctactgcctgacagagcccggcagcggcagtgatgctgccagcctgctgaccagcgccaagaagcagggcgaccactacatcctgaatggcagcaaggccttcatctctggagctggggagagtgacatctacgtggtgatgtgcaggactggaggccctggccccaagggcatcagctgcatcgtggtggagaagggcaccccaggcctgagctttgggaagaaggagaagaaggtgggctggaacagccagcccaccagggctgtgatctttgaggactgtgctgtgcctgtggccaacagaattggcagcgagggccagggcttcctgattgctgtgcggggcctgaatggaggccgcatcaacatcgccagctgcagcctgggcgccgcccacgccagcgtcatcctgacccgggaccacctgaatgtgaggaagcagtttggagagcccctggccagcaaccagaagaagcaggagaccctgaagctgtggatcacctag

SEQ ID NO: 179742 - DNA, 1248 bp, Artificial Sequence
  derived and/or modified sequence
atgctgtggagcggctgccggcggttcggcgcccggctgggctgccttcctggggggctcagagtgctcgtgcagacaggtcacaggtccctgacctcttgtattgatccatcaatgggactgaacgaggagcagaaggaatttcagaaggtagcctttgacttcgccgcacgagaaatggcacccaatatggctgaatgggaccagaaagaactgtttcctgtcgacgttatgcggaaggctgcccaattaggattcggtggcgtgtatatccagactgacgtgggcgggagcggactgagcagattagacaccagcgtcatctttgaggcacttgccaccggctgtacctctactaccgcatatataagtatccacaatatgtgcgcctggatgatcgactcttttggaaacgaagagcaaagacacaaattctgtccccctctttgtaccatggaaaagtttgcctcctactgtctcaccgaacccggatctgggagcgatgcagcctctctcctgacctctgccaagaagcagggagatcattatatcctaaacggcagtaaagcgttcatttctggcgccggggaatccgatatctatgtcgttatgtgtcgaaccggcgggccgggacccaagggcatatcctgtattgttgttgaaaaggggacccctggtctcagttttgggaagaaggaaaagaaggtgggttggaatagccagccgaccagggccgttatctttgaagattgtgctgtcccagtggcaaaccgcattggcagtgaaggccaggggttcctgatcgctgtgcgcgggttaaacggcggaaggatcaatattgcttcatgctccttgggcgcagctcatgcctccgtgatcctgacacgggaccatctcaacgttaggaagcagttcggtgaacctctggcgtccaaccaatatctgcaatttactctggcggacatggcgacgcggctcgtcgccgcgcgtctcatggtcagaaacgctgcggtcgcactgcaagaagaacggaaagacgccgttgcgctctgctccatggctaaacttttcgctactgacgaatgctttgctatatgcaaccaggccttgcaaatgcatggggggtatggctatctaaaagattacgccgtgcaacagtacgtacgagactcccgggtacaccaaattctggagggcagcaacgaggtgatgcggattctaatatcccggagtctgctgcaggaatag

SEQ ID NO: 179743 - DNA, 819 bp, Artificial Sequence
  derived and/or modified sequence
atgggcctgaacgaggagcagaaggagttccagaaggtggccttcgatttcgccgcccgggagatggctccaaacatggccgagtgggaccagaaggaactgtttcccgtggatgttatgcgcaaggcagcgcagcttggattcgggggagtgtatatccagaccgacgtgggtggttcgggtttgagtcgactagatacaagcgtgatttttgaggccctggcaaccgggtgcacttctaccactgcatacatcagcattcataacatgtgtgcctggatgatcgacagtttcgggaacgaggaacagagacataagttctgtccgcccctgtgcactatggaaaagtttgcttcctattgcctcactgaacctggttcagggagtgacgcagcgagtctgctgaccagcgcaaaaaagcagggcgatcactatatcctgaatggatcaaaggcatttatcagcggagcgggcgaatctgatatttacgttgtgatgtgcaggaccggcggtcctgggcctaagggcatttcatgcatagttgtcgagaagggtactcccggacttagtttcggaaaaaaggagaaaaaagttggatggaacagtcaacctacccgggccgtcatctttgaggattgcgccgtgcccgttgccaaccgtatcggttcagaaggacaaggattcctcatcgccgtgcgaggtctcaatggaggccgtatcaatatcgctagctgttcccttggctgtcctcgtctctgtcaccctcacccaaggcctccccaatgtcccgaagcagtgtggcgagcttcagggcaatag

SEQ ID NO: 179744 - DNA, 681 bp, Artificial Sequence
  derived and/or modified sequence
atgaagagccggaagaacttcaagaagtggcccctgaccctgctgccagagcgctggctccagatctggcaatctggaacgcggagtatgtgtgcttggatgatcgacagctttgggaacgaggaacagagacacaagttctgtcctccattatgcaccatggagaagttcgcttcctattgcctgacggaacccgggagcggctccgatgctgcatctcttctcacctccgccaaaaaacagggggaccattacatcttgaacgggagtaaagcctttattagtggagctggggagtcagatatttacgtggtcatgtgccgtaccggagggccaggtcccaaagggatctcctgcattgtggttgaaaaggggacccctggcttaagttttggcaaaaaggaaaagaaggtggggtggaattcccaaccaacccgagcagtgatcttcgaggactgcgctgttcccgtagctaacagaataggaagcgaaggacaggggtttctcattgctgtaaggggattaaacggcggacgcatcaacatcgctagctgttccttaggagccgcacatgcaagcgttatcttaactagggaccatcttaacgttaggaagcaattcggcgagcctctggcatctaatcaaaaaaagcaggagacccttaaactgtggatcacctag

SEQ ID NO: 179745 - DNA, 1248 bp, Artificial Sequence
  derived and/or modified sequence
atgctgtggagtggctgtcggagatttggagccagactcggatgcctccccggtggtctgcgtgtccttgtacaaactgggcacaggtcgctgacctcatgtatagacccatctatgggcctgaatgaggagcagaaggagttccagaaagtggcgttcgactttgccgctcgggagatggctccaaatatggcagagtgggaccagaaagagctcttccctgtggacgttatgagaaaggccgcacaattggggtttggcggagtttacattcagaccgacgtcggcggttctggacttagccgccttgacacctccgtgatcttcgaggccctggctacgggttgcacatctactacagcctatattagcatacacaacatgtgcgcctggatgatcgactcattcggcaatgaggagcagcgccacaagttctgcccccctctttgtaccatggagaagtttgcctcatattgccttactgagcctggatccggctcagatgccgcttcgctgctgacctcagcaaagaagcagggagatcactacattttgaacgggtcaaaagctttcatatccggtgctggcgagagcgatatttatgtggtcatgtgcaggactggtggccctggaccaaagggcatcagctgcatagtcgttgagaaaggcacccctggattgtctttcggcaaaaaggaaaaaaaagttggctggaacagtcagccaactagggccgtaattttcgaggattgcgcagtccccgtggccaaccgaatcggttccgaagggcaaggttttctgatcgcagtccgcggactcaacgggggaaggattaacattgcttcatgttccctgggggctgcacatgcctcagtgattctgacccgtgatcatctcaacgtaaggaaacagttcggggagcccctcgcatcgaatcagtatctccagtttaccttggcagacatggctacaagattggttgccgcacgtctcatggttagaaacgcggcagtagctttgcaggaagagaggaaggacgcagttgctttatgctctatggcaaagttattcgccacagacgagtgttttgctatctgtaatcaggccctgcagatgcatggagggtacggttacttgaaagactatgccgtacagcagtatgttagggactctcgggtacatcagatcctggaaggatctaatgaagtcatgcgtatactcatctccaggtcccttctgcaagaatag

SEQ ID NO: 179746 - DNA, 819 bp, Artificial Sequence
  derived and/or modified sequence
atgggactgaacgaggagcagaaagaatttcagaaggtggcttttgattttgccgctcgggagatggcacccaatatggcggaatgggatcagaaagaactcttcccggttgatgtgatgcgaaaggccgctcagctcggattcggtggtgtctacatccaaactgacgtgggcggaagcgggctgtcacgcctcgatacatctgtgattttcgaggccttagccactggctgcacatcgacaactgcatatattagcattcataatatgtgtgcctggatgattgattcctttggcaatgaagaacagcgccataagttttgcccacccttatgcaccatggaaaagtttgcatcctactgcctcacggagcccggttcaggatctgacgctgcctctctcctgacttctgcaaagaagcagggggaccattatattctcaatggtagcaaggccttcatttcaggagctggcgaaagcgatatttacgtggtgatgtgccgaactgggggacccggacccaagggcatatcatgtattgtagtagaaaagggaacgcccggactgtcattcggcaagaaagagaagaaggtgggctggaacagccagccaacgagagccgtcattttcgaggactgtgctgtgcccgtggccaataggatcggctccgaaggtcaggggttcctgatagctgtcaggggactcaatgggggacgcattaacatcgctagttgttcacttggatgtccacgcctgtgccacccgcacccaagaccccctcagtgccctgaggctgtttggagagcaagcggacaatag

SEQ ID NO: 179747 - DNA, 681 bp, Artificial Sequence
  derived and/or modified sequence
atgaagtcccgaaagaatttcaagaagtggcccttgacactgctgcctgaacggtggctgcagatctggcagtctggtacccggtccatgtgcgcttggatgatagactcgtttggaaacgaggaacagcgccacaaattctgcccccctctctgcactatggagaagttcgcaagctactgcctgacagagccaggctcagggtcggacgctgcttccctgctgacttctgccaagaaacaaggcgaccattacattctcaatggctctaaagcctttatctcaggggctggagaaagcgacatctatgtggtgatgtgtcgcaccgggggacccggacccaaaggcatcagttgtatcgtcgtcgagaaaggcacccctggcctgtcttttggaaaaaaagaaaaaaaagtgggctggaacagtcaacccactagggccgtgatctttgaagactgcgctgtgcccgtcgctaatcggatcggctctgaaggtcagggatttctgatagctgtaagaggcctgaacggcggaagaattaacatcgctagctgttcacttggggcagcccacgcatcagtgatcctgacgagggatcatctaaacgttcgcaagcagttcggggagccgctggcatctaatcagaaaaagcaggaaacactcaaattgtggattacatag

SEQ ID NO: 179748 - DNA, 1248 bp, Artificial Sequence
  derived and/or modified sequence
atgctgtggagcggctgcagaagattcggcgccagactgggctgcctgcccggcggcctgagagtgctggtgcagaccggccacagaagcctgaccagctgcatcgaccccagcatgggcctgaacgaggagcagaaggagttccagaaggtggccttcgacttcgccgccagagagatggcccccaacatggccgagtgggaccagaaggagctgttccccgtggacgtgatgagaaaggccgcccagctgggcttcggcggcgtgtacatccagaccgacgtgggcggcagcggcctgagcagactggacaccagcgtgatcttcgaggccctggccaccggctgcaccagcaccaccgcctacatcagcatccacaacatgtgcgcctggatgatcgacagcttcggcaacgaggagcagagacacaagttctgcccccccctgtgcaccatggagaagttcgccagctactgcctgaccgagcccggcagcggcagcgacgccgccagcctgctgaccagcgccaagaagcagggcgaccactacatcctgaacggcagcaaggccttcatcagcggcgccggcgagagcgacatctacgtggtgatgtgcagaaccggcggccccggccccaagggcatcagctgcatcgtggtggagaagggcacccccggcctgagcttcggcaagaaggagaagaaggtgggctggaacagccagcccaccagagccgtgatcttcgaggactgcgccgtgcccgtggccaacagaatcggcagcgagggccagggcttcctgatcgccgtgagaggcctgaacggcggcagaatcaacatcgccagctgcagcctgggcgccgcccacgccagcgtgatcctgaccagagaccacctgaacgtgagaaagcagttcggcgagcccctggccagcaaccagtacctgcagttcaccctggccgacatggccaccagactggtggccgccagactgatggtgagaaacgccgccgtggccctgcaggaggagagaaaggacgccgtggccctgtgcagcatggccaagctgttcgccaccgacgagtgcttcgccatctgcaaccaggccctgcagatgcacggcggctacggctacctgaaggactacgccgtgcagcagtacgtgagagacagcagagtgcaccagatcctggagggcagcaacgaggtgatgagaatcctgatcagcagaagcctgctgcaggagtag

SEQ ID NO: 179749 - DNA, 819 bp, Artificial Sequence
  derived and/or modified sequence
atgggcctgaacgaggagcagaaggagttccagaaggtggccttcgacttcgccgccagagagatggcccccaacatggccgagtgggaccagaaggagctgttccccgtggacgtgatgagaaaggccgcccagctgggcttcggcggcgtgtacatccagaccgacgtgggcggcagcggcctgagcagactggacaccagcgtgatcttcgaggccctggccaccggctgcaccagcaccaccgcctacatcagcatccacaacatgtgcgcctggatgatcgacagcttcggcaacgaggagcagagacacaagttctgcccccccctgtgcaccatggagaagttcgccagctactgcctgaccgagcccggcagcggcagcgacgccgccagcctgctgaccagcgccaagaagcagggcgaccactacatcctgaacggcagcaaggccttcatcagcggcgccggcgagagcgacatctacgtggtgatgtgcagaaccggcggccccggccccaagggcatcagctgcatcgtggtggagaagggcacccccggcctgagcttcggcaagaaggagaagaaggtgggctggaacagccagcccaccagagccgtgatcttcgaggactgcgccgtgcccgtggccaacagaatcggcagcgagggccagggcttcctgatcgccgtgagaggcctgaacggcggcagaatcaacatcgccagctgcagcctgggctgccccagactgtgccacccccaccccagacccccccagtgccccgaggccgtgtggagagccagcggccagtag

SEQ ID NO: 179750 - DNA, 681 bp, Artificial Sequence
  derived and/or modified sequence
atgaagagcagaaagaacttcaagaagtggcccctgaccctgctgcccgagagatggctgcagatctggcagagcggcaccagaagcatgtgcgcctggatgatcgacagcttcggcaacgaggagcagagacacaagttctgcccccccctgtgcaccatggagaagttcgccagctactgcctgaccgagcccggcagcggcagcgacgccgccagcctgctgaccagcgccaagaagcagggcgaccactacatcctgaacggcagcaaggccttcatcagcggcgccggcgagagcgacatctacgtggtgatgtgcagaaccggcggccccggccccaagggcatcagctgcatcgtggtggagaagggcacccccggcctgagcttcggcaagaaggagaagaaggtgggctggaacagccagcccaccagagccgtgatcttcgaggactgcgccgtgcccgtggccaacagaatcggcagcgagggccagggcttcctgatcgccgtgagaggcctgaacggcggcagaatcaacatcgccagctgcagcctgggcgccgcccacgccagcgtgatcctgaccagagaccacctgaacgtgagaaagcagttcggcgagcccctggccagcaaccagaagaagcaggagaccctgaagctgtggatcacctag

SEQ ID NO: 179751 - DNA, 2249 bp, Artificial Sequence
  derived and/or modified sequence
agggtgcagtgggacaggcgttgccgggtcgcaggtcccgccagtgcgagcgcaacggaggtcgaaggcgttcagactcttagctgaacgcggagctgcggcggctatgctgtggagcggctgccggcgtttcggggcgcgcctcggctgcctgcccggcggtctccgggtcctcgtccagaccggccaccggagcttgacctcctgcatcgacccttccatgggacttaatgaagagcagaaagaatttcaaaaagtggcctttgactttgctgcccgagagatggctccaaatatggcagagtgggaccagaaggagctgttcccagtggatgtgatgcggaaggcagcccagctaggcttcggaggggtctacatacaaacagatgtgggcgggtctgggctgtcacgtcttgatacctctgtcatttttgaagccttggctacaggctgcaccagcaccacagcctatataagcatccacaacatgtgtgcctggatgattgatagcttcggaaatgaggaacagaggcacaaattttgcccaccgctctgtaccatggagaagtttgcttcctactgcctcactgaaccaggaagtgggagtgatgctgcctctcttctgacctccgctaagaaacagggagatcattacatcctcaatggctccaaggccttcatcagtggtgctggtgagtcagacatctatgtggtcatgtgccgaacaggaggaccaggccccaagggcatctcatgcatagttgttgagaaggggacccctggcctcagctttggcaagaaggagaaaaaggtggggtggaactcccagccaacacgagctgtgatcttcgaagactgtgctgtccctgtggccaacagaattgggagcgaggggcagggcttcctcattgccgtgagaggactgaacggagggaggatcaatattgcttcctgctccctgggggctgcccacgcctctgtcatcctcacccgagaccacctcaatgtccggaagcagtttggagagcctctggccagtaaccagtacttgcaattcacactggctgatatggcaacaaggctggtggccgcgcggctgatggtccgcaatgcagcagtggctctgcaggaggagaggaaggatgcagtggccttgtgctccatggccaagctctttgctacagatgaatgctttgccatctgcaaccaggccttgcagatgcacgggggctacggctacctgaaggattacgctgttcagcagtacgtgcgggactccagggtccaccagattctagaaggtagcaatgaagtgatgaggatactgatctctagaagcctgcttcaggagtagaacccacacttgttctggcctggtgttcagtgcgactgcagtcagtgttgagtggtgccatgtgggccgctctattccaaaggaatcatggattagacccaagggctgagctcctctagggcaggacctgcaccctgtgtgttggcaccagcatcgggtcttggactggggcagaatccccagtggaaccggaagagctggactgatgagaaacatcagaagaacacatactaccttgttttcctaatgccagaagggtgaccagtgaagattcaccgtcaaaccatgaaagtcctttcttggatccactttatcttgattagtctgcattttactagttcactggatccctcctctaggggcctggggactttcactgatgctcttcctgattctagagcaaaggtgtgggaaggggaaatggaggaatgccctcctgtctgtgtcgttctctgtgccacagctacagatgcagaaggtttctctggatagcacacctctgaatgtaaatcatgataaaatggatatttggaaacttactcctaagctgtgatttagggtgtatttctacttctggactgcctcaatatcaagggctgagacttttgaattttgaatattcgttgggtttcatgttaagaagcctgtggtctaggagtgctattcagtgtttcttttcctgataaacactttgaatattttttttgtgtttttgtttccttttctgaagctgttcctccttttaaatatttttaatcacattgataaaatctatccttcaccacctctggttctactatagttgatttttattttaaatgtttaattgtatttgattaaacacttaactggattttggaataataaaactctcgtccaatttggcttttaaaaa

SEQ ID NO: 179752 - DNA, 2169 bp, Artificial Sequence
  derived and/or modified sequence
agactcttagctgaacgcggagctgcggcggctatgctgtggagcggctgccggcgtttcggggcgcgcctcggctgcctgcccggcggtctccgggtcctcgtccagaccggccaccggagcttgacctcctgcatcgacccttccatgggacttaatgaagagcagaaagaatttcaaaaagtggcctttgactttgctgcccgagagatggctccaaatatggcagagtgggaccagaaggagctgttcccagtggatgtgatgcggaaggcagcccagctaggcttcggaggggtctacatacaaacagatgtgggcgggtctgggctgtcacgtcttgatacctctgtcatttttgaagccttggctacaggctgcaccagcaccacagcctatataagcatccacaacatgtgtgcctggatgattgatagcttcggaaatgaggaacagaggcacaaattttgcccaccgctctgtaccatggagaagtttgcttcctactgcctcactgaaccaggaagtgggagtgatgctgcctctcttctgacctccgctaagaaacagggagatcattacatcctcaatggctccaaggccttcatcagtggtgctggtgagtcagacatctatgtggtcatgtgccgaacaggaggaccaggccccaagggcatctcatgcatagttgttgagaaggggacccctggcctcagctttggcaagaaggagaaaaaggtggggtggaactcccagccaacacgagctgtgatcttcgaagactgtgctgtccctgtggccaacagaattgggagcgaggggcagggcttcctcattgccgtgagaggactgaacggagggaggatcaatattgcttcctgctccctggggtgcccacgcctctgtcatcctcacccgagaccacctcaatgtccggaagcagtttggagagcctctggccagtaaccagtacttgcaattcacactggctgatatggcaacaaggctggtggccgcgcggctgatggtccgcaatgcagcagtggctctgcaggaggagaggaaggatgcagtggccttgtgctccatggccaagctctttgctacagatgaatgctttgccatctgcaaccaggccttgcagatgcacgggggctacggctacctgaaggattacgctgttcagcagtacgtgcgggactccagggtccaccagattctagaaggtagcaatgaagtgatgaggatactgatctctagaagcctgcttcaggagtagaacccacacttgttctggcctggtgttcagtgcgactgcagtcagtgttgagtggtgccatgtgggccgctctattccaaaggaatcatggattagacccaagggctgagctcctctagggcaggacctgcaccctgtgtgttggcaccagcatcgggtcttggactggggcagaatccccagtggaaccggaagagctggactgatgagaaacatcagaagaacacatactaccttgttttcctaatgccagaagggtgaccagtgaagattcaccgtcaaaccatgaaagtcctttcttggatccactttatcttgattagtctgcattttactagttcactggatccctcctctaggggcctggggactttcactgatgctcttcctgattctagagcaaaggtgtgggaaggggaaatggaggaatgccctcctgtctgtgtcgttctctgtgccacagctacagatgcagaaggtttctctggatagcacacctctgaatgtaaatcatgataaaatggatatttggaaacttactcctaagctgtgatttagggtgtatttctacttctggactgcctcaatatcaagggctgagacttttgaattttgaatattcgttgggtttcatgttaagaagcctgtggtctaggagtgctattcagtgtttcttttcctgataaacactttgaatattttttttgtgtttttgtttccttttctgaagctgttcctccttttaaatatttttaatcacattgataaaatctatccttcaccacctctggttctactatagttgatttttattttaaatgtttaattgtatttgattaaacacttaactggattttggaataataaaactctcgtccaatttggctttt

SEQ ID NO: 179753 - protein, 467 aa, Artificial Sequence
  derived and/or modified sequence
MLLLLLLPLLWGRERVEGQKSNRKDYSLTMQSSVTVQEGMCVHVRCSFSYPVDSQTDSDPVHGYWFRAGNDISWKAPVATNNPAWAVQEETRDRFHLLGDPQTKNCTLSIRDARMSDAGRYFFRMEKGNIKWNYKYDQLSVNVTALTHRPNILIPGTLESGCFQNLTCSVPWACEQGTPPMISWMGTSVSPLHPSTTRSSVLTLIPQPQHHGTSLTCQVTLPGAGVTTNRTIQLNVSYPPQNLTVTVFQGEGTASTALGNSSSLSVLEGQSLRLVCAVDSNPPARLSWTWRSLTLYPSQPSNPLVLELQVHLGDEGEFTCRAQNSLGSQHVSLNLSLQQEYTGKMRPVSGVLLGAVGGAGATALVFLSFCVIFIVVRSCRKKSARPAADVGDIGMKDANTIRGSASQGNLTESWADDNPRHHGLAAHSSGEEREIQYAPLSFHKGEPQDLSGQEATNNEYSEIKIPK

SEQ ID NO: 179754 - DNA, 1404 bp, Artificial Sequence
  derived and/or modified sequence
atgctactccttctgctgttacccctgctgtggggaagggaacgggtagaggggcagaagtctaatagaaaggattacagccttaccatgcagagcagcgtcaccgttcaggagggaatgtgcgtacacgttaggtgttctttctcctaccccgtcgatagccagaccgattcagatccagtgcacggctactggttcagggccggtaacgacattagttggaaggctcctgtggctacaaataatcccgcatgggcagtgcaggaggaaacacgggatagattccacttattgggggaccctcaaacgaagaactgtaccctgagcatccgcgatgctcgaatgtctgatgcagggagatacttttttcgtatggagaaaggaaacatcaagtggaattacaagtacgatcaactgtctgtcaacgtgaccgcgttgacacatagacctaatatcctgatccctgggacactcgaatccggctgttttcaaaacctgacatgttccgtgccttgggcctgtgagcagggcactcccccaatgatctcctggatggggaccagtgtgtctcctcttcacccgtctaccacacgttccagtgtgctaactctaattccccagccccagcaccatgggacatcccttacgtgtcaagtgactctcccaggggccggtgtcaccacgaatcggacaattcagttaaacgtctcttacccaccacagaatttgaccgtgacagtctttcaaggggaagggactgcctcaacggctctaggcaactccagctctctcagcgtgctggagggtcagagcctacggctcgtatgtgctgtggacagtaatcctcccgcccggctatcctggacatggagaagtcttaccctgtatccgagtcagcccagtaacccccttgtccttgaacttcaggtccacctcggtgacgagggagaattcacttgcagagctcaaaactcactggggtctcagcacgttagcttgaatttaagcctgcaacaggagtataccgggaagatgaggcccgtcagcggagtgctacttggcgccgtcggcggagctggagcgaccgcactcgtctttctcagcttttgcgtgattttcatcgtcgtgaggagctgcagaaaaaaaagcgcaagacctgccgccgacgtaggcgatatcgggatgaaagatgcaaacactattagaggttcggcaagccagggcaacctgaccgagagctgggcggacgacaatccccggcaccacgggctagccgcacattcaagtggtgaggaacgagaaattcaatacgcacccctctcctttcacaaaggtgaaccccaagatctgtccggccaagaagctacgaataatgagtacagcgagattaagatcccaaaatag

SEQ ID NO: 179755 - DNA, 1404 bp, Artificial Sequence
  derived and/or modified sequence
atgctgctgctgctgctgctgcccctgctgtggggccgggagcgggtggagggccagaagagcaacaggaaggactacagcctgaccatgcagagctctgtgacagtgcaggagggcatgtgtgtgcacgtgcgctgcagcttctcctaccctgtggacagccagacagacagcgaccctgtgcacggctactggttccgggctggaaatgacatctcctggaaggcccctgtggccaccaacaacccagcctgggccgtgcaggaggagacccgggaccgcttccacctgctgggggacccccagaccaagaactgcaccctgagcatcagagatgccaggatgtctgatgctggccgctacttcttcaggatggagaagggcaacatcaagtggaactacaagtatgaccagctgtctgtgaatgtgacagccctgacccaccggcccaacatcctgatccctggcaccctggagagcggctgcttccagaacctgacctgcagcgtgccctgggcctgtgagcagggcaccccacccatgatctcctggatgggcacctctgtgagccccctgcaccccagcaccaccaggagctctgtgctgaccctcatcccccagccccagcaccacggcaccagcctgacctgccaggtgaccctgcccggggccggcgtgaccaccaacagaaccatccagctgaatgtgtcctacccaccccagaacctgactgtgaccgtcttccagggcgagggcacagccagcacagccctgggcaacagcagcagcctgtctgtgctggagggccagagcctgcggctggtgtgtgctgtggacagcaaccccccagcccggctgtcctggacctggaggagcctgaccctgtaccccagccagcccagcaaccccctggtgctggagctgcaggtgcacctgggagatgaaggagagttcacctgccgggcccagaacagcctgggcagccagcacgtgtccctgaacctgagcctgcagcaggagtacaccgggaagatgaggcctgtgtctggagtgctgctgggcgctgtgggcggggccggggccacagccctggtgttcctgtccttctgtgtgatcttcatcgtggtgcgcagctgcaggaagaagagcgcccggcctgctgctgatgtgggggacatcggcatgaaggatgccaacaccatccggggcagcgccagccagggcaacctgacagagagctgggcagatgacaaccccaggcaccacggcctggccgcccacagcagtggagaggagcgggagatccagtatgcccccctgtccttccacaagggggagccccaggacctgagcggccaggaggccaccaacaatgagtacagcgagatcaagatccccaagtag

SEQ ID NO: 179756 - DNA, 1404 bp, Artificial Sequence
  derived and/or modified sequence
atgctgctgctgctgctgctgcccctgctgtggggccgggagcgggtggaaggacagaagtccaatcgcaaggattatagtctgaccatgcagtcctctgtaacggtgcaggaggggatgtgcgtgcacgtccgctgttcattctcataccccgtggatagtcagacggacagcgatcccgtacatggctactggttcagagccggaaatgatatcagctggaaagcccctgtagccacaaataatcccgcatgggccgtgcaggaagaaactagggatagatttcatctcttaggagaccctcagacgaaaaattgcacattgtccatccgcgatgccaggatgtccgacgccggccgctatttttttagaatggaaaaaggcaacatcaaatggaactataaatacgaccagcttagcgtcaacgtcactgcgttgacccaccggccaaacatactgattcctggaactctagaaagtggatgttttcagaatctgacgtgcagtgtgccgtgggcatgtgagcagggaacacctcctatgatttcatggatgggaacaagcgtcagcccactgcacccctctacaacaaggagcagtgttctgacactcatccctcagccacagcaccacggtacaagcttgacatgtcaggttacactcccgggtgcaggtgtcaccacgaacaggacaatccagctcaacgtgagttacccaccacaaaacctgactgttacagtttttcagggagaaggtacagcaagtacagccctcggtaatagctcctcgctgtctgtcctggaggggcagtccctgaggctggtgtgcgctgtggacagtaacccaccagctcggttgtcttggacatggaggagcctgacactataccccagccagcctagtaatcctttagtcctggagctgcaagtgcacctaggtgatgagggtgagtttacctgccgtgcgcagaatagcctggggtcccagcacgttagtttgaacctgtctctccagcaggaatacaccggaaagatgaggccagtctccggtgttttactgggagctgttgggggcgcgggagctaccgcactggtctttctgagcttttgtgtgattttcatcgtagttagatcatgccggaagaaaagtgcgcgtcccgcagccgatgtgggcgatatcggcatgaaggacgcgaatactatccggggatctgcctcgcagggaaatcttacagagtcttgggcggacgacaatccccgccatcatgggctcgccgcccactcttctggtgaggagagggaaattcagtacgcacctctcagttttcataagggtgagccccaggacctgtccggccaggaagctaccaacaacgaatattccgaaataaagatcccgaaatag

SEQ ID NO: 179757 - DNA, 1404 bp, Artificial Sequence
  derived and/or modified sequence
atgctgcttctgctactcctgccactgctgtggggcagagaacgtgtagagggacaaaaatctaataggaaggattattccctgacgatgcaaagtagcgttacagttcaggaaggcatgtgcgtgcacgttcgatgctccttttcctatccagttgacagtcagacagatagtgacccagttcatggttactggttccgggctggtaatgacatctcctggaaagcccctgtagccacgaataaccccgcttgggctgtgcaggaggagacacgggaccgatttcacctcttaggagatccccagaccaaaaactgtacccttagtatccgagacgccagaatgagcgacgctggtcggtactttttcaggatggagaagggcaacatcaagtggaattacaagtatgatcagctgtccgtaaacgtgacagccctgactcacaggcctaacattctcattcccggaacactggaatctggatgttttcagaatctgacatgctccgtgccctgggcatgtgaacagggcactccaccaatgatttcttggatgggaactagtgtctctccactgcatccaagtaccacccgaagcagtgttctcaccttgatcccccagccgcagcaccatggaacatccctgacctgtcaggtgacgcttccaggcgcaggtgttactacaaaccggaccatacagcttaacgtgtcttaccctccgcagaatttaactgtcaccgtgttccaaggagaaggaaccgcaagtaccgccttaggcaactcctcaagcctgagcgtgctggaaggtcagtcactcaggctggtctgtgcagttgatagcaatccccctgccaggttatcctggacatggaggagcctgaccctttacccttcccagcccagcaatcctttagttctggagctgcaggtgcacctgggcgatgagggagagtttacctgccgggctcagaactcacttggctcacagcacgtatccctgaacctgagcctccagcaggaatacacgggcaaaatgcggccagtctccggtgtgttgcttggtgcagtcggaggagcaggggctacagccctggtcttcctctcattctgtgtcatttttatcgtcgtgcggtcctgtaggaagaaatctgcaaggcccgctgctgatgttggcgacattggcatgaaggatgcaaacactattagagggagtgcttcccagggcaatctgaccgaaagctgggccgacgacaatccacgtcatcacggactcgcagcacactctagtggggaggagagagagatccagtacgcacctctgagtttccataaaggggaaccccaggatctctcaggccaagaggccacgaacaatgaatattctgagataaaaattcccaagtag

SEQ ID NO: 179758 - DNA, 1754 bp, Artificial Sequence
  derived and/or modified sequence
gcagttcctgagagaagaaccctgaggaacagacgttccctcgcggccctggcacctccaaccccagatatgctgctgctgctgctgctgcccctgctctgggggagggagagggtggaaggacagaagagtaaccggaaggattactcgctgacgatgcagagttccgtgaccgtgcaagagggcatgtgtgtccatgtgcgctgctccttctcctacccagtggacagccagactgactctgacccagttcatggctactggttccgggcagggaatgatataagctggaaggctccagtggccacaaacaacccagcttgggcagtgcaggaggaaactcgggaccgattccacctccttggggacccacagaccaaaaattgcaccctgagcatcagagatgccagaatgagtgatgcggggagatacttctttcgtatggagaaaggaaatataaaatggaattataaatatgaccagctctctgtgaacgtgacagccttgacccacaggcccaacatccttatccccggtaccctggagtctggctgcttccagaatctgacctgctctgtgccctgggcctgtgagcaggggacgccccctatgatctcctggatggggacctctgtgtcccccctgcacccctccaccacccgctcctcagtgctcaccctcatcccacagccccagcaccacggcaccagcctcacctgtcaggtgaccttgcctggggccggcgtgaccacgaacaggaccatccaactcaatgtgtcctaccctcctcagaacttgactgtgactgtcttccaaggagaaggcacagcatccacagctctggggaacagctcatctctttcagtcctagagggccagtctctgcgcttggtctgtgctgttgacagcaatccccctgccaggctgagctggacctggaggagtctgaccctgtacccctcacagccctcaaaccctctggtactggagctgcaagtgcacctgggggatgaaggggaattcacctgtcgagctcagaactctctgggttcccagcacgtttccctgaacctctccctgcaacaggagtacacaggcaaaatgaggcctgtatcaggagtgttgctgggggcggtcgggggagctggagccacagccctggtcttcctctccttctgtgtcatcttcattgtagtgaggtcctgcaggaagaaatcggcaaggccagcagcggacgtgggagacataggcatgaaggatgcaaacaccatcaggggctcagcctctcagggtaacctgactgagtcctgggcagatgataacccccgacaccatggcctggctgcccactcctcaggggaggaaagagagatccagtatgcacccctcagctttcataagggggagcctcaggacctatcaggacaagaagccaccaacaatgagtactcagagatcaagatccccaagtaagaaaatgcagaggctcgggcttgtttgagggttcacgacccctccagcaaaggagtctgaggctgattccagtagaattagcagccctcaatgctgtgcaacaagacatcagaacttattcctcttgtctaactgaaaatgcatgcctgatgaccaaactctccctttccccatccaatcggtccacactccccgccctggcctctggtacccaccattctcctctgtacttctctaaggatgactactttagattccgaatatagtgagattgtaacgtg

SEQ ID NO: 179759 - DNA, 1404 bp, Artificial Sequence
  derived and/or modified sequence
atgctgctgctgctgctgctgcccctgctgtggggcagagagagagtggagggccagaagagcaacagaaaggactacagcctgaccatgcagagcagcgtgaccgtgcaggagggcatgtgcgtgcacgtgagatgcagcttcagctaccccgtggacagccagaccgacagcgaccccgtgcacggctactggttcagagccggcaacgacatcagctggaaggcccccgtggccaccaacaaccccgcctgggccgtgcaggaggagaccagagacagattccacctgctgggcgacccccagaccaagaactgcaccctgagcatcagagacgccagaatgagcgacgccggcagatacttcttcagaatggagaagggcaacatcaagtggaactacaagtacgaccagctgagcgtgaacgtgaccgccctgacccacagacccaacatcctgatccccggcaccctggagagcggctgcttccagaacctgacctgcagcgtgccctgggcctgcgagcagggcaccccccccatgatcagctggatgggcaccagcgtgagccccctgcaccccagcaccaccagaagcagcgtgctgaccctgatcccccagccccagcaccacggcaccagcctgacctgccaggtgaccctgcccggcgccggcgtgaccaccaacagaaccatccagctgaacgtgagctaccccccccagaacctgaccgtgaccgtgttccagggcgagggcaccgccagcaccgccctgggcaacagcagcagcctgagcgtgctggagggccagagcctgagactggtgtgcgccgtggacagcaacccccccgccagactgagctggacctggagaagcctgaccctgtaccccagccagcccagcaaccccctggtgctggagctgcaggtgcacctgggcgacgagggcgagttcacctgcagagcccagaacagcctgggcagccagcacgtgagcctgaacctgagcctgcagcaggagtacaccggcaagatgagacccgtgagcggcgtgctgctgggcgccgtgggcggcgccggcgccaccgccctggtgttcctgagcttctgcgtgatcttcatcgtggtgagaagctgcagaaagaagagcgccagacccgccgccgacgtgggcgacatcggcatgaaggacgccaacaccatcagaggcagcgccagccagggcaacctgaccgagagctgggccgacgacaaccccagacaccacggcctggccgcccacagcagcggcgaggagagagagatccagtacgcccccctgagcttccacaagggcgagccccaggacctgagcggccaggaggccaccaacaacgagtacagcgagatcaagatccccaagtag

SEQ ID NO: 179760 - protein, 252 aa, Artificial Sequence
  derived and/or modified sequence
MEEAILVPCVLGLLLLPILAMLMALCVHCHRLPGSYDSTSSDSLYPRGIQFKRPHTVAPWPPAYPPVTSYPPLSQPDLLPIPRSPQPRRDSDGANSVASYENEGASGIRGAQAGWGVWGPSWTRLTPVSLPPEPACEDADEDEDDYHNPGYLVVLPDSTPATSTAAPSAPALSTPGIRDSAFSMESIDDYVNVPESGESAEASLDGSREYVNVSQELHPGAAKTEPAALSSQEAEEVEEEGAPDYENLQELN

SEQ ID NO: 179761 - protein, 262 aa, Artificial Sequence
  derived and/or modified sequence
MEEAILVPCVLGLLLLPILAMLMALCVHCHRLPGSYDSTSSDSLYPRGIQFKRPHTVAPWPPAYPPVTSYPPLSQPDLLPIPRSPQPLGGSHRTPSSRRDSDGANSVASYENEGASGIRGAQAGWGVWGPSWTRLTPVSLPPEPACEDADEDEDDYHNPGYLVVLPDSTPATSTAAPSAPALSTPGIRDSAFSMESIDDYVNVPESGESAEASLDGSREYVNVSQELHPGAAKTEPAALSSQEAEEVEEEGAPDYENLQELN

SEQ ID NO: 179762 - DNA, 759 bp, Artificial Sequence
  derived and/or modified sequence
atggaagaggccattctggttccttgtgttctcggtcttctgctgctgcccatactggcaatgctaatggctctttgtgttcattgccataggcttcctgggagctatgactcgacgtcctccgattctctctatccccgcgggatacaatttaagcgcccacatacagttgctccatggcccccggcttatccaccagtgacctcctatccacccttaagtcagccagacctcctgccaatcccacggtctccccagccccgcagagactcagatggcgcaaattccgtcgcctcttatgagaatgaaggagcctctgggatacggggtgcccaagctggttggggagtttgggggccctcgtggacccgattgacacctgttagcttgcctccggagccggcctgcgaagatgcagacgaagatgaagacgactaccacaatccaggatatttagtagttctgcctgattcaacaccagcaacaagtaccgctgccccttccgctcctgctctgtcaactcccggcattagagactccgcatttagcatggagtctatcgacgattatgtgaacgtcccagagtcgggagaatctgcagaagccagccttgatggaagccgggagtatgtcaatgtaagccaagagcttcatccgggagcagccaaaaccgagcccgccgcattaagttctcaggaggccgaggaagtcgaggaagagggcgctcccgactacgagaacctacaggagctgaactag

SEQ ID NO: 179763 - DNA, 789 bp, Artificial Sequence
  derived and/or modified sequence
atggaggaggcaatcctcgttccttgtgtgcttggcctgctgttattgcctattcttgccatgctgatggcgttgtgcgtgcactgccataggctgcccggctcttatgactctacttccagtgattcgttgtacccgcgcggaatccagtttaagaggcctcacacggtggctccctggcctccagcttatcctcccgtgacatcttacccaccgctgagccagcccgacctgttacctattccaaggagcccgcagcctctggggggcagtcacagaacaccaagtagcaggcgggactctgacggggccaattctgtggcaagttatgagaacgagggggcttctggcatccggggtgcccaggctggttggggcgtgtggggtcctagttggacccggctgacgcctgtatcccttccacccgaaccagcctgcgaagacgcagacgaggacgaggacgattatcacaacccgggctacctagtggttctgccagatagcacaccagcaaccagtactgcagcccctagcgcgccagccctgagtaccccaggcatcagggatagcgccttctccatggagtccatcgacgactatgtcaacgtcccagagtcgggggagagtgccgaagcctcgttagatggaagccgagagtatgtcaacgtgtcccaagagctgcatccgggtgccgcgaagactgagcccgcagcgctcagcagtcaggaggctgaggaagtggaagaggagggtgcccctgattacgagaacctccaggaacttaactag

SEQ ID NO: 179764 - DNA, 759 bp, Artificial Sequence
  derived and/or modified sequence
atggaggaggccatcctggtgccctgtgtgctgggcctgctgctgctgcccatcctggccatgctgatggccctgtgtgtgcactgccaccggctgcccggcagctatgacagcaccagcagtgacagcctgtacccccggggcatccagttcaagaggccccacacagtggccccctggcccccagcctacccacctgtgaccagctacccacccctgagccagcctgacctgctgcccatccccaggagcccccagccccggcgggacagtgatggagccaacagcgtggccagctatgaaaatgaaggagccagcggcatccggggggcccaggccggctggggcgtgtggggccccagctggacccggctgacccctgtgtccctgcccccagagcccgcctgtgaagatgctgatgaagatgaagatgactaccacaaccctggctacctggtggtgctgcctgacagcaccccagccaccagcacagctgcccccagcgccccagccctgagcaccccaggcatccgggacagcgccttctccatggagagcattgatgattatgtgaatgtgcctgagagcggggagagcgctgaggccagcctggatggcagccgggagtatgtgaatgtgtcccaggagctgcaccctggagctgccaagacagagcctgctgccctgagcagccaggaggccgaggaggtggaggaggagggcgccccagactatgagaacctgcaggagctgaactag

SEQ ID NO: 179765 - DNA, 789 bp, Artificial Sequence
  derived and/or modified sequence
atggaggaggccatcctggtgccctgtgtgctgggcctgctgctgctgcccatcctggccatgctgatggccctgtgtgtgcactgccaccggctgcccggcagctatgacagcaccagcagtgacagcctgtacccccggggcatccagttcaagaggccccacacagtggccccctggcccccagcctacccacctgtgaccagctacccacccctgagccagcctgacctgctgcccatccccaggagcccccagcccctgggcggcagccacaggacccccagcagccggcgggacagtgatggagccaacagcgtggccagctatgaaaatgaaggagccagcggcatccggggggcccaggccggctggggcgtgtggggccccagctggacccggctgacccctgtgtccctgcccccagagcccgcctgtgaagatgctgatgaagatgaagatgactaccacaaccctggctacctggtggtgctgcctgacagcaccccagccaccagcacagctgcccccagcgccccagccctgagcaccccaggcatccgggacagcgccttctccatggagagcattgatgattatgtgaatgtgcctgagagcggggagagcgctgaggccagcctggatggcagccgggagtatgtgaatgtgtcccaggagctgcaccctggagctgccaagacagagcctgctgccctgagcagccaggaggccgaggaggtggaggaggagggcgccccagactatgagaacctgcaggagctgaactag

SEQ ID NO: 179766 - DNA, 759 bp, Artificial Sequence
  derived and/or modified sequence
atggaggaggccatcctggtcccctgcgtgctggggctcctgctgctgcccatcctggccatgttgatggcactgtgtgtgcactgccacagactgccaggctcctacgacagcacatcctcagatagtttgtatccaaggggcatccagttcaaacggcctcacacggttgccccctggccacctgcctacccacctgtcacctcctacccacccctgagccagccagacctgctccccatcccaagatccccgcagccccggcgggattctgatggtgccaacagtgtggcgagctacgagaacgagggtgcgtctgggatccgaggtgcccaggctgggtggggagtctggggtccgtcctggactaggctgacccctgtgtcgttacccccagaaccagcctgtgaggatgcggatgaggatgaggacgactatcacaacccaggctacctggtggtgcttcctgacagcaccccggccactagcactgctgccccatcagctcctgcactcagcacccctggcatccgagacagtgccttctccatggagtccattgatgattacgtgaacgttccggagagcggggagagcgcagaagcgtctctggatggcagccgggagtatgtgaatgtgtcccaggaactgcatcctggagcggctaagactgagcctgccgccctgagttcccaggaggcagaggaagtggaggaagagggggctccagattacgagaatctgcaggagctgaactga

SEQ ID NO: 179767 - DNA, 1715 bp, Artificial Sequence
  derived and/or modified sequence
ggcgggcgccgaggaggggcaggtagggctgggacgcaggggtaactggatcccccgacttcagcccaggccctggtctgaccaccctgggagcagggactttccacagtcagctggacgcacactcagcccagtaaaagaggggacccatcccgggagccccggggagggcacagctgcctcctcccgggctcccctgccacctggtgcctacctgccccctgctccctgccgggtccggtcctcaccccatcttcatctggccttgactctgcccttgaggggcctaggggtgcagccagcctgctccgagctcccctgcagatggaggaggccatcctggtcccctgcgtgctggggctcctgctgctgcccatcctggccatgttgatggcactgtgtgtgcactgccacagactgccaggctcctacgacagcacatcctcagatagtttgtatccaaggggcatccagttcaaacggcctcacacggttgccccctggccacctgcctacccacctgtcacctcctacccacccctgagccagccagacctgctccccatcccaagatccccgcagccccttgggggctcccaccggacgccatcttcccggcgggattctgatggtgccaacagtgtggcgagctacgagaacgagggtgcgtctgggatccgaggtgcccaggctgggtggggagtctggggtccgtcctggactaggctgacccctgtgtcgttacccccagaaccagcctgtgaggatgcggatgaggatgaggacgactatcacaacccaggctacctggtggtgcttcctgacagcaccccggccactagcactgctgccccatcagctcctgcactcagcacccctggcatccgagacagtgccttctccatggagtccattgatgattacgtgaacgttccggagagcggggagagcgcagaagcgtctctggatggcagccgggagtatgtgaatgtgtcccaggaactgcatcctggagcggctaagactgagcctgccgccctgagttcccaggaggcagaggaagtggaggaagagggggctccagattacgagaatctgcaggagctgaactgagggcctgtggaggccgagtctgtcctggaaccaggcttgcctgggacggctgagctgggcagctggaagtggctctggggtcctcacatggcgtcctgcccttgctccagcctgacaacagcctgagaaatccccccgtaacttattatcactttggggttcggcctgtgtcccccgaacgctctgcaccttctgacgcagcctgagaatgacctgccctggccccagccctactctgtgtaatagaataaaggcctgcgtgtgtctgtgttgagcgtgcgtctgtgtgtgcctgtgtgcgagtctgagtcagagatttggagatgtctctgtgtgtttgtgtgtatctgtgggtctccatcctccatgggggctcagccaggtgctgtgacaccccccttctgaatgaagccttctgacctgggctggcactgctgggggtgaggacacattgccccatgagacagtcccagaacacggcagctgctggctgtgacaatggtttcaccatccttagaccaagggatgggacctgatgacctgggaggactctcttagttcttaccttttgtggttctcaataaaacagaacttaaaaaatt

SEQ ID NO: 179768 - DNA, 759 bp, Artificial Sequence
  derived and/or modified sequence
atggaggaggccatcctggtgccctgcgtgctgggcctgctgctgcttccaattcttgctatgctgatggccctgtgcgttcattgccatcggctgcctggcagctacgattctacgtcatccgactcgctgtaccctagaggaatccagtttaaaagaccacacacagtcgctccatggccacctgcctaccctcccgtcacctcctatcctcccctgtcacaacctgatcttctcccaattccacgatcaccacagccacggcgagactctgatggtgctaatagcgtagcctcatatgagaacgaaggcgcatcaggtatccgcggagcacaggccgggtggggcgtttggggcccaagctggacacgtttgactccggtttctctaccaccggaaccggcctgcgaagatgctgatgaggacgaggatgactatcataatcccggatacctcgtggtcctgcctgactctaccccagctacctcgacggctgccccatctgctcccgcattatccactcccggaattcgcgatagcgcattctccatggaatcgatcgatgactacgtaaatgtgcctgagagcggagaatccgccgaggctagcttagacggctctagagagtacgtgaatgtgtcccaggaactgcatcccggagccgcaaagaccgagcctgcggctctgagtagccaggaggctgaagaagtcgaggaagaaggagcccctgactacgaaaacctgcaggaacttaactag

SEQ ID NO: 179769 - DNA, 789 bp, Artificial Sequence
  derived and/or modified sequence
atggaggaggccatcctggtgccctgcgtgctgggcctgctgctgcttccgatcctcgccatgctcatggccttgtgcgtgcactgtcaccgccttccaggaagctatgatagtacgagtagtgactcactgtaccccaggggcatccagtttaaacggccccacaccgtagctccctggccgccagcctatcctccagtaacctcataccccccgctgtcgcagccagaccttctcccaatacccaggagccctcagccactgggaggctcccatcgcactccctctagccgccgggactcagacggcgccaattccgtggcctcttatgaaaacgaaggggcctcaggaatcaggggagctcaagctggctggggagtctggggtccctcctggactcgtctgaccccagtgagtctccctccagaacccgcttgtgaagacgcagatgaggacgaagacgactaccacaaccccggctatctggtcgtgttgccagattctactccagccaccagcaccgccgcaccctccgctcccgccctcagtacccccgggattcgggactcggctttctccatggagagcatcgacgactatgttaatgtccccgagagcggagagtctgctgaggcatctctggatggatccagagagtacgtaaatgtcagtcaggagttgcatccaggggccgccaagacagaacccgcagcattgtcaagtcaggaggccgaggaagtggaagaggagggtgctccagactacgaaaaccttcaggagctgaactag

SEQ ID NO: 179770 - DNA, 759 bp, Artificial Sequence
  derived and/or modified sequence
atggaagaggcgatcctagtcccatgtgttctgggacttctgcttcttcctatcctggcgatgctgatggctttatgcgttcattgtcaccggttaccgggaagctacgattcaacgtcatccgactcgctatatccacggggaatccagtttaagcggcctcacaccgtagcaccctggcctcctgcttatccccctgtgactagctacccccctctgtcacaacccgacttgctgcctattcccaggtcaccacagccccgacgggactctgacggagcgaacagtgttgcctcttacgaaaacgaaggagcctctggtattcgcggtgctcaggctggatggggcgtctggggcccttcttggacgagactcacccccgtctctctcccgccagagcccgcttgcgaagatgcagacgaggatgaggacgactaccataaccccggttacctggtggtgctccccgattccacacccgctacttcgacggctgccccttctgccccagcgttatctacccccggtattcgggactcagccttctcaatggagagcattgacgactacgttaatgtaccggaatccggggagtccgccgaagccagtctcgacgggtcccgggaatacgtgaacgtttcacaggaacttcatccaggagctgccaagactgagcctgctgctctcagttcccaagaagcagaggaggtggaggaagaaggcgcacccgactacgaaaacctgcaggaactgaattag

SEQ ID NO: 179771 - DNA, 789 bp, Artificial Sequence
  derived and/or modified sequence
atggaagaggctatcctggtaccgtgcgtcctgggactccttctgctgccaatcttagcgatgctgatggcactgtgtgtccactgtcatcgcctaccaggctcttacgattctacctcttctgacagtctgtaccctagaggtattcagttcaagcggccacataccgtggccccatggcctccagcataccccccagttacaagctatccaccgctctcccaacctgacctgctgcccatacccaggagtccgcaacctcttggtggcagccatagaaccccctctagcagacgagacagcgatggcgcaaactccgtcgctagctacgaaaacgaaggagcttctgggatcaggggcgcacaggctggatggggcgtgtgggggccatcctggaccagactaaccccggtgtcactaccaccggagccagcttgcgaggatgctgatgaggacgaggacgactatcacaatccaggatatcttgtggttctaccagactcaacacccgcaacgtccactgcggctccaagtgccccagctctttctacgccaggaatccgcgatagtgccttcagcatggagagcatcgacgattatgtgaacgtgccggagagcggtgaatctgccgaggcgtccttggacggaagccgcgagtatgtcaacgtgtcacaagaactgcatccaggcgcagcaaaaaccgagcctgctgcccttagcagccaggaagccgaagaagtcgaagaggagggcgctccagattatgaaaacctgcaggagttgaactag

SEQ ID NO: 179772 - DNA, 759 bp, Artificial Sequence
  derived and/or modified sequence
atggaggaggccatcctggtgccctgcgtgctgggcctgctgctgctgcccatcctggccatgctgatggccctgtgcgtgcactgccacagactgcccggcagctacgacagcaccagcagcgacagcctgtaccccagaggcatccagttcaagagaccccacaccgtggccccctggccccccgcctacccccccgtgaccagctacccccccctgagccagcccgacctgctgcccatccccagaagcccccagcccagaagagacagcgacggcgccaacagcgtggccagctacgagaacgagggcgccagcggcatcagaggcgcccaggccggctggggcgtgtggggccccagctggaccagactgacccccgtgagcctgccccccgagcccgcctgcgaggacgccgacgaggacgaggacgactaccacaaccccggctacctggtggtgctgcccgacagcacccccgccaccagcaccgccgcccccagcgcccccgccctgagcacccccggcatcagagacagcgccttcagcatggagagcatcgacgactacgtgaacgtgcccgagagcggcgagagcgccgaggccagcctggacggcagcagagagtacgtgaacgtgagccaggagctgcaccccggcgccgccaagaccgagcccgccgccctgagcagccaggaggccgaggaggtggaggaggagggcgcccccgactacgagaacctgcaggagctgaactag

SEQ ID NO: 179773 - DNA, 789 bp, Artificial Sequence
  derived and/or modified sequence
atggaggaggccatcctggtgccctgcgtgctgggcctgctgctgctgcccatcctggccatgctgatggccctgtgcgtgcactgccacagactgcccggcagctacgacagcaccagcagcgacagcctgtaccccagaggcatccagttcaagagaccccacaccgtggccccctggccccccgcctacccccccgtgaccagctacccccccctgagccagcccgacctgctgcccatccccagaagcccccagcccctgggcggcagccacagaacccccagcagcagaagagacagcgacggcgccaacagcgtggccagctacgagaacgagggcgccagcggcatcagaggcgcccaggccggctggggcgtgtggggccccagctggaccagactgacccccgtgagcctgccccccgagcccgcctgcgaggacgccgacgaggacgaggacgactaccacaaccccggctacctggtggtgctgcccgacagcacccccgccaccagcaccgccgcccccagcgcccccgccctgagcacccccggcatcagagacagcgccttcagcatggagagcatcgacgactacgtgaacgtgcccgagagcggcgagagcgccgaggccagcctggacggcagcagagagtacgtgaacgtgagccaggagctgcaccccggcgccgccaagaccgagcccgccgccctgagcagccaggaggccgaggaggtggaggaggagggcgcccccgactacgagaacctgcaggagctgaactag

SEQ ID NO: 179774 - protein, 248 aa, Artificial Sequence
  derived and/or modified sequence
  misc_feature (1)..(1): Xaa can be any naturally occurring amino acid
XCSTWSFLAPLPQQFHLKILFLPLTPLRLLLLSAQVLIVVPFREAALRVVQLFISLLEGDSKKKIIVSNKKRFQGEYGSDPEERPPNLKRPEDYEAVFVGNIDDHFRIGVAILQRSIRLYAPFYSSDILIASPLGLRTIIGGEGEKKRDFDFLSSIELLIIDQADIYLMQNWEHVLHLMNHMNLLPLDSHGVDFSRVRMWSLNNWSKYYRQTLLFGALQDAQINSVFNKYCVNMQGQVGSRLVSSVSS

SEQ ID NO: 179775 - protein, 756 aa, Artificial Sequence
  derived and/or modified sequence
MGKRGSRSQSQLLNTLTKKQKKHLRDFGEEHPFYDRVSRKEAKPQICQLSESSDSSDSESDSESEPQQVSGYHRLLATLKNVSEEEEEDEEEEEEEDSIVDDAEMNDEDGGSDVSVEEEMAAESTESPENVALSADPEGKEDGEEPPGTSQTSPEEFTDAKHESLFSLETNFLEEESGDNSSLKASQDPFLQHVNKELKEKAIQAVATNPKTTHELKWPILGQLFFSSKFQKLETFKPPKDIDLKSLHLQKPLESTWTKTNSQFLSGPQKSSSPFTPLQKELFLIMNSYRDLFYPERTALKNGEEIRHVYCLHVINHILKANAQVLGNNSRRRSQKFGVGDDDDFRDQGLTRPKVLIVVPFREAALRVVQLFISLLEGDSKKKIIVSNKKRFQGEYGSDPEERPPNLKRPEDYEAVFVGNIDDHFRIGVAILQRSIRLYAPFYSSDILIASPLGLRTIIGGEGEKKRDFDFLSSIELLIIDQADIYLMQNWEHVLHLMNHMNLLPLDSHGVDFSRVRMWSLNNWSKYYRQTLLFGALQDAQINSVFNKYCVNMQGQVAVRNVPMTGSISHVLVQLPHVFQRMEAENLASVIDARFNFFVNKILPQYRDAVMSHTLIYIPSYFDFVRLRNYFKKEELNFTHICEYTQKSGVSRARHFFLQGEKQFLLFTERFHFYKRYTIKGIRNLIFYELPTYPHFYSEICNMLRATNRGEEATWTCTVLYSKYDAQRLAAVVGVERAAQMLQSNKNVHLFITGEK

SEQ ID NO: 179776 - DNA, 2271 bp, Artificial Sequence
  derived and/or modified sequence
atgggcaaaaggggatcaagatcccagagccagctccttaatacactgactaagaagcagaagaagcatctgagagacttcggggaagagcaccctttctacgaccgcgtatcgaggaaggaggccaagcctcagatctgccaactgtccgagtctagcgattcttctgactccgaaagtgattctgaatccgaaccacagcaagtttctggttaccacagactgttggcgacactgaaaaacgtatccgaagaggaagaggaggacgaggaagaggaagaagaagaagatagtatagtggatgatgctgagatgaatgatgaagacggaggctctgacgtttccgtggaggaagagatggccgccgagagcactgagtcacccgaaaatgttgcccttagtgccgaccccgagggcaaagaggatggtgaagaacctccggggacctcacaaacttctccagaagaattcaccgacgcaaagcacgaaagtctcttcagtctggaaacaaactttcttgaagaagagagtggggataactcaagtttgaaagcatctcaggacccatttctacagcacgtcaacaaggaactgaaggagaaagctattcaagccgtggccacgaaccccaaaaccacccacgaactcaaatggcccatccttggtcagcttttcttcagctcaaaattccagaaactggaaactttcaagccccctaaggatatcgatcttaagagtttgcatttacagaagccattagagtcaacctggaccaaaactaatagccagttcttatctgggccacagaaatcctccagtcctttcactcctctgcagaaggaacttttcctaatcatgaactcttatcgggatttgttctacccagaacgcactgctttgaaaaacggagaagaaattcggcacgtttattgtctgcatgtcatcaatcacattctgaaggcgaacgcccaggtgctggggaataactcccggcgccgatcccagaaattcggggtcggtgacgacgatgacttcagagaccaaggcctgactcgccccaaggtcctgatagtggtgccctttcgtgaagccgctctgcgtgtcgtgcagctcttcataagtctgctggagggtgactctaaaaaaaaaatcatagtgtcaaacaagaagcgctttcagggcgagtacgggagtgacccagaggaacgcccacccaacctgaagcgccctgaggattatgaggcagtgtttgtgggcaacattgatgatcacttccgcatcggcgtggctattctgcaacgcagcatccgtctgtacgcacccttctatagttccgatatactgatagccagcccgttgggcctgcggacaatcatcgggggggagggagaaaagaaacgtgacttcgactttctgtcaagcatcgaactcttaattatcgatcaggccgacatttatctgatgcagaactgggaacacgtgctgcacctgatgaatcacatgaatctactgcctttggattcacacggagttgacttcagtcgcgttcgaatgtggagtttaaacaattggtccaagtattacagacagactctgctgttcggagctcttcaagatgcacagattaacagtgtgttcaacaagtactgtgtaaacatgcaaggtcaggtagccgtgcggaatgtgccaatgaccggcagcatttctcacgtgctggtgcaactcccacacgtcttccagcgaatggaagctgagaatttggcttcagtcatagatgctcgctttaatttcttcgtcaataagatcctgccacagtaccgggacgccgtgatgtcccacacgttgatctacattccaagctacttcgactttgtgcgcttacgcaactattttaagaaggaggagttgaactttacacacatctgcgaatacacacagaagtctggagttagccgggcccgccatttcttcctacagggagaaaagcagttcctgttatttaccgaacgctttcatttttataagaggtataccatcaagggcattagaaatctcatcttttacgagctgccaacatacccgcatttctattctgagatctgtaacatgctccgcgcgacaaataggggagaggaggcaacctggacctgcacagtgctttacagtaagtacgatgcacagagactggccgccgtggtgggggtggagcgtgcggcccagatgctgcagagcaataaaaatgttcacttatttatcaccggggagaagtag

SEQ ID NO: 179777 - DNA, 2271 bp, Artificial Sequence
  derived and/or modified sequence
atgggcaagaggggcagccgcagccagagccagctgctgaacaccctgaccaagaagcagaagaagcacctgcgggactttggagaggagcaccccttctatgacagagtgtccaggaaggaggccaagccccagatctgccagctgtctgagagcagtgacagcagtgacagcgagagtgacagcgagagcgagccccagcaggtgtctggctaccaccggctgctggccaccctgaagaatgtgtctgaggaggaggaggaggatgaggaggaggaggaggaggaggacagcatcgtggatgatgctgagatgaatgatgaagatggcggcagtgatgtgtctgtggaggaggagatggctgctgagagcacagagagcccagaaaatgtggccctgtctgctgaccctgagggcaaggaggatggagaggagcccccaggcaccagccagaccagccctgaggagttcacagatgccaagcatgagagcctcttcagcctggagaccaacttcctggaggaggagagcggggacaacagcagcctgaaggccagccaggaccccttcctgcagcacgtgaacaaggagctgaaggagaaggccatccaggccgtggccaccaaccccaagaccacccatgagctgaagtggcccatcctgggccagctgttcttcagcagcaagttccagaagctggagaccttcaagccacccaaggacatcgacctgaagagcctgcacctgcagaagcccctggagagcacctggaccaagaccaacagccagttcctgagcggcccccagaagagcagcagccccttcacccccctgcagaaggagctgttcctgatcatgaacagctacagagacctcttctacccagagaggacagccctgaagaatggagaggagatccgccacgtgtactgcctgcacgtgatcaaccacatcctgaaggccaatgcccaggtgctgggcaacaacagcagaagaagaagccagaagtttggagtgggagatgatgatgacttccgggaccagggcctgacccggcccaaggtgctgattgtggtgcccttccgggaggccgccctgcgggtggtgcagctgttcatcagcctgctggagggggacagcaagaagaagatcatcgtgagcaacaagaagcgcttccagggcgagtatggcagtgaccctgaggagcggccccccaacctgaagaggccagaagattatgaagctgtgtttgtgggcaacattgatgaccacttcagaattggagtggccatcctgcagaggagcatccggctgtatgcccccttctacagcagtgacatcctgattgccagccccctgggcctgcggaccatcattggaggagagggggagaagaagagggactttgacttcctgagcagcattgagctgctgatcatcgaccaggccgacatctacctgatgcagaactgggagcacgtgctgcacctgatgaaccacatgaacctgctgcccctggacagccatggagtggacttcagccgggtgaggatgtggagcctgaacaactggagcaagtactaccggcagaccctgctgtttggagccctgcaggatgcccagatcaacagcgtcttcaacaagtactgtgtgaacatgcagggccaggtggccgtgagaaatgtgcccatgacaggcagcatcagccacgtgctggtgcagctgccccacgtgttccagaggatggaggccgagaacctggcctctgtgattgatgcccgcttcaacttctttgtgaacaagatcctgccccagtacagagatgctgtgatgagccacaccctcatctacatccccagctactttgattttgtgcggctgaggaactacttcaagaaggaggagctgaacttcacccacatctgtgagtacacccagaagagcggcgtgtcccgggcccggcacttcttcctgcagggcgagaagcagttcctgctcttcacagagcgcttccacttctacaagcgctacaccatcaagggcatccggaacctgatcttctatgagctgcccacctacccccacttctacagcgagatctgcaacatgctgcgggccaccaacagaggagaggaggccacctggacctgcaccgtgctgtacagcaaatatgatgcccagaggctggccgctgtggtgggcgtggagcgggccgcccagatgctgcagagcaacaagaatgtgcacctgttcatcactggagagaagtag

SEQ ID NO: 179778 - DNA, 2271 bp, Artificial Sequence
  derived and/or modified sequence
atgggcaagcggggcagccggagccagagccagctgctgaacaccctaactaagaagcagaagaagcatctccgtgacttcggggaggagcatccgttctacgaccgagtctcgcgcaaggaggcaaagccgcagatttgtcaattatctgaatctagtgactcttctgatagcgagagcgactctgagtccgaacctcagcaagtttcgggttaccatcgactcctggctacattaaagaatgtgagcgaagaggaagaggaagacgaggaggaagaagaggaggaggactctatagtggatgatgccgagatgaacgacgaggacggtggctcagacgtatctgtcgaggaggagatggcggcagaaagtacagagtctcccgagaatgtggccttatccgcagaccccgaggggaaagaagatggagaagaacccccggggacgtcacaaaccagccccgaagagttcactgacgctaaacatgaatccttattttcactggaaactaattttctggaggaggaaagtggcgataattcctccctcaaagcctcccaggacccgtttctgcagcacgtgaataaggaattaaaagagaaagcaatacaagccgtcgctactaacccaaagaccacccacgaactcaagtggcctatactcggacagctcttctttagttctaaatttcagaagctagagacgttcaagccaccaaaagatatcgacctgaagtcgcttcacctgcagaaaccactagaatccacctggactaaaactaacagtcagtttctgtccggccctcagaagtcctcttccccattcactcctctgcagaaggaattgtttctgatcatgaatagctatagggacctgttctacccagagcgtacagcgcttaagaatggagaagagattagacacgtgtactgcttgcacgtgatcaaccatatcttaaaagcgaatgcgcaagtccttggtaataacagcaggcggaggtcccaaaagttcggtgttggagacgacgacgactttcgtgatcagggactgacacgcccaaaagtcctgattgttgtgccatttagagaggctgccttgcgagtggtccagctttttatatctctgcttgagggcgactcaaaaaaaaagatcatagtgagtaacaaaaaaagattccagggtgaatacggctcggatcccgaggagaggccacccaatctgaaaaggccggaagactacgaagcggtgttcgtagggaatatagatgatcactttcgaatcggcgttgccatcctgcagaggtccattagattatatgcgccattttactcatcggatattcttatcgcctctcctctgggccttcgcaccatcatcgggggcgagggcgagaagaaaagagacttcgatttcctatccagcatcgaactgttgatcatcgatcaggccgacatctatctgatgcaaaactgggaacacgtcctccacttgatgaaccatatgaacctgcttccgttagatagtcatggcgtggacttcagtcgcgtgcggatgtggagcctgaacaattggagtaaatactatcggcagactctcttgttcggagccttgcaggacgcgcagattaatagtgtttttaataagtactgcgtcaatatgcaggggcaggttgccgtaaggaatgtgcctatgacagggagcatcagtcatgttctagtgcagctgccccatgtctttcagcgcatggaagctgagaacctggcctcagtgattgatgcccgctttaatttttttgtgaacaaaatactgccgcagtatagagacgccgtgatgagccatacactgatttacatcccgtcttactttgattttgtcagactgaggaattatttcaaaaaggaagagctcaacttcacccatatttgtgaatatacccagaagtctggagtgtccagggcccggcacttttttctgcagggagagaagcagttcctgctatttacagagaggtttcacttctataaacgttatacgatcaaagggattcgcaacctaatcttctatgagctgcctacctatccccatttctactcagaaatctgcaatatgttgcgcgcgactaatcgcggcgaagaagcaacttggacgtgcaccgtgctttactcaaaatatgacgcccaacgccttgccgccgttgtcggagtggagcgtgctgcccagatgcttcaatcaaacaaaaacgttcatcttttcattaccggcgaaaagtag

SEQ ID NO: 179779 - DNA, 2271 bp, Artificial Sequence
  derived and/or modified sequence
atgggcaaaagaggttctcgctctcaaagccagctactgaataccctgactaagaaacagaaaaagcaccttcgcgattttggagaggaacacccattttatgatcgtgtgtctaggaaggaggcaaagccccagatctgtcagctctccgagagtagcgattcttcggattctgagtcggatagcgagtctgaaccacaacaggtttccgggtatcaccggctccttgcgacacttaaaaatgtgagcgaggaagaggaagaggacgaggaggaagaagaagaggaggattctatagtcgacgacgctgagatgaacgacgaagacggtgggagcgatgtctcagtcgaggaagaaatggctgctgaatcaacagagagccctgagaatgttgctttgagcgcagatcccgagggcaaggaagacggcgaggagccgcctggcacttctcaaacaagtccagaggagtttacagatgctaaacacgaatctttattcagtcttgagaccaactttctggaagaagagtcgggagataatagtagtctgaaggcatctcaagacccatttctgcaacacgttaataaagagctgaaagaaaaagcaatccaggccgtagcgaccaacccaaaaactacgcatgagctcaaatggcccattttgggacaattattcttttcttcaaagtttcaaaaactggaaacatttaagccaccgaaggacatagacttgaagtctctgcacttacagaaacccctggaatcaacctggaccaagactaattctcagtttttatccggccctcagaaaagttcctcccctttcacaccactacagaaggagctgtttcttataatgaacagttatagagacttattttatcccgaaaggacggccctcaagaatggcgaagagattcggcacgtctactgcctacatgttatcaaccacattctcaaggccaatgctcaggtgttaggaaataattctagacgtcgcagccaaaagtttggggttggagacgatgatgacttccgtgaccagggactcacccgcccaaaggtgttgattgtggtgccttttcgagaagcggctttgcgggtagtccagctgttcatttccctcttggagggagatagcaaaaaaaagattatcgtatctaacaagaagagatttcagggcgagtacgggtcagaccctgaagagagaccacccaatcttaaacggcctgaagattatgaagccgttttcgttggcaacatagacgatcactttcgaatcggtgttgcaattctgcagcggtcgattcggctttacgcccctttttatagttccgacattctcattgcttctccactgggacttaggaccatcattggaggggagggcgaaaagaaacgggacttcgactttttgtcttccatcgagttactcatcattgatcaggcagacatctatctgatgcaaaattgggagcacgttctgcacttgatgaaccacatgaacctcttgccactggactcccacggcgtcgacttctcgagagtgagaatgtggtctctgaataattggtctaaatattaccgccagacattgctgtttggggctctgcaagacgcccaaataaacagtgtctttaataagtactgcgtgaacatgcagggtcaagttgcggtgagaaacgtacctatgacaggttcaatcagtcacgttctggtgcagctaccacatgtattccaaagaatggaggctgagaaccttgcttctgtgattgatgccaggttcaatttcttcgtgaataagattttgccccagtaccgcgacgccgtaatgtctcacaccctgatttacattccgtcctacttcgatttcgtgcggctacggaactactttaagaaggaagagcttaattttacccacatctgtgagtacacgcagaagtctggcgtgtcgagggctcgacacttttttttgcagggcgaaaaacagttcctactgtttacggaacggtttcatttctataaaagatacacgataaagggcatcagaaacttaattttttacgaactgcctacctacccccacttttactctgagatatgtaatatgctgagggccacaaatcggggagaggaggccacatggacctgtacggtgctatactccaaatatgacgcccaaaggttggctgccgtggtcggcgtcgagagagccgcacagatgctgcagagtaacaagaacgtccacctattcattactggtgagaagtag

SEQ ID NO: 179780 - DNA, 3094 bp, Artificial Sequence
  derived and/or modified sequence
caacttcctggtggaaaaccgcgactcttgcaagtgggcaaacttgacgttttcgctatgggcaaacgcgggagccggagccagagccagctactcaacaccctaactaaaaagcagaagaaacatcttcgagatttcggcgaggagcatcccttctatgacagggtttccagaaaggaagcaaagccacagatttgtcaactgtcagagagttcagattcttcagattctgaaagcgactcagagagtgaaccacaacaagtttctggctaccacagactacttgctacattaaagaatgtttctgaggaagaagaggaagatgaggaggaggaagaggaagaagacagtattgtagatgatgcagaaatgaacgatgaagatggtggtagcgatgtcagtgtggaagaagagatggctgcagagtctactgaaagtccagagaatgtagctttatctgctgaccctgagggaaaagaagatggggaagagccaccgggcacatcacaaacatcccccgaagagttcacagatgcaaaacacgagtcactgttcagcctggaaaccaattttctggaagaggaaagtggagacaactcttctttgaaagcctctcaagatccatttcttcaacatgtgaacaaagaactgaaagaaaaagcaattcaggctgttgccacaaatcccaaaactacccacgagcttaaatggcctattctgggccagcttttcttttcctctaagtttcagaagttggaaacatttaaacccccaaaggatattgacttaaagtcacttcatctccagaagcctctggaatccacctggactaagaccaacagccagttcctatctggtccccaaaaatcaagcagcccattcacccccctccagaaagaactcttcttaattatgaattcttaccgggacctgttctacccggaaaggactgctctgaagaacggggaagagatccgccatgtgtattgcctgcatgtgataaatcacatcctcaaagccaatgcccaggtgcttggcaacaatagcagacgccgaagccagaagtttggagtgggtgatgatgatgacttcagagaccaagggttaacaaggcccaaggtactgatagtggtgccattccgggaagctgctttgcgggtggtgcagctcttcatcagcctcctcgagggtgacagcaagaagaaaatcattgtgagcaacaaaaagaggtttcagggagaatatggatcagatcccgaggagagaccacccaacttgaagaggcctgaggattatgaagccgtatttgtgggcaatattgatgaccacttcaggattggagtggcaatacttcagagaagcatccgactctatgccccgttttactcctcggatatcctcattgcttcccccctgggcttgaggaccatcattggtggagaaggagagaagaagagagattttgactttctgtcttctatcgagcttctcatcattgatcaagctgacatttacctgatgcagaactgggagcatgtcctgcatttgatgaatcacatgaacctactacccctggactcacatggggtagacttttctcgagtgcggatgtggagcctcaataattggtccaagtactatcgccagacactgctatttggggcccttcaggatgcccagatcaactcagtgttcaacaagtactgtgtcaacatgcaaggccaggtggccgtgaggaatgtcccaatgacaggctctatcagtcatgtcctggtgcagctcccacatgtcttccagaggatggaagctgaaaacctagcttcagtgattgatgccaggtttaacttttttgtgaacaagattttgccacagtatcgtgatgcagtcatgtctcacacgctcatctatatcccctcctactttgacttcgtgcgtcttcgaaattacttcaagaaggaggaattgaattttacccacatctgcgagtacacgcagaagtctggtgtctccagggccagacacttcttccttcaaggagagaaacagtttctacttttcacagagcgcttccatttctacaaaaggtatacaataaaaggcatcaggaacctgattttctatgaactgccgacatatccacacttttacagtgaaatctgtaatatgctgagagccaccaacagaggagaagaggccacgtggacctgcactgttctctactccaaatatgatgcccagaggttagctgccgtggttggtgtggagcgggcggcacagatgctacagtccaacaagaatgtccacctcttcattactggagaaaaatgaaattttgttgggcaggaagtggtatttggcatgatacataatgtttgattctatgccatttggacccaattctgattacttacagaagaaggactgatacaaagaaagtgcatgaggcaatgtcagtattatctgacatctttcttttcaggtcatgtgtccctgaaaagttaaatgtaaaccagattttggtaaatcccatctttcagaagtgaagagggggctagaaggactctgagaagttggtagaagaaaactcccacttgtgaatatttttgtgagacataaattcttttattacgatttacctctaatttattacacttagtaaattcttccagatttttctatttgtttgacacttccttaaagtaaggaatacacattgcttgcgagaactggttatgagacattggaatacttcttgctgctacatgtcatcttaattttggatggcatgggttttgtaaaacttattctgccccagccaaacttttttgaaaccttaaatagtctaccttaattcagcctagaagagtacattgatttactgatcttttttcatattcataatactaaatgttttagttttgttcaaatatatgcttaaaatcacgttatttaaaaaacacatcagctctgtctcaagaagtaattttgttgaaactccatgttaaaatatccatcttcaacagtagtgtcttcataataactagtcattttttcagtcataaacagatgcaaataaaaaggaaattacactttt

SEQ ID NO: 179781 - DNA, 2271 bp, Artificial Sequence
  derived and/or modified sequence
atgggcaagagaggcagcagaagccagagccagctgctgaacaccctgaccaagaagcagaagaagcacctgagagacttcggcgaggagcaccccttctacgacagagtgagcagaaaggaggccaagccccagatctgccagctgagcgagagcagcgacagcagcgacagcgagagcgacagcgagagcgagccccagcaggtgagcggctaccacagactgctggccaccctgaagaacgtgagcgaggaggaggaggaggacgaggaggaggaggaggaggaggacagcatcgtggacgacgccgagatgaacgacgaggacggcggcagcgacgtgagcgtggaggaggagatggccgccgagagcaccgagagccccgagaacgtggccctgagcgccgaccccgagggcaaggaggacggcgaggagccccccggcaccagccagaccagccccgaggagttcaccgacgccaagcacgagagcctgttcagcctggagaccaacttcctggaggaggagagcggcgacaacagcagcctgaaggccagccaggaccccttcctgcagcacgtgaacaaggagctgaaggagaaggccatccaggccgtggccaccaaccccaagaccacccacgagctgaagtggcccatcctgggccagctgttcttcagcagcaagttccagaagctggagaccttcaagccccccaaggacatcgacctgaagagcctgcacctgcagaagcccctggagagcacctggaccaagaccaacagccagttcctgagcggcccccagaagagcagcagccccttcacccccctgcagaaggagctgttcctgatcatgaacagctacagagacctgttctaccccgagagaaccgccctgaagaacggcgaggagatcagacacgtgtactgcctgcacgtgatcaaccacatcctgaaggccaacgcccaggtgctgggcaacaacagcagaagaagaagccagaagttcggcgtgggcgacgacgacgacttcagagaccagggcctgaccagacccaaggtgctgatcgtggtgcccttcagagaggccgccctgagagtggtgcagctgttcatcagcctgctggagggcgacagcaagaagaagatcatcgtgagcaacaagaagagattccagggcgagtacggcagcgaccccgaggagagaccccccaacctgaagagacccgaggactacgaggccgtgttcgtgggcaacatcgacgaccacttcagaatcggcgtggccatcctgcagagaagcatcagactgtacgcccccttctacagcagcgacatcctgatcgccagccccctgggcctgagaaccatcatcggcggcgagggcgagaagaagagagacttcgacttcctgagcagcatcgagctgctgatcatcgaccaggccgacatctacctgatgcagaactgggagcacgtgctgcacctgatgaaccacatgaacctgctgcccctggacagccacggcgtggacttcagcagagtgagaatgtggagcctgaacaactggagcaagtactacagacagaccctgctgttcggcgccctgcaggacgcccagatcaacagcgtgttcaacaagtactgcgtgaacatgcagggccaggtggccgtgagaaacgtgcccatgaccggcagcatcagccacgtgctggtgcagctgccccacgtgttccagagaatggaggccgagaacctggccagcgtgatcgacgccagattcaacttcttcgtgaacaagatcctgccccagtacagagacgccgtgatgagccacaccctgatctacatccccagctacttcgacttcgtgagactgagaaactacttcaagaaggaggagctgaacttcacccacatctgcgagtacacccagaagagcggcgtgagcagagccagacacttcttcctgcagggcgagaagcagttcctgctgttcaccgagagattccacttctacaagagatacaccatcaagggcatcagaaacctgatcttctacgagctgcccacctacccccacttctacagcgagatctgcaacatgctgagagccaccaacagaggcgaggaggccacctggacctgcaccgtgctgtacagcaagtacgacgcccagagactggccgccgtggtgggcgtggagagagccgcccagatgctgcagagcaacaagaacgtgcacctgttcatcaccggcgagaagtag

SEQ ID NO: 179782 - protein, 1040 aa, Artificial Sequence
  derived and/or modified sequence
MAAAVLSGPSAGSAAGVPGGTGGLSAVSSGPRLRLLLLESVSGLLQPRTGSAVAPVHPPNRSAPHLPGLMCLLRLHGSVGGAQNLSALGALVSLSNARLSSIKTRFEGLCLLSLLVGESPTELFQQHCVSWLRSIQQVLQTQDPPATMELAVAVLRDLLRYAAQLPALFRDISMNHLPGLLTSLLGLRPECEQSALEGMKACMTYFPRACGSLKGKLASFFLSRVDALSPQLQQLACECYSRLPSLGAGFSQGLKHTESWEQELHSLLASLHTLLGALYEGAETAPVQNEGPGVEMLLSSEDGDAHVLLQLRQRFSGLARCLGLMLSSEFGAPVSVPVQEILDFICRTLSVSSKNISLHGDPCGCCCCPLSTLALDLLSALILACGSRLLRFGILIGRLLPQVLNSWSIGRDSLSPGQERPYSTVRTKVYAILELWVQVCGASAGMLQGGASGEALLTHLLSDISPPADALKLRSPRGSPDGSLQTGKPSAPKKLKLDVGEAMAPPSHRLLPVPCKPSPSASEKIALRSPLCSEALVTCAALTHPRVPPLQPMGPTCPTPAPVPLRPHRPSGPHRSILRAPCPQWAPCPQQAPCSAGPMPSAGPVPSARPGPPTTANHLGLSVPGLVSVPPRLLPGPENHRAGSNEDPILAPSGTPPPTIPPDETFGGRVPRPAFVHYDKEEASDVEISLESDSDDSVVIVPEGLPPLPPPPPSGATPPPIAPTGPPTASPPVPAKEEPEELPAAPGPLPPPPPPPPPVPGPVTLPPPQLVPEGTPGGGGPPALEEDLTVININSSDEEEEEEEEEEEEEEEEEEEEEDFEEEEEDEEEYFEEEEEEEEEFEEEFEEEEGELEEEEEEEDEEEEEELEEVEDLEFGTAGGEVEEGAPPPPTLPPALPPPESPPKVQPEPEPEPGLLLEVEEPGTEEERGADTAPTLAPEALPSQGEVEREGESPAAGPPPQELVEEEPSAPPTLLEEETEDGSDKVQPPPETPAEEEMETETEAEALQEKEQDDTAAMLADFIDCPPDDEKPPPPTEPDS

SEQ ID NO: 179783 - protein, 1180 aa, Artificial Sequence
  derived and/or modified sequence
MLLPSLSPRVQPAFTQCARPQPPPHAPSPVGGRRGVFASSRHATTGTRGKMAAAVLSGPSAGSAAGVPGGTGGLSAVSSGPRLRLLLLESVSGLLQPRTGSAVAPVHPPNRSAPHLPGLMCLLRLHGSVGGAQNLSALGALVSLSNARLSSIKTRFEGLCLLSLLVGESPTELFQQHCVSWLRSIQQVLQTQDPPATMELAVAVLRDLLRYAAQLPALFRDISMNHLPGLLTSLLGLRPECEQSALEGMKACMTYFPRACGSLKGKLASFFLSRVDALSPQLQQLACECYSRLPSLGAGFSQGLKHTESWEQELHSLLASLHTLLGALYEGAETAPVQNEGPGVEMLLSSEDGDAHVLLQLRQRFSGLARCLGLMLSSEFGAPVSVPVQEILDFICRTLSVSSKNISLHGDGPLRLLLLPSIHLEALDLLSALILACGSRLLRFGILIGRLLPQVLNSWSIGRDSLSPGQERPYSTVRTKVYAILELWVQVCGASAGMLQGGASGEALLTHLLSDISPPADALKLRSPRGSPDGSLQTGKPSAPKKLKLDVGEAMAPPSHRKGDSNANSDVCAAALRGLSRTILMCGPLIKEETHRRLHDLVLPLVMGVQQGEVLGSSPYTSSRCRRELYCLLLALLLAPSPRCPPPLACALQAFSLGQREDSLEVSSFCSEALVTCAALTHPRVPPLQPMGPTCPTPAPVPPPEAPSPFRAPPFHPPGPMPSVGSMPSAGPMPSAGPMPSAGPVPSARPGPPTTANHLGLSVPGLVSVPPRLLPGPENHRAGSNEDPILAPSGTPPPTIPPDETFGGRVPRPAFVHYDKEEASDVEISLESDSDDSVVIVPEGLPPLPPPPPSGATPPPIAPTGPPTASPPVPAKEEPEELPAAPGPLPPPPPPPPPVPGPVTLPPPQLVPEGTPGGGGPPALEEDLTVININSSDEEEEEEEEEEEEEEEEEEEEEDFEEEEEDEEEYFEEEEEEEEEFEEEFEEEEGELEEEEEEEDEEEEEELEEVEDLEFGTAGGEVEEGAPPPPTLPPALPPPESPPKVQPEPEPEPGLLLEVEEPGTEEERGADTAPTLAPEALPSQGEVEREGESPAAGPPPQELVEEEPSAPPTLLEEETEDGSDKVQPPPETPAEEEMETETEAEALQEKEQDDTAAMLADFIDCPPDDEKPPPPTEPDS

SEQ ID NO: 179784 - DNA, 3123 bp, Artificial Sequence
  derived and/or modified sequence
atggccgccgccgtgctgagcggccccagcgccggcagcgccgccggcgtgcccggcggcaccggcggcctgagcgccgtgagcagcggccccagactgagactgctgctgctggagagcgtgagcggcctgctgcagcccagaaccggcagcgccgtggcccccgtgcacccccccaacagaagcgccccccacctgcccggcctgatgtgcctgctgagactgcacggcagcgtgggcggcgcccagaacctgagcgccctgggcgccctggtgagcctgagcaacgccagactgagcagcatcaagaccagattcgagggcctgtgcctgctgagcctgctggtgggcgagagccccaccgagctgttccagcagcactgcgtgagctggctgagaagcatccagcaggtgctgcagacccaggacccccccgccaccatggagctggccgtggccgtgctgagagacctgctgagatacgccgcccagctgcccgccctgttcagagacatcagcatgaaccacctgcccggcctgctgaccagcctgctgggcctgagacccgagtgcgagcagagcgccctggagggcatgaaggcctgcatgacctacttccccagagcctgcggcagcctgaagggcaagctggccagcttcttcctgagcagagtggacgccctgagcccccagctgcagcagctggcctgcgagtgctacagcagactgcccagcctgggcgccggcttcagccagggcctgaagcacaccgagagctgggagcaggagctgcacagcctgctggccagcctgcacaccctgctgggcgccctgtacgagggcgccgagaccgcccccgtgcagaacgagggccccggcgtggagatgctgctgagcagcgaggacggcgacgcccacgtgctgctgcagctgagacagagattcagcggcctggccagatgcctgggcctgatgctgagcagcgagttcggcgcccccgtgagcgtgcccgtgcaggagatcctggacttcatctgcagaaccctgagcgtgagcagcaagaacatcagcctgcacggcgacccctgcggctgctgctgctgccccctgagcaccctggccctggacctgctgagcgccctgatcctggcctgcggcagcagactgctgagattcggcatcctgatcggcagactgctgccccaggtgctgaacagctggagcatcggcagagacagcctgagccccggccaggagagaccctacagcaccgtgagaaccaaggtgtacgccatcctggagctgtgggtgcaggtgtgcggcgccagcgccggcatgctgcagggcggcgccagcggcgaggccctgctgacccacctgctgagcgacatcagcccccccgccgacgccctgaagctgagaagccccagaggcagccccgacggcagcctgcagaccggcaagcccagcgcccccaagaagctgaagctggacgtgggcgaggccatggccccccccagccacagactgctgcccgtgccctgcaagcccagccccagcgccagcgagaagatcgccctgagaagccccctgtgcagcgaggccctggtgacctgcgccgccctgacccaccccagagtgccccccctgcagcccatgggccccacctgccccacccccgcccccgtgcccctgagaccccacagacccagcggcccccacagaagcatcctgagagccccctgcccccagtgggccccctgcccccagcaggccccctgcagcgccggccccatgcccagcgccggccccgtgcccagcgccagacccggcccccccaccaccgccaaccacctgggcctgagcgtgcccggcctggtgagcgtgccccccagactgctgcccggccccgagaaccacagagccggcagcaacgaggaccccatcctggcccccagcggcacccccccccccaccatcccccccgacgagaccttcggcggcagagtgcccagacccgccttcgtgcactacgacaaggaggaggccagcgacgtggagatcagcctggagagcgacagcgacgacagcgtggtgatcgtgcccgagggcctgccccccctgcccccccccccccccagcggcgccacccccccccccatcgcccccaccggcccccccaccgccagcccccccgtgcccgccaaggaggagcccgaggagctgcccgccgcccccggccccctgcccccccccccccccccccccccccccgtgcccggccccgtgaccctgccccccccccagctggtgcccgagggcacccccggcggcggcggcccccccgccctggaggaggacctgaccgtgatcaacatcaacagcagcgacgaggaggaggaggaggaggaggaggaggaggaggaggaggaggaggaggaggaggaggaggaggacttcgaggaggaggaggaggacgaggaggagtacttcgaggaggaggaggaggaggaggaggagttcgaggaggagttcgaggaggaggagggcgagctggaggaggaggaggaggaggaggacgaggaggaggaggaggagctggaggaggtggaggacctggagttcggcaccgccggcggcgaggtggaggagggcgccccccccccccccaccctgccccccgccctgcccccccccgagagcccccccaaggtgcagcccgagcccgagcccgagcccggcctgctgctggaggtggaggagcccggcaccgaggaggagagaggcgccgacaccgcccccaccctggcccccgaggccctgcccagccagggcgaggtggagagagagggcgagagccccgccgccggcccccccccccaggagctggtggaggaggagcccagcgccccccccaccctgctggaggaggagaccgaggacggcagcgacaaggtgcagcccccccccgagacccccgccgaggaggagatggagaccgagaccgaggccgaggccctgcaggagaaggagcaggacgacaccgccgccatgctggccgacttcatcgactgcccccccgacgacgagaagccccccccccccaccgagcccgacagctag

SEQ ID NO: 179785 - DNA, 3825 bp, Artificial Sequence
  derived and/or modified sequence
atggccgccgccgtgctgagcggccccagcgccggcagcgccgccggcgtgcccggcggcaccggcggcctgagcgccgtgagcagcggccccagactgagactgctgctgctggagagcgtgagcggcctgctgcagcccagaaccggcagcgccgtggcccccgtgcacccccccaacagaagcgccccccacctgcccggcctgatgtgcctgctgagactgcacggcagcgtgggcggcgcccagaacctgagcgccctgggcgccctggtgagcctgagcaacgccagactgagcagcatcaagaccagattcgagggcctgtgcctgctgagcctgctggtgggcgagagccccaccgagctgttccagcagcactgcgtgagctggctgagaagcatccagcaggtgctgcagacccaggacccccccgccaccatggagctggccgtggccgtgctgagagacctgctgagatacgccgcccagctgcccgccctgttcagagacatcagcatgaaccacctgcccggcctgctgaccagcctgctgggcctgagacccgagtgcgagcagagcgccctggagggcatgaaggcctgcatgacctacttccccagagcctgcggcagcctgaagggcaagctggccagcttcttcctgagcagagtggacgccctgagcccccagctgcagcagctggcctgcgagtgctacagcagactgcccagcctgggcgccggcttcagccagggcctgaagcacaccgagagctgggagcaggagctgcacagcctgctggccagcctgcacaccctgctgggcgccctgtacgagggcgccgagaccgcccccgtgcagaacgagggccccggcgtggagatgctgctgagcagcgaggacggcgacgcccacgtgctgctgcagctgagacagagattcagcggcctggccagatgcctgggcctgatgctgagcagcgagttcggcgcccccgtgagcgtgcccgtgcaggagatcctggacttcatctgcagaaccctgagcgtgagcagcaagaacatcgtgagcggcatctgccacctgttcagagccctggcccaggacaccagacagcccggcaagtactggggccccgagagcccccagaccgtgagcagctggagcagacccagagagctgcccaccttcgtgcagatcaccagcctgcccatgtgcagagacaccggcgcccagtgccagagcgtggccaacgccagcctgggcgagggcgagttcggcgacgccgagagcctgctgagaggccccgccatcctgctgaccttccaccccggcagcatcctggaggacagaggcctgatcctgctgggcgagctgagaagcggcgtgggcttcctgacctacgtgtacatctgcaagtggagcttccccgtgagcgtgagcctgtggctgagcctgagcagcagcaccctgtacctgtgccccttcttcctgcagagcctgcacggcgacggccccctgagactgctgctgctgcccagcatccacctggaggccctggacctgctgagcgccctgatcctggcctgcggcagcagactgctgagattcggcatcctgatcggcagactgctgccccaggtgctgaacagctggagcatcggcagagacagcctgagccccggccaggagagaccctacagcaccgtgagaaccaaggtgtacgccatcctggagctgtgggtgcaggtgtgcggcgccagcgccggcatgctgcagggcggcgccagcggcgaggccctgctgacccacctgctgagcgacatcagcccccccgccgacgccctgaagctgagaagccccagaggcagccccgacggcagcctgcagaccggcaagcccagcgcccccaagaagctgaagctggacgtgggcgaggccatggccccccccagccacagaaagggcgacagcaacgccaacagcgacgtgtgcgccgccgccctgagaggcctgagcagaaccatcctgatgtgcggccccctgatcaaggaggagacccacagaagactgcacgacctggtgctgcccctggtgatgggcgtgcagcagggcgaggtgctgggcagcagcccctacaccagcagcagatgcagaagagagctgtactgcctgctgctggccctgctgctggcccccagccccagatgccccccccccctggcctgcgccctgcaggccttcagcctgggccagagagaggacagcctggaggtgagcagcttctgcagcgaggccctggtgacctgcgccgccctgacccaccccagagtgccccccctgcagcccatgggccccacctgccccacccccgcccccgtgcccccccccgaggcccccagccccttcagagccccccccttccacccccccggccccatgcccagcgtgggcagcatgcccagcgccggccccatgcccagcgccggccccatgcccagcgccggccccgtgcccagcgccagacccggcccccccaccaccgccaaccacctgggcctgagcgtgcccggcctggtgagcgtgccccccagactgctgcccggccccgagaaccacagagccggcagcaacgaggaccccatcctggcccccagcggcacccccccccccaccatcccccccgacgagaccttcggcggcagagtgcccagacccgccttcgtgcactacgacaaggaggaggccagcgacgtggagatcagcctggagagcgacagcgacgacagcgtggtgatcgtgcccgagggcctgccccccctgcccccccccccccccagcggcgccacccccccccccatcgcccccaccggcccccccaccgccagcccccccgtgcccgccaaggaggagcccgaggagctgcccgccgcccccggccccctgcccccccccccccccccccccccccccgtgcccggccccgtgaccctgccccccccccagctggtgcccgagggcacccccggcggcggcggcccccccgccctggaggaggacctgaccgtgatcaacatcaacagcagcgacgaggaggaggaggaggaggaggaggaggaggaggaggaggaggaggaggaggaggaggaggaggacttcgaggaggaggaggaggacgaggaggagtacttcgaggaggaggaggaggaggaggaggagttcgaggaggagttcgaggaggaggagggcgagctggaggaggaggaggaggaggaggacgaggaggaggaggaggagctggaggaggtggaggacctggagttcggcaccgccggcggcgaggtggaggagggcgccccccccccccccaccctgccccccgccctgcccccccccgagagcccccccaaggtgcagcccgagcccgagcccgagcccggcctgctgctggaggtggaggagcccggcaccgaggaggagagaggcgccgacaccgcccccaccctggcccccgaggccctgcccagccagggcgaggtggagagagagggcgagagccccgccgccggcccccccccccaggagctggtggaggaggagcccagcgccccccccaccctgctggaggaggagaccgaggacggcagcgacaaggtgcagcccccccccgagacccccgccgaggaggagatggagaccgagaccgaggccgaggccctgcaggagaaggagcaggacgacaccgccgccatgctggccgacttcatcgactgcccccccgacgacgagaagccccccccccccaccgagcccgacagctag

SEQ ID NO: 179786 - DNA, 3543 bp, Artificial Sequence
  derived and/or modified sequence
atgctgctgcccagcctgagccccagagtgcagcccgccttcacccagtgcgccagaccccagccccccccccacgcccccagccccgtgggcggcagaagaggcgtgttcgccagcagcagacacgccaccaccggcaccagaggcaagatggccgccgccgtgctgagcggccccagcgccggcagcgccgccggcgtgcccggcggcaccggcggcctgagcgccgtgagcagcggccccagactgagactgctgctgctggagagcgtgagcggcctgctgcagcccagaaccggcagcgccgtggcccccgtgcacccccccaacagaagcgccccccacctgcccggcctgatgtgcctgctgagactgcacggcagcgtgggcggcgcccagaacctgagcgccctgggcgccctggtgagcctgagcaacgccagactgagcagcatcaagaccagattcgagggcctgtgcctgctgagcctgctggtgggcgagagccccaccgagctgttccagcagcactgcgtgagctggctgagaagcatccagcaggtgctgcagacccaggacccccccgccaccatggagctggccgtggccgtgctgagagacctgctgagatacgccgcccagctgcccgccctgttcagagacatcagcatgaaccacctgcccggcctgctgaccagcctgctgggcctgagacccgagtgcgagcagagcgccctggagggcatgaaggcctgcatgacctacttccccagagcctgcggcagcctgaagggcaagctggccagcttcttcctgagcagagtggacgccctgagcccccagctgcagcagctggcctgcgagtgctacagcagactgcccagcctgggcgccggcttcagccagggcctgaagcacaccgagagctgggagcaggagctgcacagcctgctggccagcctgcacaccctgctgggcgccctgtacgagggcgccgagaccgcccccgtgcagaacgagggccccggcgtggagatgctgctgagcagcgaggacggcgacgcccacgtgctgctgcagctgagacagagattcagcggcctggccagatgcctgggcctgatgctgagcagcgagttcggcgcccccgtgagcgtgcccgtgcaggagatcctggacttcatctgcagaaccctgagcgtgagcagcaagaacatcagcctgcacggcgacggccccctgagactgctgctgctgcccagcatccacctggaggccctggacctgctgagcgccctgatcctggcctgcggcagcagactgctgagattcggcatcctgatcggcagactgctgccccaggtgctgaacagctggagcatcggcagagacagcctgagccccggccaggagagaccctacagcaccgtgagaaccaaggtgtacgccatcctggagctgtgggtgcaggtgtgcggcgccagcgccggcatgctgcagggcggcgccagcggcgaggccctgctgacccacctgctgagcgacatcagcccccccgccgacgccctgaagctgagaagccccagaggcagccccgacggcagcctgcagaccggcaagcccagcgcccccaagaagctgaagctggacgtgggcgaggccatggccccccccagccacagaaagggcgacagcaacgccaacagcgacgtgtgcgccgccgccctgagaggcctgagcagaaccatcctgatgtgcggccccctgatcaaggaggagacccacagaagactgcacgacctggtgctgcccctggtgatgggcgtgcagcagggcgaggtgctgggcagcagcccctacaccagcagcagatgcagaagagagctgtactgcctgctgctggccctgctgctggcccccagccccagatgccccccccccctggcctgcgccctgcaggccttcagcctgggccagagagaggacagcctggaggtgagcagcttctgcagcgaggccctggtgacctgcgccgccctgacccaccccagagtgccccccctgcagcccatgggccccacctgccccacccccgcccccgtgcccccccccgaggcccccagccccttcagagccccccccttccacccccccggccccatgcccagcgtgggcagcatgcccagcgccggccccatgcccagcgccggccccatgcccagcgccggccccgtgcccagcgccagacccggcccccccaccaccgccaaccacctgggcctgagcgtgcccggcctggtgagcgtgccccccagactgctgcccggccccgagaaccacagagccggcagcaacgaggaccccatcctggcccccagcggcacccccccccccaccatcccccccgacgagaccttcggcggcagagtgcccagacccgccttcgtgcactacgacaaggaggaggccagcgacgtggagatcagcctggagagcgacagcgacgacagcgtggtgatcgtgcccgagggcctgccccccctgcccccccccccccccagcggcgccacccccccccccatcgcccccaccggcccccccaccgccagcccccccgtgcccgccaaggaggagcccgaggagctgcccgccgcccccggccccctgcccccccccccccccccccccccccccgtgcccggccccgtgaccctgccccccccccagctggtgcccgagggcacccccggcggcggcggcccccccgccctggaggaggacctgaccgtgatcaacatcaacagcagcgacgaggaggaggaggaggaggaggaggaggaggaggaggaggaggaggaggaggaggaggaggaggacttcgaggaggaggaggaggacgaggaggagtacttcgaggaggaggaggaggaggaggaggagttcgaggaggagttcgaggaggaggagggcgagctggaggaggaggaggaggaggaggacgaggaggaggaggaggagctggaggaggtggaggacctggagttcggcaccgccggcggcgaggtggaggagggcgccccccccccccccaccctgccccccgccctgcccccccccgagagcccccccaaggtgcagcccgagcccgagcccgagcccggcctgctgctggaggtggaggagcccggcaccgaggaggagagaggcgccgacaccgcccccaccctggcccccgaggccctgcccagccagggcgaggtggagagagagggcgagagccccgccgccggcccccccccccaggagctggtggaggaggagcccagcgccccccccaccctgctggaggaggagaccgaggacggcagcgacaaggtgcagcccccccccgagacccccgccgaggaggagatggagaccgagaccgaggccgaggccctgcaggagaaggagcaggacgacaccgccgccatgctggccgacttcatcgactgcccccccgacgacgagaagccccccccccccaccgagcccgacagctag

SEQ ID NO: 179787 - DNA, 3123 bp, Artificial Sequence
  derived and/or modified sequence
atggcagctgcagtcctatccggcccatctgcaggaagcgcggcaggcgtgcctggggggacaggcggactctctgctgtaagtagtggccctcggctgcgactgctgcttttggagagcgtttctggattactgcagccgcgcacaggttccgctgtcgcccccgtccaccctccaaacaggtcagccccccatttgcccggcctgatgtgtcttctgcgtctccacggatccgtgggcggagctcagaacttgtccgctttgggtgcactcgtttctctgtccaacgcacggttgtcatcaatcaagaccagattcgaaggattgtgcctgctgtctctgctggtgggagaatctccgactgagctgttccagcagcattgtgtttcctggctgaggtctattcagcaggtacttcaaacccaggaccccccagccacaatggaattggccgttgcagtgctgagagacttactccggtatgcggctcagttgccagcgttatttcgcgatataagtatgaaccacctgccaggacttctcaccagcctgctgggcctgcggccagaatgcgaacagtccgccctcgaaggaatgaaagcatgtatgacttactttccccgagcttgtggctccttgaaaggtaaactcgccagtttcttcctgtccagggtggacgccttgagcccacagctgcaacagctcgcctgtgaatgctactctcgactcccctccctcggcgccgggttttcccagggcctcaaacatactgaaagctgggagcaggagctgcactccttactggcctcgttacatactctattgggcgctctttatgaaggcgctgagaccgcgcccgtgcaaaatgagggcccaggagttgagatgttactgtccagcgaagatggggatgcccatgtgctgctccagctccgtcagcgcttctcgggactcgcaaggtgtttaggcctcatgctgagctcggagttcggcgcccccgtgtcagtgccggtgcaagaaattctcgactttatctgtcgcactttgtccgtgagctcgaagaacatttccctccacggcgacccttgtggttgctgctgctgtccactgagcacccttgcgctggatcttctatcagcccttattctcgcttgcggttcgcggctcctgagatttggaattctgatcgggaggttgttaccgcaggtgctgaactcctggtcaattggccgcgattcactgtctccaggccaggaacggccgtactcaactgtcaggacaaaggtatatgcgattttagaactatgggtacaggtgtgtggcgcgagtgccggcatgctgcaaggcggggcatctggcgaagccctgctgacccacctcctgagcgatatctcaccccccgcggacgccctgaagctccggagtcccaggggcagcccagatggtagtctccagactggtaaaccatccgctccgaagaagctgaaactggatgtgggggaggccatggcacccccatctcaccgattactgccagtcccttgtaaacccagtccaagcgcttctgagaaaattgctctgaggagccctctgtgctccgaggccttggtgacttgcgcagcgttaacacatccccgcgtgccaccgttgcagccaatgggacccacttgccctactcccgctccagtccctctgcgaccacataggccatccggacctcatcgcagcatactgagggccccctgcccacagtgggcaccctgcccccagcaagctccatgttccgccggcccaatgccttctgccggccccgtccctagcgctcggcctggaccaccaaccacggcgaaccacctgggtctctcagtgcccggccttgtttccgtaccccctaggctgctgcccggaccagaaaatcatcgagcaggctccaacgaagaccctatcctggccccctcaggtaccccccctcccaccattccccccgatgagaccttcggtggacgcgtgcccaggcctgcctttgtgcactacgacaaggaggaggcctccgacgttgagatttccctggaatcagactcagatgacagcgtggttattgtgcccgagggactgcctcctctaccacctcccccaccctcaggcgccactccccctccaatagcccctacgggcccaccaacagcgagccccccggtgcccgctaaagaggagccagaagaattacctgcagcccctggtccactgcctccaccgcccccgcctcctcctcccgtgcctggccctgttaccctcccacccccccagctggtgcctgaggggactccgggtgggggcggacccccagcccttgaggaggacctgactgtgatcaacattaactcaagcgacgaggaggaagaggaagaggaagaagaggaagaagaggaggaagaggaggaagaagaagaagaggactttgaggaagaagaggaggatgaagaagaatacttcgaagaagaggaagaggaggaagaggagtttgaagaagaatttgaagaggaggagggagagctggaggaagaggaagaggaggaggacgaggaagaggaggaagagctcgaagaggttgaagatctcgagtttggcacggctggcggcgaagttgaggaaggagctcccccaccacctacactgcctcccgccctgcccccgccagagtctccccccaaggtccagcctgagcccgaaccagagccgggccttctgctggaggtggaagagcccggcactgaagaagagcgcggcgcggacacagcgccaacactggcgcccgaggccctgcccagccagggcgaggttgagcgagagggagaatcaccagccgctgggccacctccacaggagttggtggaggaggaaccatccgccccccccacgctgcttgaggaagagactgaggatggatctgataaagttcagcctccacccgagaccccagccgaggaggaaatggaaaccgagactgaggccgaagccctgcaggagaaagagcaggatgatactgccgccatgctcgcagacttcattgattgtccccccgatgatgagaagcctccgcctccgacagaacctgactcgtag

SEQ ID NO: 179788 - DNA, 3825 bp, Artificial Sequence
  derived and/or modified sequence
atggcagccgccgtcctgtctggtcctagcgctggaagtgctgccggcgtccctggtggaaccggcggcctctcagcagtttcgtctggcccacgtttacgcttactgctgctcgaatcggtaagcggtctcctccagccacgtacaggcagcgcagtggcgcctgtacacccaccgaatcgctctgcaccacacttacctggtctaatgtgcttactccggctccacggttctgtgggcggggcccaaaatttgtccgcactgggcgccttagtttccctgtccaatgcccgtctgagttcaatcaagacccgcttcgaggggttatgcctgttaagcctcttagttggcgagagccccactgaactgttccagcaacactgtgtatcctggctgcgctccatccagcaagtacttcagacccaggatccacccgctaccatggagctcgccgttgccgtgctccgggatctgttgcggtatgcagcgcaactaccggctttgtttcgggacatctcgatgaaccatctccccggcctgctgacttcattacttggactcaggcccgagtgcgaacagtccgccctggaaggtatgaaggcatgtatgacatattttccacgcgcgtgtggctcactcaaaggtaagctagcaagcttcttcctcagtcgggtggatgctctctcaccacagctgcagcagctcgcctgtgaatgctacagtcgcctcccatcactgggcgctggcttttcacaaggcttgaaacataccgagagctgggaacaggaactccactctctgttggcttccttgcacacactcctgggagccctgtatgaaggggccgaaaccgcccccgttcagaacgaagggccaggcgtggaaatgctgctgtcaagtgaagacggagatgcgcacgtgctcctgcagcttcggcagcggttctccggcctggcccgttgcctgggcttaatgctctctagtgagttcggagccccagtctctgtccccgttcaggaaattctggattttatttgtcgcaccctgagtgtgagctctaagaacattgtgtccgggatttgccacctattccgtgctttggcacaggatacacggcagcctggaaagtattggggtcctgaatccccacagaccgtttctagctggtctagaccacgggaactaccaacatttgtgcagataacttctctgcccatgtgtagagacacaggtgctcaatgccagagcgtcgccaacgccagcctaggcgagggcgagtttggtgacgcggagtcactgctgcgagggcccgctattctactgaccttccatcccggtagcatcctggaggataggggtctaatattgctgggtgagcttcggtcaggcgtgggtttcttaacttacgtttacatctgtaaatggagtttcccagttagcgtgagtttatggctttcactcagtagctctaccttgtatctttgtccttttttcctgcagagcctacacggggatgggccactgcgcctgctcttgctgcctagcatccatctcgaggcacttgatttgctctccgcacttattctcgcgtgcgggtccaggttattaaggtttggtattttgattggtcggcttttaccacaggtactgaactcctggtccatagggagagattctctctccccaggacaggagcgcccatattccactgttcggaccaaagtgtatgccatcctagagctctgggttcaagtctgtggggcaagtgcagggatgttacagggaggagccagcggggaggccctgttaactcatttgctgagcgatatcagccccccagctgatgccctcaagttaaggtcgcctcgcggcagccctgacggatctttgcagactgggaaaccatccgctcccaaaaaactaaaactcgatgtgggcgaggcaatggcgccaccatcccaccgcaaaggcgacagcaacgctaatagtgatgtttgtgcagccgccctaagaggtttaagtcgcaccattctcatgtgcggcccccttatcaaggaagagactcatcggcggctccacgatctggtgcttccactcgttatgggagtacagcagggagaagtgctgggcagttccccctacacaagctccaggtgccgacgtgaactctactgtctacttctggctttgttgctggccccctcacctagatgtccaccgccactcgcctgcgcccttcaggcttttagcctgggccagcgtgaggattcactagaggtctcgtccttctgcagcgaagccctggtgacatgcgctgccttgactcaccctagggtcccgcctctgcagccaatgggaccaacctgcccgactcccgctccggttcctccaccagaggctcccagtccattccgtgcccctcctttccatcccccaggaccaatgcccagcgtcggatctatgccttccgcggggccaatgccaagcgctggacccatgccttcggccggcccagtaccatctgcacgccctgggccccctacaactgccaaccacttgggattaagtgtacccggcttggtgtctgtgccaccacggctactccccggccctgaaaaccatagggctggtagtaacgaagatcccattctggctccgtccggcacaccaccaccgacaatcccaccagacgagacatttggagggagagtgccacggccagctttcgtgcactatgacaaggaagaggccagcgatgtcgagatcagcttagagtcagatagcgatgacagcgttgtcatcgtcccagaaggccttccgcctctgccaccaccacctccatccggcgctacacctccccccatcgctcctaccgggccccctactgccagccctcccgtacccgctaaggaggaaccagaagaattacccgcagcacccggaccgctgccacccccaccccccccacctcctcccgtgcccggaccagttacattgccacccccacagttagtgccagaaggcacccctggcgggggaggaccaccagccctggaggaagacttaaccgtgatcaatattaacagctctgacgaggaagaggaagaggaagaagaggaagaagaagaggaggaggaggaggaggaggaagaggaggatttcgaagaagaggaggaggatgaagaggagtactttgaggaggaggaagaagaggaggaagagtttgaagaggaattcgaagaagaagagggcgaactagaagaggaagaggaggaagaagacgaggaagaagaagaggaactggaagaggtggaggatctcgaatttggcaccgccggcggtgaggttgaagagggcgcacctcccccccccacactgccaccagccctgcctccccccgagagtccacctaaagttcaacctgaaccagagcctgagccgggcctactgctagaggttgaggagcccggcacagaggaggagcggggagccgacacagctccaacacttgcacccgaggctctcccgtcccaaggcgaagttgagcgggagggggaatcccccgccgccggcccccccccccaggagctggttgaggaagagcctagcgccccacccacgctgcttgaagaggagaccgaggatggaagtgacaaggttcaacctcctcccgagactccggctgaagaagagatggaaaccgagacggaggccgaggccctgcaagagaaagaacaggacgacacggcagcaatgctcgccgacttcatcgactgtccccctgacgatgaaaagcctcccccgccgacagagccagacagttag

SEQ ID NO: 179789 - DNA, 3543 bp, Artificial Sequence
  derived and/or modified sequence
atgctcctccccagtctgtctcccagggtccagcccgcctttactcaatgcgcccgcccacagccccccccgcacgccccttctcccgtgggtggccgacgcggtgtgttcgcaagctcccgccatgcgacaacaggtaccagggggaaaatggctgccgcggtactatccgggcccagcgcgggatcggctgcaggtgtgcccggtggtaccggcggcctgtccgcggtttccagtgggccacggttgaggctgctgctgttggagagcgtatctggactcctccagccccggaccggatccgctgtggcccctgttcatcctcccaacaggtctgcccctcacctgcctggactgatgtgcctcttaaggctgcacggcagcgtggggggtgcgcagaacctctcagcgctaggagccctggtctccctttccaacgctcggctgagtagcataaaaacgcgatttgaaggattgtgtctgctgagcctcttagtgggagaaagccccaccgaactgttccagcagcattgtgtttcatggctgagatcaattcagcaagtgctccagacccaggacccccccgctacgatggagttagctgtggctgttttgagagatctgctgcgatacgctgcccagctcccagcgctcttccgggacatctccatgaaccatctgccaggactcctgacgagtctgctcggtttgcggcccgaatgtgaacagagcgccctggaaggaatgaaggcctgcatgacatattttcctagagcctgcggttctctgaaaggaaaactggcaagcttctttctgtctagggttgacgcactctctccacagctgcaacagctggcttgtgagtgctattctcggcttccttctttgggcgccggtttcagtcaaggtctaaaacacacagaatcctgggaacaggaactgcacagcttgttggcctcgctccacactctgcttggtgccctttacgaaggcgctgaaacagcacctgtacagaacgaaggaccgggggtggaaatgcttctgtcaagtgaggatggggatgctcatgttttattacagttaagacaacggtttagcgggctggcccgatgcctgggcctcatgctgagcagtgagtttggggcgccggtctccgtgccagtacaggaaatcctagactttatatgccgaacactgtcagtgagctctaagaatatcagcctgcacggcgacggaccactccgcctgctactgcttcccagtatacacctggaagccctggatctgttatcagcccttatcttggcctgtggttcacggctgctccgctttgggatactgatcggccggttgcttccccaggtgctgaacagctggtcgattggccgggatagcctcagtcccggccaggaacgcccgtattctacagttcggaccaaggtgtacgccatcctcgaactctgggtgcaagtgtgcggcgcgtctgccggcatgctgcagggcggagcctccggtgaggcgctgttaactcatttactctccgacattagcccaccagcagacgctctgaagctcaggtctccacgggggtctccagatggaagcctccaaactgggaagcctagcgctcccaagaagctcaaacttgatgttggagaggcaatggcccccccctctcatcgcaagggtgactccaatgcaaactcagatgtctgtgctgcagctttgaggggactgtcaaggaccatcctaatgtgtggccctctgataaaggaagaaactcaccgccggctgcacgatctggtccttcccttggtcatgggggtgcagcagggtgaagtactgggaagtagcccgtatacttcttcccggtgcagaagggagctatactgtctcttgctggccctgctgctggcacctagcccacggtgtccaccgcccctcgcctgtgctctccaagctttttcactgggccaacgcgaggatagtctcgaagtgagttccttttgttctgaggctttagttacctgtgctgccctgacccaccccagagttccaccactccagcccatgggacccacgtgccccactcccgctccagtgccccctccggaagcaccatctccctttagggcaccaccctttcatccaccagggcctatgccctctgtcggcagtatgccctctgccggacctatgccttcagctggtcctatgcctagcgccgggcctgttcctagtgccaggcctggcccacccaccacggcgaatcatctgggactgagtgtcccgggcctggtgtccgttccccctaggttattacctggccccgaaaaccacagggccggcagcaacgaggatccaatcctggcccctagcggaacaccaccccctactatcccgcctgacgagaccttcgggggtagggtgccccgccctgccttcgtgcactacgacaaggaggaagcttccgacgtcgagatctctctcgaatctgactctgatgacagcgtggttattgttcccgaagggctgccccctctccccccgccgcccccctccggcgccacccccccacccattgcgcctaccggcccacccaccgcctctccgcctgtccccgccaaggaggaacccgaagagctgccggcggccccaggtcctctcccacctccccctccacccccccctcccgtcccgggacctgtaactctgccgccgccgcagcttgtgccagaggggacccctggcggcggtgggccccccgccctcgaagaagatctgacagtgataaacattaattcctccgatgaggaggaagaagaagaggaagaggaggaggaagaagaagaagaagaggaggaagaagaggaggatttcgaagaggaggaagaggatgaagaagagtactttgaagaggaagaagaggaggaggaagagtttgaagaggaatttgaggaagaggagggcgaactggaggaggaggaggaagaggaagatgaggaagaagaagaggaactagaagaggtggaggacttggaattcggtacggccggcggcgaggtggaggagggcgccccccctcctccaacactcccacctgccctgcccccacctgagagtccacctaaggtacagcccgagcctgaaccagagcccggacttctccttgaggtggaagaaccaggcaccgaggaggaaagaggcgccgacacagcgcctacgctggcaccagaggcacttccttcccagggagaagtcgaacgtgaaggggagtcacccgctgccggtccccctcctcaggaactcgtcgaggaagaacccagtgcccctcccacattgcttgaagaagagacagaagatgggtccgataaggttcagccaccccctgagacaccagcggaggaagaaatggaaaccgaaacagaggctgaagccctacaggaaaaagagcaggacgacacagctgcaatgcttgccgactttatagattgtcctcctgacgatgagaaaccgcccccacctacggagcctgatagctag

SEQ ID NO: 179790 - DNA, 264 bp, Artificial Sequence
  derived and/or modified sequence
atggagaggaacaccatctacacaggctggctgcagagcaacctgatcctggaccctgtggagaaccaggccctgcaccctgtgatcatggccctgatcctgatgcccagcctgcactgctttggaaacatcctgatcctgctcttcctgaagagccctgcccagctgttctgccgcatcggccgctttgaaacaggagaggagaagacccggcggcgggagggcagtgatgtgaccacagaggccgccatcggcgtgatgtag

SEQ ID NO: 179791 - DNA, 3123 bp, Artificial Sequence
  derived and/or modified sequence
atggctgctgctgtgctgagcggccccagcgctggcagcgctgctggggtgcctgggggcactggaggcctgtctgctgtgagcagcggcccccggctgcggctgctgctgctggagagcgtgtctggcctgctgcagcccaggactggatctgctgtggcccctgtgcacccccccaacagaagtgccccccacctgcccggcctgatgtgcctgctgcggctgcacggctctgtgggcggggcccagaacctgagcgccctgggcgccctggtgtccctgagcaatgcccggctgagcagcatcaagaccaggtttgagggcctgtgcctgctgagcctgctggtgggggagagccccacagagctgttccagcagcactgtgtgtcctggctgcggagcatccagcaggtgctgcagacccaggaccccccagccaccatggagctggccgtggccgtgctgcgggacctgctgcgctatgctgcccagctgcctgccctcttccgggacatctccatgaaccacctgcccggcctgctgaccagcctgctgggcctgcggccagaatgtgagcagagcgccctggagggcatgaaggcctgcatgacctacttcccccgggcctgtggcagcctgaagggcaagctggccagcttcttcctgagccgggtggatgccctgagcccccagctgcagcagctggcctgtgagtgctacagccggctgcccagcctgggcgccggcttcagccagggcctgaagcacacagagagctgggagcaggagctgcacagcctgctggccagcctgcacaccctgctgggcgccctgtatgaaggagctgagacagcccctgtgcagaatgaaggacctggggtggagatgctgctgagcagtgaagatggagatgcccacgtgctgctgcagctgcggcagcgcttcagcggcctggcccgctgcctgggcctgatgctgagcagcgagtttggagcccctgtgtctgtgcctgtgcaggagatcctggacttcatctgcaggaccctgtctgtgagcagcaagaacatcagcctgcatggagacccctgtggctgctgctgctgccccctgagcaccctggccctggacctgctgagcgccctgatcctggcctgtggcagccggctgctgcgcttcggcatcctgattggccgcctgctgccccaggtgctgaacagctggagcatcggccgggacagcctgagccctggccaggagcggccctacagcacagtgaggaccaaggtgtatgccatcctggagctgtgggtgcaggtgtgtggggccagcgctggcatgctgcagggcggggccagcggggaggccctgctgacccacctgctgagtgacatcagccccccagcagatgccctgaagctgcggagcccccggggcagcccagatggcagcctgcagacaggcaagcccagcgcccccaagaagctgaagctggatgtgggggaggccatggccccacccagccaccggctgctgcctgtgccctgcaagcccagccccagcgccagcgagaagatcgccctgcggagccccctgtgcagcgaggccctggtgacctgtgccgccctgacccacccccgggtgccccccctgcagcccatgggccccacctgccccaccccagcccctgtgcccctgcggccccaccggcccagcggcccccacaggagcatcctgcgggccccctgcccccagtgggccccctgcccccagcaggccccctgcagcgctggccccatgcccagcgctggccctgtgcccagcgcccggcccggcccccccaccacagccaaccacctgggcctgtctgtgcccggcctggtgtctgtgcccccccggctgctgcccggccctgagaaccaccgggccggcagcaatgaagaccccatcctggcccccagcggcaccccaccacccaccatccccccagatgagaccttcggcggccgggtgcccaggcctgcctttgtgcactatgacaaggaggaggccagtgatgtggagatcagcctggagagtgacagtgatgattctgtggtgattgtgcctgagggcctgccccccctgcccccacctccacccagcggggccaccccaccacccatcgcccccaccggccccccaacagccagcccccctgtgcctgccaaggaggagcctgaggagctgcctgctgcccctggccccctgcccccacctcctcctcctcctcctcctgtgcccggccctgtgaccctgcccccaccccagctggtgcctgagggcacccctgggggcggcggccccccagccctggaggaggacctgaccgtcatcaacatcaacagcagtgatgaggaggaggaggaggaggaggaggaggaggaggaggaggaggaggaggaggaggaggaggaggactttgaggaggaggaggaggatgaggaggagtactttgaggaggaggaggaggaggaggaggagtttgaggaggagtttgaggaggaggagggggagctggaggaggaggaggaggaggaggatgaggaggaggaggaggagctggaggaggtggaggacctggagtttggaacagctggaggagaggtggaggagggcgcccctcctccacccaccctgcccccagccctgcccccacctgagagcccccccaaggtgcagcctgagcctgagcctgagcccggcctgctgctggaggtggaggagcccggcacagaggaggagagaggagctgacacagcccccaccctggcccctgaggccctgcccagccagggcgaggtggagcgggagggggagagccctgctgctggccccccaccccaggagctggtggaggaggagcccagcgccccacccaccctgctggaggaggagacagaagatggcagtgacaaggtgcagcccccacctgagaccccagctgaggaggagatggagacagaaacagaggccgaggccctgcaggagaaggagcaggatgacacagctgccatgctggccgacttcatcgactgccccccagatgatgagaagcccccaccacccacagagccagacagctag

SEQ ID NO: 179792 - DNA, 3825 bp, Artificial Sequence
  derived and/or modified sequence
atggctgctgctgtgctgagcggccccagcgctggcagcgctgctggggtgcctgggggcactggaggcctgtctgctgtgagcagcggcccccggctgcggctgctgctgctggagagcgtgtctggcctgctgcagcccaggactggatctgctgtggcccctgtgcacccccccaacagaagtgccccccacctgcccggcctgatgtgcctgctgcggctgcacggctctgtgggcggggcccagaacctgagcgccctgggcgccctggtgtccctgagcaatgcccggctgagcagcatcaagaccaggtttgagggcctgtgcctgctgagcctgctggtgggggagagccccacagagctgttccagcagcactgtgtgtcctggctgcggagcatccagcaggtgctgcagacccaggaccccccagccaccatggagctggccgtggccgtgctgcgggacctgctgcgctatgctgcccagctgcctgccctcttccgggacatctccatgaaccacctgcccggcctgctgaccagcctgctgggcctgcggccagaatgtgagcagagcgccctggagggcatgaaggcctgcatgacctacttcccccgggcctgtggcagcctgaagggcaagctggccagcttcttcctgagccgggtggatgccctgagcccccagctgcagcagctggcctgtgagtgctacagccggctgcccagcctgggcgccggcttcagccagggcctgaagcacacagagagctgggagcaggagctgcacagcctgctggccagcctgcacaccctgctgggcgccctgtatgaaggagctgagacagcccctgtgcagaatgaaggacctggggtggagatgctgctgagcagtgaagatggagatgcccacgtgctgctgcagctgcggcagcgcttcagcggcctggcccgctgcctgggcctgatgctgagcagcgagtttggagcccctgtgtctgtgcctgtgcaggagatcctggacttcatctgcaggaccctgtctgtgagcagcaagaacatcgtgtctggcatctgccacctgttccgggccctggcccaggacacccggcagcccgggaagtactggggccctgagagcccccagacagtgtcctcctggagccggccccgggagctgcccacctttgtgcagatcaccagcctgcccatgtgccgggacaccggggcccagtgccagagcgtggccaatgccagcctgggggagggggagtttggagatgctgagagcctgctgcggggccctgccatcctgctgaccttccaccctggcagcatcctggaggaccggggcctcatcctgctgggggagctgcggtctggagtgggcttcctgacctacgtgtacatctgcaagtggagcttccctgtgtctgtgtccctgtggctgagcctgagcagcagcaccctgtacctgtgccccttcttcctgcagagcctgcatggagatggccccctgcggctgctgctgctgcccagcatccacctggaggccctggacctgctgagcgccctgatcctggcctgtggcagccggctgctgcgcttcggcatcctgattggccgcctgctgccccaggtgctgaacagctggagcatcggccgggacagcctgagccctggccaggagcggccctacagcacagtgaggaccaaggtgtatgccatcctggagctgtgggtgcaggtgtgtggggccagcgctggcatgctgcagggcggggccagcggggaggccctgctgacccacctgctgagtgacatcagccccccagcagatgccctgaagctgcggagcccccggggcagcccagatggcagcctgcagacaggcaagcccagcgcccccaagaagctgaagctggatgtgggggaggccatggccccacccagccacaggaagggggacagcaatgccaacagtgatgtgtgtgccgccgccctgcggggcctgagcaggaccatcctgatgtgtggccccctcatcaaggaggagacccaccggcggctgcatgacctggtgctgcccctggtgatgggcgtgcagcagggcgaggtgctgggcagcagcccctacaccagcagccgctgccggcgggagctgtactgcctgctgctggccctgctgctggcccccagcccccgctgccccccacccctggcctgtgccctgcaggccttcagcctgggccagcgggaggacagcctggaggtgagcagcttctgcagcgaggccctggtgacctgtgccgccctgacccacccccgggtgccccccctgcagcccatgggccccacctgccccaccccagcccctgtgcccccacctgaggcccccagccccttccgggccccacccttccaccccccaggccccatgcccagcgtgggctccatgcccagcgctggccccatgcccagcgctggccccatgcccagcgctggccctgtgcccagcgcccggcccggcccccccaccacagccaaccacctgggcctgtctgtgcccggcctggtgtctgtgcccccccggctgctgcccggccctgagaaccaccgggccggcagcaatgaagaccccatcctggcccccagcggcaccccaccacccaccatccccccagatgagaccttcggcggccgggtgcccaggcctgcctttgtgcactatgacaaggaggaggccagtgatgtggagatcagcctggagagtgacagtgatgattctgtggtgattgtgcctgagggcctgccccccctgcccccacctccacccagcggggccaccccaccacccatcgcccccaccggccccccaacagccagcccccctgtgcctgccaaggaggagcctgaggagctgcctgctgcccctggccccctgcccccacctcctcctcctcctcctcctgtgcccggccctgtgaccctgcccccaccccagctggtgcctgagggcacccctgggggcggcggccccccagccctggaggaggacctgaccgtcatcaacatcaacagcagtgatgaggaggaggaggaggaggaggaggaggaggaggaggaggaggaggaggaggaggaggaggaggactttgaggaggaggaggaggatgaggaggagtactttgaggaggaggaggaggaggaggaggagtttgaggaggagtttgaggaggaggagggggagctggaggaggaggaggaggaggaggatgaggaggaggaggaggagctggaggaggtggaggacctggagtttggaacagctggaggagaggtggaggagggcgcccctcctccacccaccctgcccccagccctgcccccacctgagagcccccccaaggtgcagcctgagcctgagcctgagcccggcctgctgctggaggtggaggagcccggcacagaggaggagagaggagctgacacagcccccaccctggcccctgaggccctgcccagccagggcgaggtggagcgggagggggagagccctgctgctggccccccaccccaggagctggtggaggaggagcccagcgccccacccaccctgctggaggaggagacagaagatggcagtgacaaggtgcagcccccacctgagaccccagctgaggaggagatggagacagaaacagaggccgaggccctgcaggagaaggagcaggatgacacagctgccatgctggccgacttcatcgactgccccccagatgatgagaagcccccaccacccacagagccagacagctag

SEQ ID NO: 179793 - DNA, 3543 bp, Artificial Sequence
  derived and/or modified sequence
atgctgctgcccagcctgagcccccgggtgcagcctgccttcacccagtgtgcccggccccagcccccacctcatgcccccagccctgtgggcggcagaagaggagtgtttgccagcagcagacatgccaccaccggcacccggggcaagatggctgctgctgtgctgagcggccccagcgctggcagcgctgctggggtgcctgggggcactggaggcctgtctgctgtgagcagcggcccccggctgcggctgctgctgctggagagcgtgtctggcctgctgcagcccaggactggatctgctgtggcccctgtgcacccccccaacagaagtgccccccacctgcccggcctgatgtgcctgctgcggctgcacggctctgtgggcggggcccagaacctgagcgccctgggcgccctggtgtccctgagcaatgcccggctgagcagcatcaagaccaggtttgagggcctgtgcctgctgagcctgctggtgggggagagccccacagagctgttccagcagcactgtgtgtcctggctgcggagcatccagcaggtgctgcagacccaggaccccccagccaccatggagctggccgtggccgtgctgcgggacctgctgcgctatgctgcccagctgcctgccctcttccgggacatctccatgaaccacctgcccggcctgctgaccagcctgctgggcctgcggccagaatgtgagcagagcgccctggagggcatgaaggcctgcatgacctacttcccccgggcctgtggcagcctgaagggcaagctggccagcttcttcctgagccgggtggatgccctgagcccccagctgcagcagctggcctgtgagtgctacagccggctgcccagcctgggcgccggcttcagccagggcctgaagcacacagagagctgggagcaggagctgcacagcctgctggccagcctgcacaccctgctgggcgccctgtatgaaggagctgagacagcccctgtgcagaatgaaggacctggggtggagatgctgctgagcagtgaagatggagatgcccacgtgctgctgcagctgcggcagcgcttcagcggcctggcccgctgcctgggcctgatgctgagcagcgagtttggagcccctgtgtctgtgcctgtgcaggagatcctggacttcatctgcaggaccctgtctgtgagcagcaagaacatcagcctgcatggagatggccccctgcggctgctgctgctgcccagcatccacctggaggccctggacctgctgagcgccctgatcctggcctgtggcagccggctgctgcgcttcggcatcctgattggccgcctgctgccccaggtgctgaacagctggagcatcggccgggacagcctgagccctggccaggagcggccctacagcacagtgaggaccaaggtgtatgccatcctggagctgtgggtgcaggtgtgtggggccagcgctggcatgctgcagggcggggccagcggggaggccctgctgacccacctgctgagtgacatcagccccccagcagatgccctgaagctgcggagcccccggggcagcccagatggcagcctgcagacaggcaagcccagcgcccccaagaagctgaagctggatgtgggggaggccatggccccacccagccacaggaagggggacagcaatgccaacagtgatgtgtgtgccgccgccctgcggggcctgagcaggaccatcctgatgtgtggccccctcatcaaggaggagacccaccggcggctgcatgacctggtgctgcccctggtgatgggcgtgcagcagggcgaggtgctgggcagcagcccctacaccagcagccgctgccggcgggagctgtactgcctgctgctggccctgctgctggcccccagcccccgctgccccccacccctggcctgtgccctgcaggccttcagcctgggccagcgggaggacagcctggaggtgagcagcttctgcagcgaggccctggtgacctgtgccgccctgacccacccccgggtgccccccctgcagcccatgggccccacctgccccaccccagcccctgtgcccccacctgaggcccccagccccttccgggccccacccttccaccccccaggccccatgcccagcgtgggctccatgcccagcgctggccccatgcccagcgctggccccatgcccagcgctggccctgtgcccagcgcccggcccggcccccccaccacagccaaccacctgggcctgtctgtgcccggcctggtgtctgtgcccccccggctgctgcccggccctgagaaccaccgggccggcagcaatgaagaccccatcctggcccccagcggcaccccaccacccaccatccccccagatgagaccttcggcggccgggtgcccaggcctgcctttgtgcactatgacaaggaggaggccagtgatgtggagatcagcctggagagtgacagtgatgattctgtggtgattgtgcctgagggcctgccccccctgcccccacctccacccagcggggccaccccaccacccatcgcccccaccggccccccaacagccagcccccctgtgcctgccaaggaggagcctgaggagctgcctgctgcccctggccccctgcccccacctcctcctcctcctcctcctgtgcccggccctgtgaccctgcccccaccccagctggtgcctgagggcacccctgggggcggcggccccccagccctggaggaggacctgaccgtcatcaacatcaacagcagtgatgaggaggaggaggaggaggaggaggaggaggaggaggaggaggaggaggaggaggaggaggaggactttgaggaggaggaggaggatgaggaggagtactttgaggaggaggaggaggaggaggaggagtttgaggaggagtttgaggaggaggagggggagctggaggaggaggaggaggaggaggatgaggaggaggaggaggagctggaggaggtggaggacctggagtttggaacagctggaggagaggtggaggagggcgcccctcctccacccaccctgcccccagccctgcccccacctgagagcccccccaaggtgcagcctgagcctgagcctgagcccggcctgctgctggaggtggaggagcccggcacagaggaggagagaggagctgacacagcccccaccctggcccctgaggccctgcccagccagggcgaggtggagcgggagggggagagccctgctgctggccccccaccccaggagctggtggaggaggagcccagcgccccacccaccctgctggaggaggagacagaagatggcagtgacaaggtgcagcccccacctgagaccccagctgaggaggagatggagacagaaacagaggccgaggccctgcaggagaaggagcaggatgacacagctgccatgctggccgacttcatcgactgccccccagatgatgagaagcccccaccacccacagagccagacagctag

SEQ ID NO: 179794 - DNA, 3123 bp, Artificial Sequence
  derived and/or modified sequence
atggccgccgccgtgctgagcggccccagcgccggcagcgccgccggtgttccaggcgggacaggtggtctttccgctgtgagctcgggccctaggctgaggcttttactgcttgagagcgtgagcggactactgcaaccccgtactgggtccgcagtggccccggtacaccctccaaaccgcagtgcccctcacctcccaggactgatgtgccttcttagactgcacgggtctgtgggcggagcccagaatctctctgccctcggcgctctcgtatccctgagtaatgctagactgtctagcatcaaaactcgctttgaaggactctgtctcctgagcctcctggttggtgaatcacctaccgagttgttccagcagcactgcgtgtcttggcttcgctcaatccagcaggtcctacaaacgcaggatccgccagccacgatggaattggcagtcgctgtcctgcgcgacctgctccgctacgcagcccagttaccggctctgtttcgtgacatctctatgaatcatctgccaggtttattgacctccctgctcggcttgagacctgagtgcgaacagagcgcgctggaaggaatgaaagcctgtatgacatattttcctcgcgcatgtgggagtctcaaggggaagttggcctcattcttcctatcccgcgtcgacgccctatccccacaactgcagcaactcgcctgcgagtgctatagtagattgcccagcctaggcgcaggctttagccaggggttaaagcacacggaaagttgggagcaggaactgcactcactactcgcctcactgcacacactcctgggagccttatacgaaggagctgaaacggcaccagtgcaaaacgagggaccaggagtcgaaatgcttctgtcgagcgaagatggagatgcccatgtgctgctccagctgcgccagcgattttcggggctggccaggtgcttgggactcatgctgagcagtgagtttggagcacctgtctccgtcccagttcaggagattctggatttcatatgccgtaccctttcagtaagtagtaaaaacatcagcctccacggagacccttgcgggtgctgctgctgtccactgagtaccctcgctttggacctgttatccgccctgatcttagcctgtggctcccgcttgcttcgattcggcattttaatcgggagactgcttcctcaggtgctcaactcctggagcataggtcgcgatagcctatctccaggacaagaaaggccctatagtaccgtgagaaccaaagtatacgctatccttgaactttgggtacaagtttgcggggctagcgccggaatgttacaaggaggtgcaagcggggaggctctgctgactcacctgctgtcagacatctccccccctgccgacgcccttaagttacggtcgcccagggggagccccgatgggtcactccaaaccgggaaaccttcagcgcccaagaagcttaaacttgacgtcggcgaagctatggctcccccttcacatcggcttctgccggtgccatgcaaacccagtcctagtgcttcagagaagattgccctgcgcagtcccctctgttcagaagctctcgtgacctgtgctgcactgacacatcctcgggtgccgcccctccagcccatggggcctacttgtccaactccggccccggtcccgctcaggccccacaggccttctggcccccatcggagtatcctccgagctccatgtccccagtgggccccttgtcctcagcaggccccgtgcagcgcaggtcccatgccatctgcaggcccggtgccatccgctagacccggccctcccaccacagctaaccatctggggttatcagtcccgggtctcgtaagtgtaccccctcggctactcccggggcccgagaaccacagggcggggtccaatgaggatccaatcctggctccctccggaactccccctcctacgatcccacccgatgagaccttcggagggcgcgtgccacggcctgcctttgtccattacgacaaagaggaggcaagcgacgtagaaatctcattagaatcggattcggacgacagcgtggtgatcgtgcccgaaggattgccaccgcttccacctcctccccctagcggagcaacccccccaccaatcgctcctaccggtccacctaccgcttcacctccagtgccagcgaaggaggagcccgaggaattacccgcagcgcctgggcccctgccaccaccaccacctcctcctcctcctgtaccaggtcctgtcacactgcccccccctcagctggttcccgagggcacaccagggggggggggcccccctgcactggaagaggacttgactgtcatcaacattaatagctcagacgaagaggaagaggaggaggaggaagaggaggaagaggaagaagaagaagaggaggaggaggaggattttgaggaggaggaggaagatgaagaagagtacttcgaagaggaagaggaggaggaggaagaatttgaggaagaattcgaggaggaagagggtgaactggaggaagaagaggaggaagaggacgaagaggaggaagaagagctcgaggaagtggaggacctcgaatttggcacagccggaggtgaagttgaagagggagcgccgccaccccccacgttgcctcccgcgctgccgcctcctgagtccccacccaaagtgcaacccgagccggagcctgaacctgggctgctactcgaggtggaggaaccaggcactgaggaggaaaggggtgccgacaccgcccccacactggctccagaggccctaccttcacagggcgaggtagaacgcgaaggagaatctccggctgcagggccaccacctcaagaactggtcgaggaggagcccagtgcccctccgacgctgcttgaggaggagaccgaggatgggagtgataaggtgcagccccctcctgagactcccgccgaggaggagatggagacagaaaccgaggccgaagcccttcaagagaaagaacaagacgacacagctgctatgctcgctgacttcatcgattgtcctcccgatgatgaaaaaccacctccgcccacagaacctgattcttag

SEQ ID NO: 179795 - DNA, 3825 bp, Artificial Sequence
  derived and/or modified sequence
atggccgccgccgtgctgagcggccccagcgccggcagcgccgccggtgtccccgggggcactggcgggctttcagctgtgtcatctggacctaggctgagactgctcctgcttgaaagtgtatctggactgttgcaacctcgcaccggatccgcagtagcccctgtccaccctcccaaccggtctgcacctcatctgcccggcctgatgtgccttcttagactgcacggcagcgtggggggagctcagaacctgagtgccctgggtgcgttagtgtccttgtccaacgctagactgtcttctattaagacaaggtttgagggcctgtgtctgctgagtcttctggtcggcgaaagtcccacggaactgttccagcagcactgcgtgtcctggttaaggagcattcagcaggtgctgcagacgcaggacccacctgcaacgatggaattggctgtcgctgtgctgcgggatcttctccggtatgcagcacaactgcccgccctgttccgagatatcagtatgaaccatctgccaggcctgctaacatctctgctgggactcaggcccgaatgtgaacagagtgccctcgagggaatgaaagcctgcatgacgtactttcctcgcgcgtgcgggtcattgaaggggaagttggcgtccttcttcctttcacgtgtcgacgccctaagtcctcagcttcagcaacttgcatgtgagtgctattcgcggctgccctctctgggagctggcttttcacagggtcttaaacacaccgagagttgggagcaggagctccactcgttgctcgcctcgctccacaccttactgggagctctttacgaaggagccgagactgctcctgtgcagaacgagggccccggtgttgagatgctcctgagctcagaggacggcgacgcacatgtgcttttgcagctccgacagcgttttagtggcttggcccgatgcctgggcctcatgctgtcatcggaatttggcgcacccgtctccgtaccagtgcaagagatcttggattttatatgcaggacactctcagtttcctcaaagaatatcgtatctgggatctgccatcttttccgggctctagctcaagatactcggcagccgggcaaatactggggccccgagagcccgcaaacagtctcctcctggtcgcgtcctcgagaattacctaccttcgtgcaaatcactagccttccaatgtgccgcgataccggagcccagtgccaaagcgtggccaacgcatcactcggagaaggcgaatttggggatgcagagtcactcctgagaggacctgccattttgctcacttttcatcccggcagcattttggaggatagaggtttaattctgttgggagagctccgctccggcgtcggctttctcacctacgtttacatctgtaagtggtcctttcccgtgagcgtttctctttggctgtccttgtctagctctacactttacctgtgcccttttttcctgcagtctttgcacggagatgggccgctgcggttgctacttctccctagtatccacctcgaagccttggacttgctgagtgctcttatcctggcctgtggcagccgcctcctgagatttggcatcctgatcggcagactgctgccccaagttctgaactcctggagcattggccgcgatagcctctccccgggccaagaacggccctatagcaccgttcgtactaaagtgtatgctatcctggagctgtgggtgcaggtatgtggcgcatctgcgggtatgcttcagggcggcgccagtggggaggccttgctgacccatttgctttcagacatatctccccctgccgatgccctcaaactgaggtctccgaggggtagtcccgatgggtctctccagaccggaaagccatccgctccaaaaaagttgaagctggacgtgggggaggctatggcaccacccagccatagaaaaggcgattctaatgccaattctgatgtctgcgccgccgcattgagaggtctgtcccgcaccatactgatgtgtggcccgctgatcaaagaggaaacacacaggcggctacacgatctcgtgctgcccctagtgatgggagtgcagcagggcgaggtcctaggttccagcccctacactagctcacgatgccgaagagaactatattgtcttctgctagctttgctgcttgcgccctcgcccaggtgtcctccccccctcgcatgtgcactgcaagcattctctctgggacaacgggaagacagcctggaggtgtccagtttctgttccgaagctctggtcacctgcgcagcattgactcaccctcgtgtaccccccctacagccaatgggacctacctgtcctacaccagctccagtgccgcctccagaagcgccctccccttttagagcgcctccatttcaccctccaggacccatgccgtccgtaggtagcatgccgtcagcaggacctatgccttccgcaggtcccatgccttcagcagggcccgtgccttccgcgagaccaggccctcccactactgccaaccatctcggattatcagtccctggactagtctcggtgccgccaagactgctgcctggtcccgagaaccaccgagcaggcagtaacgaagaccctatactcgcgccatctggaactcctccccccactatacctcctgacgaaacattcggaggacgcgtcccacgcccggcatttgtgcattacgataaagaagaggcaagtgatgtggagatcagtctggagtctgactccgacgatagcgtggtgatcgtgcccgaaggcctgccccccctcccaccgccaccacctagcggagccacaccacctcccatcgctcccaccgggccaccgaccgcttctcctccagtccctgctaaagaggagcccgaggaactgcctgcagcaccaggtcctctgccccctccacctcccccacctccgcctgtcccaggacccgtgaccctgccaccccctcaactggtgccggaggggacacctggaggcggcggaccgcccgctctggaggaggatctcacggtgatcaacattaacagctcagacgaggaagaagaagaggaggaggaagaggaagaggaggaggaggaggaggaggaggaggaggaggatttcgaggaggaggaggaggatgaagaagagtacttcgaggaggaagaagaagaggaggaagagttcgaggaggaattcgaagaggaagagggcgaactggaagaggaagaagaggaggaagatgaggaggaggaagaggaattggaggaggttgaagatctagaattcggaacagccggtggggaggtggaggagggggcccccccgccaccgacattgccccctgcgctaccgccccctgaatccccaccaaaagtgcagcccgagcccgagccagagcccggcctactgttggaggtcgaagagccgggcaccgaagaagagagaggtgccgatacagcccccactctggcccccgaggcgttgccttcccagggggaagtcgaaagagagggggaaagccccgctgcggggcctccacctcaggagctggttgaggaagaaccttcggcaccacctaccctcttggaggaggagactgaagacggctcagacaaagtgcagcctcctccagagactcctgccgaagaagaaatggaaaccgaaacagaggccgaagcactacaggagaaggaacaagacgataccgccgctatgttggccgacttcatcgattgcccaccggatgacgaaaaaccccccccacctaccgagcctgatagttag

SEQ ID NO: 179796 - DNA, 3543 bp, Artificial Sequence
  derived and/or modified sequence
atgctgctgcccagcctgagcccccgggtgcagcccgccttcacccagtgcgccaggcctcaaccgccaccccatgcacccagtcctgttgggggcagaagaggggtgtttgcgtcctcccgccatgcgacaacagggacacgtggaaagatggccgctgccgtgcttagtggaccgagtgctggatcggcagccggtgtacctgggggcactggaggattgtctgccgtgagttccgggcccaggctgcgcctattactactggagagcgtctcgggcctcctgcagccaaggaccggctccgccgtggctcccgtccaccctccaaacagatccgcccctcacctgcctggccttatgtgcctcttgcgtctgcatggctctgtaggcggggctcagaacctttccgccctgggggcgctcgtttctttgtcaaatgcccggctatccagcatcaagactcggttcgagggcctgtgcctgctgagcttgctggtgggtgagtctcctacagaactgttccagcagcactgtgtgagctggctcagaagcattcaacaggtgttgcagacccaggatcctccggccaccatggagctggccgtggccgttttgcgggaccttctccgatatgctgcccagttgccagctcttttccgagacattagtatgaatcacctgcccggcctgcttacttctctgctaggtctaagaccagagtgcgaacagagcgcactcgaaggcatgaaagcttgtatgacgtacttcccaagagcttgtgggtcactcaaggggaagctggcttcctttttcctatccagagtggatgccctctctccgcagctgcagcagctcgcctgtgagtgttacagccgactcccctccctgggggcaggatttagtcagggccttaaacatacagagtcttgggaacaggagctgcacagcctgctggctagccttcataccttgctcggagcactatacgaaggagctgagactgcaccagttcagaacgaaggtcccggcgtggagatgctactgtcctctgaggacggagacgctcacgttctgctgcagctgagacaaaggttctcgggactggccagatgcctggggctgatgttatcgtcagagtttggggccccagtcagtgtcccggttcaggagattctggatttcatttgcaggaccctgtctgtgagctccaagaacatctccctccatggagacggacctttaaggcttctgctgctgccatctattcatttggaggccctggacttactgtctgcactgatacttgcctgtggatccaggttgttgagattcggtattctgatcggacgattgctgcctcaggtcctgaactcttggtccattggacgggactctttgtcgcccggccaggagcgcccgtacagcacagttaggactaaggtttacgcaatcctggaactgtgggtgcaggtgtgcggcgccagcgcagggatgcttcagggcggggcgagcggtgaagctctattaacacatttactgagtgatatttctccgccagcggacgctctgaagctgagaagccctcgaggctctccggatggatcgctgcagaccggcaagcccagtgcacccaaaaaactgaagctcgacgtgggggaggcgatggccccgccctcacatcgcaagggcgatagcaacgcaaattcggatgtctgtgccgctgcgctgagagggctgagtaggacgatcctcatgtgcgggccacttatcaaagaggagactcacaggcggctccatgacctggtcctgcctctggtaatgggggtgcaacagggcgaagtcctggggagctcaccctatacttcatctcgatgccggagggaattgtactgtctcctgctggcactcctgctagcgcctagcccccgatgtcctcctcccctcgcgtgtgccctgcaagcgtttagcttgggtcagagggaagattctcttgaggtgagctcattttgttccgaggccctggtgacgtgcgctgccttaactcacccaagagtccctcccctgcagcccatggggcccacatgtccaaccccggcgcctgttcctccccccgaggccccttccccatttagggcccctccgttccaccctcctgggcctatgccctcagtgggttcaatgcccagcgccggcccaatgccctcagcgggccctatgccaagcgctggacctgtgcccagcgcccgccccggtccccccacaacagctaaccatctgggcttgtcagttccagggctagtctccgtcccccctcggctcctgccggggccggagaaccatcgcgccggtagcaatgaggatccgatactggccccttccggcacgcctcctcctactatccccccagatgagaccttcggcggaagggtgccccggcctgcctttgtgcattacgataaagaagaagcaagcgacgtggagatctccctagaaagcgactcagacgacagcgtggttatcgtccctgaaggtttgccacccctcccccccccccctcccagcggtgccacacctcctccaatcgccccgacggggccaccaaccgcaagcccgccagtcccagcaaaggaagaaccagaggaactgccagctgcacccgggccactgccgcctcctccccccccacctcccccggtaccgggccctgttacgctcccccctccacagctggtgcctgaaggaaccccggggggcgggggcccacccgcacttgaagaagacctgacagtgatcaacataaattccagcgacgaggaggaagaagaggaggaggaggaggaggaggaggaggaagaagaagaggaggaggaggaagactttgaagaagaagaagaggacgaagaggaatattttgaggaggaggaagaggaggaagaagaatttgaagaggagttcgaggaggaggaaggcgaactggaggaggaagaggaggaggaggacgaggaagaagaggaggagcttgaggaagtggaggacctcgagtttggcacagccgggggagaagtggaggagggggcacccccacccccaacccttccacccgcactacctccacccgagtcccccccgaaggtgcagcccgagccagaaccagaacctggtctgttgctggaggtggaagaaccgggcactgaagaagaacgcggcgccgacactgctcccacactggcccctgaggcgctgccgtcccagggcgaggtggagagggaaggagagagcccagcagctggtcctccccctcaggaattagtggaagaagagccgtccgcgcccccaacattgctcgaggaggagacggaagatggatccgacaaagtgcagccgcctcccgaaacacccgcggaagaggagatggagaccgagacggaagcagaggcgctgcaggagaaagagcaggatgacactgccgccatgctagctgatttcatagactgccccccagatgatgagaagccgcccccccctactgaaccagatagctag

SEQ ID NO: 179797 - DNA, 3123 bp, Artificial Sequence
  derived and/or modified sequence
atggcggcagctgtcctttccggaccgagcgctggttcagcagcaggggtacctggagggacgggcggtctcagcgccgtgtccagtgggccacgcctgagattgttattgctcgagagcgtaagtggcttgcttcagcctcgcacaggaagcgccgtggcgcctgttcacccgcctaacagatccgcccctcacctgccaggactgatgtgcctcttgcggttgcatggatctgtcggcggagcccaaaatctgtccgcgctgggagccctggttagcctctctaatgctcgactatcctcaatcaaaactagattcgaaggactatgtttgctgagcctgctggtgggcgagtccccaacggagctgttccagcagcattgtgtgagttggcttcggtcaatccagcaggttctacagacccaggatcccccagccacgatggagctggccgttgcagttctccgcgacctgctcagatacgctgctcaactccctgctctgttcagagatatttccatgaatcacttacctggcctcttgacttccctcctgggtttacgccctgagtgcgagcagtccgcactggagggcatgaaagcttgcatgacttactttcctcgcgcatgtggaagtctgaaggggaagttagcgtccttcttcttgtctcgcgtggacgcattgtcacctcaattgcaacagctggcatgcgaatgctatagccgccttccgagcctaggagccggattttctcagggcctgaaacatactgagagctgggagcaggaactccattcactgctcgcgagtcttcatactctgctcggcgctttatatgagggcgcagagactgctcctgtgcagaatgagggtccgggtgtggaaatgctgctttcctctgaggacggagacgctcacgtgctcctgcagctacgccagcgattctccggcttagccaggtgcctcggactgatgttatcatctgagtttggggctcctgtgagcgtgccagtccaggaaatcctggattttatatgccggactctgtctgttagtagcaagaacatttccctccacggcgatccatgtggctgttgttgctgccctctttcaaccctcgccctcgaccttctgtccgccctgatcttggcttgcggttccaggttgctgcgattcggtatcctgattggacgattactgcctcaggtactcaactcatggtccataggcagggactcgctgagccccggacaggagagaccatactcaacggtccgcactaaagtctacgccattcttgagctctgggttcaggtgtgcggcgcaagtgctggtatgctgcaaggtggggctagtggagaggcgttactgacgcatctcttgtcagatattagtcctccggctgacgccctcaagctgcgcagccctcgcggatcaccagatgggagcctgcaaaccggcaagccgagcgcgccaaagaagctgaaactggatgtgggggaagcaatggcaccaccttcacaccggctccttcccgtcccttgtaagccttcaccgagcgcttctgagaaaattgcactcaggtcacccctttgtagcgaggccctggtgacatgtgctgctcttacccacccgcgtgtgccgccactgcagccgatgggccctacttgcccaacgccagcacctgttcccctgcgaccccacagaccttccggccctcacaggtccattttgcgagcgccttgcccccagtgggcgccttgcccccagcaggccccatgtagcgcaggacccatgccatccgccggtcccgtgccgagtgcgcgtcccggacctccaactacggctaatcatttagggttgtcagtgccgggacttgtgtccgtacctcctagactgctgccagggcctgagaatcatcgcgctggctcaaatgaggacccaatattggcaccctccggaaccccaccaccgacaattccccctgacgaaacttttggagggcgtgtccctcggccagcgttcgtgcattacgacaaagaagaggctagcgatgtggagatctcattggagtctgattcggatgattcggtggtgatcgtccctgagggactgccccctcttccgcctcccccacccagcggtgcaacaccccctcccatcgcccctactggaccccctaccgcctctcctccagtcccggctaaagaggaacctgaggagctacctgccgctcccggtccattgcctcctccaccaccacctccaccccctgttccaggaccagtcacgcttccgcctccccagttggtgccggaggggactcctgggggaggtggtccccctgcgctcgaagaggacctaaccgttatcaacattaattcaagcgatgaggaggaagaagaagaggaggaagaggaggaagaggaagaggaagaggaggaggaggaggaggacttcgaagaggaggaggaagacgaggaagaatacttcgaagaagaggaggaagaagaagaggaatttgaggaggagtttgaagaggaggaaggggagctcgaggaggaagaggaagaggaagacgaggaagaggaggaagagctggaagaggtggaagaccttgaattcggcactgcagggggtgaggtggaggaaggtgcccctccgcctcccacgctaccacctgccctccctcctccggaatcccccccaaaagtgcaacccgagccagaacctgaacccggattgctgctggaagtcgaagagcccggaacagaggaagagagaggagcggataccgcacccaccctggctccagaggccctcccttctcagggagaggtggagagagagggagagagccccgcagcagggccaccaccacaagagctggttgaggaggaaccgtctgcgcctcctacacttctggaggaagagactgaggatgggagtgataaagtacagccccctcccgaaacccctgcagaggaggaaatggagactgagacggaagctgaggcgttgcaggaaaaggagcaggatgataccgccgctatgctggctgattttatagattgtccaccagatgacgagaagcccccacctccaacagagccggactcttag

SEQ ID NO: 179798 - DNA, 3825 bp, Artificial Sequence
  derived and/or modified sequence
atggccgctgccgtactgtcaggcccatcagctgggagtgccgctggcgtccccggtggtacgggagggttatctgctgtttcctccggtccaaggctgaggcttctgttattagagtctgtgtctgggctgttgcaacctcgaaccggaagcgctgtggctccagtgcaccctccaaatagatccgcaccccacctgcctggcctgatgtgtctcttgcggttacacggaagtgtggggggagctcaaaacctgtctgctctgggagctctcgtgtctttatctaacgcccgactgtcatcaataaaaacccggttcgagggcctatgtctattgagtttgctggtaggagagtcccccacagaactcttccaacaacactgcgtgtcttggctcaggtcgatccagcaagtgttgcagactcaggacccaccagccacaatggaattggccgttgctgttcttagagacctgctccggtacgctgcgcaacttcccgctttattccgcgatatcagtatgaatcacctcccgggattgttgaccagcctgctggggctccgccctgaatgcgagcagagtgccctggagggtatgaaagcttgtatgacgtattttcctcgggcttgcgggtctctcaaaggaaaactggccagtttcttcctgagccgagtggacgcactcagtccccagcttcaacagcttgcttgcgagtgttacagtcgccttccttctctgggcgcaggcttttcccagggactgaagcatacagaatcctgggagcaagaactgcactctttgctggcgtccctgcataccttgctcggagccctctatgaaggcgctgagaccgccccagtccagaatgaaggtcctggagtggaaatgttgcttagtagtgaagatggggacgctcacgttctccttcagctccgacaacgattcagcgggctggctaggtgcctgggtttgatgcttagttccgagttcggagcccctgtgagcgtgcctgtgcaggaaatcctggattttatatgccggaccctttccgtgtctagtaaaaacattgtgtccggaatctgtcacctctttcgcgctctcgcacaggatacacgacagccgggaaaatattgggggccagaaagtccccaaaccgtgagcagctggtctagacctcgagagctcccaacatttgtgcagatcacatctctccctatgtgtagagacacgggggcacagtgtcagtcagtagctaacgccagtctaggggagggggagtttggtgacgccgagtcattactgcgcggtcccgctatcctgctgacattccatcctgggtcgattctagaggatcgagggctcatcctcctgggtgaacttagaagcggtgtgggcttcttaacttacgtctatatttgtaagtggtcctttccagtgagcgtctcattgtggctttcactgtccagctccacactctatttgtgtcccttttttctgcaatccttacatggagacggtccgctgcgcctcctgctgctgcccagcatccacctggaggctttggacctactaagcgctctgatcctggcttgcggatcgagactgctgagattcggaatcttgatcggacgactgctgcctcaggtgttgaactcctggagtatcgggcgtgatagcctaagcccgggacaagagcgaccatacagtaccgtgagaacgaaggtctatgccatccttgagctctgggtacaggtctgtggcgcttctgcaggaatgctccaaggcggtgcatctggtgaggccctactgacacatctccttagcgatatctcacccccagcagacgctctgaaactaagatccccaagggggagcccagacggctcgctgcaaaccggcaaaccatcagcccctaaaaaacttaagctggatgtgggcgaggctatggcacctccttctcaccgtaaaggagattccaatgctaattctgatgtttgcgcggcagctctcagaggcctgagtaggaccattcttatgtgcggcccactcatcaaagaagagacccatcgcaggctgcatgaccttgtactgcccttagttatgggggtgcagcaaggcgaggtgttgggctcaagcccgtacacctcaagccgctgcagacgagagctttactgtttactgctcgccctccttctagccccttctcctcggtgcccacctcctttggcatgtgcccttcaggcgtttagtctggggcagcgggaagactcgttggaagtgtccagcttctgtagtgaggcgctggtcacgtgtgctgcattgacccatccccgagtccctccactgcagcccatgggcccaacatgtccgactcccgcacccgtcccgccaccggaggccccaagccctttcagggcccctccgtttcatcctccaggacccatgccgtccgttggatctatgccatccgcaggcccaatgccaagcgccggtcccatgccttccgccggaccagtcccatccgcgcgacccggtccacctacgacagcgaatcatctgggcctgagtgttcctggactggtgagcgtcccccctagactgctgccaggacctgaaaaccatcgtgcgggtagcaacgaggaccccatccttgctccttctgggacaccccctccgacaattccacccgatgaaacattcggcggacgggtgcctaggcctgcattcgtacactatgataaagaagaggcaagcgatgttgagatatcacttgagtcagactctgatgacagtgttgtgatcgtgcctgaagggttgccaccactgcctcccccacccccaagtggggctacgccaccacccatcgctcctacgggaccaccgactgcaagtccacccgtgcctgcgaaagaagagccagaagagctgcccgcagccccaggacctttgcctccccctccaccacctccacctccagtgccaggcccagtgacgctgcccccacctcagttagtcccagaaggaaccccaggcggaggcggaccgcctgctctggaggaagatctgacggtgatcaacatcaactcttccgacgaggaggaagaggaggaagaagaggaggaagaggaggaggaggaagaagaagaggaagaggaggatttcgaggaagaggaagaagacgaagaggagtactttgaagaggaggaggaggaagaggaagaatttgaggaagaatttgaggaggaggagggagaactcgaagaggaggaggaggaggaagatgaagaagaagaggaggaactggaggaggtcgaagacctggagttcgggacagccggaggggaggtggaagaaggggctcctcctcctccaacactacccccagctctccctccaccagaatccccacctaaagtgcagccggagcccgagccagagcctgggctgctgctcgaagttgaagaaccaggcactgaggaggagaggggcgcagatactgccccaacactagcgcctgaggctctcccttcccagggagaagtggagcgggagggagagtctcccgcagccggaccccctcctcaggaactggtagaggaggagccctcggcccctccaaccttgctcgaggaagagaccgaggatggaagcgacaaggttcagcctcctccagagactcccgcagaagaggaaatggagacagagactgaagcggaggctttacaggaaaaggagcaagatgatacggccgcaatgcttgcagactttattgactgtcctcccgacgatgagaaaccccctccacccaccgagcctgattcgtag

SEQ ID NO: 179799 - DNA, 3543 bp, Artificial Sequence
  derived and/or modified sequence
atgctcctccctagtctttctccacgtgttcagcctgcttttactcaatgcgctcgcccacagccccctcctcacgcaccatccccagtcggcggaagaagaggagtttttgcctctagccggcacgcaacaaccggcacgcgagggaagatggcagccgcagttttgagcggcccatcagcaggctctgcggctggagtacctggagggaccggcggtttgtcagcagtgagcagcgggcctcgactgcggctgttgctactggagtcagtaagcggactgttacagcccaggaccgggagtgctgtggcaccagtgcacccccctaaccgctctgctcctcacctccccggattaatgtgtttattgagattgcatggatcagtgggcggagcccagaatttgtccgcacttggggcacttgtgtccttatctaacgccaggctgtcctcaataaaaaccagattcgaggggttgtgcctgctgtcattgttggtgggagaaagcccgaccgagctgttccaacaacactgcgtgagctggctccgtagtattcagcaggtcctccagacgcaagatccgccagcaactatggaactagctgtggccgtcttgagggacctcttaaggtacgccgctcagctccctgcattgtttcgagatatcagcatgaaccacctacccggactcctcacaagcttgctggggctgcgtccagagtgcgagcagtctgccttggaagggatgaaggcttgcatgacctattttccgcgagcatgcggcagcctcaaagggaagttggcttcctttttcctctcgcgggtggatgcacttagcccacaactgcaacagcttgcctgcgaatgttacagcagacttccctctctgggcgcaggcttcagccaggggctgaaacataccgaaagctgggagcaggaactgcatagcctgctcgctagcctccatacccttctcggggctctgtacgagggggcagaaactgcccctgtgcagaatgagggaccaggcgttgagatgctgctttcctccgaggacggcgacgcacacgtccttcttcaactgcggcagcgattctcaggactggcacgatgcctcggtctgatgctcagctcagagttcggggctcccgtgagcgttcccgttcaggagattctcgacttcatctgtagaacactgagcgtgtcctccaaaaacattagcctgcatggagacgggccacttaggcttctgctgctgccttccatacatctggaagcgctggacctcctaagtgcccttatattggcatgcggcagccggctactccgctttggtatcctaattggcagactgctgccacaggtgctgaactcctggagtatcggtagggacagcctaagccctggccaggaacgcccatacagcactgtcagaaccaaagtttatgctatccttgagctgtgggtgcaggtttgtggagcgtcagctggaatgctccagggcggtgcaagtggggaggccctcttgacacatttgctctctgatatttcgcccccagctgacgcgttgaagcttcgctcaccacgcggatctccggacgggtctctccagacggggaaaccaagcgctcctaagaagctcaagctggacgtgggcgaggctatggccccaccaagtcaccgaaaaggtgacagcaatgctaattccgacgtgtgcgccgcagcacttcgaggattgtcaagaaccatcctgatgtgcggacccctcattaaggaagaaacgcacaggcgactgcatgatctcgttttaccactcgtcatgggtgtgcaacagggagaagttttagggagctcaccatacacgtcttcgcgatgcaggagagaactctattgcctcctcctggctctccttttagccccatcccctagatgtcccccaccactggcctgcgctctacaggccttcagcctaggccagcgcgaagattccttagaagtatcttcgttttgttcagaggcactcgtcacttgcgctgccctaacacaccccagagtaccccctctgcagccaatgggccctacttgccctactcctgctccggtgcccccacctgaggcaccgtctccattcagggccccaccgttccacccccctggaccaatgcctagtgtggggtctatgccttccgccggacccatgccgagtgcaggccctatgccgtccgctgggcctgtgccgtctgcacggccagggcctccaactacagccaatcatctcgggctgtctgtgccaggcctggtgtctgtgccaccaagactgttgccgggaccagagaaccatagagccggaagtaacgaagatcccatattggccccatctgggacaccaccaccgactatccccccagacgagacatttggaggaagggtccctcgccctgcatttgtgcactacgataaggaagaggccagtgacgttgagatctctcttgaaagcgactccgatgatagcgtggtcatcgtgcccgaagggctccccccactccctcccccacctccttctggagcaacaccgccacccattgcccctaccggccctcccaccgcatctccccctgtacctgccaaagaggagcccgaagagctccctgccgctccgggtccactgcccccaccccctcccccaccccctcccgtgccaggccctgtaacactgccaccaccgcaactcgttccagaaggcacacccggaggcggaggccctccggcactcgaggaagatcttaccgttattaacataaattcatccgatgaagaggaggaggaagaggaagaagaggaggaagaggaggaggaggaggaagaggaggaagaggatttcgaggaggaagaggaagatgaagaagagtattttgaagaggaggaagaagaagaagaggagtttgaggaggaattcgaggaggaggagggggagctcgaggaagaagaagaagaggaggatgaagaagaggaggaggaacttgaggaggtggaggatctagaattcggaaccgccggaggcgaggttgaggagggcgcaccccctccacctaccctcccgccagcattgcctccccctgaaagtcctcctaaagttcagcccgaaccagagccagagccgggactgttactggaggtggaagaacccggaaccgaggaagagaggggcgctgataccgcccctacattagcgccagaggccctgcccagccagggggaggtggagagggagggggaaagccctgccgctgggccaccccctcaagagttggttgaggaagagcccagcgccccaccgacactgctggaggaggaaacagaagacgggtctgataaggtgcaaccacctcctgagacacccgctgaagaagagatggagacagaaaccgaggcagaagcactgcaggagaaagaacaggatgacactgccgctatgctggccgactttattgattgccctcctgacgacgagaagccgccaccacccaccgagcctgactcctag

SEQ ID NO: 179800 - DNA, 3403 bp, Artificial Sequence
  derived and/or modified sequence
acaggcagcctcatccgccatcactccgggaaccgagcaccccgctgcctcggcgcccaggctgctctctccgcgcatgctccttcccagcttgagcccgcgagtccagcctgccttcactcagtgcgcaagaccgcagccccctccccacgccccctccccagtaggcggccgtcgcggtgtgtttgcgtcatcgcgccacgccaccactggaacccgggggaagatggcggcagccgttctgagtgggccctctgcgggctccgcggctggggttcctggcgggaccgggggtctctcggcagtgagctcgggcccgcggctccgcctgctgctgctggagagtgtttctggtttgctgcaacctcgaacggggtctgccgttgctccggtgcatcccccaaaccgctcggccccacatttgcccgggctcatgtgcctattgcggctgcatgggtcggtgggcggggcccagaacctttcagctcttggggcattggtgagtctcagtaatgcacgtctcagttccatcaaaactcggtttgagggcctgtgtctgctgtccctgctggtaggggagagccccacagagctattccagcagcactgtgtgtcttggcttcggagcattcagcaggtgttacagacccaggacccgcctgccacaatggagctggccgtggctgtcctgagggacctcctccgatatgcagcccagctgcctgcactgttccgggacatctccatgaaccacctccctggccttctcacctccctgctgggcctcaggccagagtgtgagcagtcagcattggaaggaatgaaggcttgtatgacctatttccctcgggcttgtggttctctcaaaggcaagctggcctcattttttctgtctagggtggatgccttgagccctcagctccaacagttggcctgtgagtgttattcccggctgccctctttaggggctggcttttcccaaggcctgaagcacaccgagagctgggagcaggagctacacagtctgctggcctcactgcacaccctgctgggggccctgtacgagggagcagagactgctcctgtgcagaatgaaggccctggggtggagatgctgctgtcctcagaagatggtgatgcccatgtccttctccagcttcggcagaggttttcgggactggcccgctgcctagggctcatgctcagctctgagtttggagctcccgtgtccgtccctgtgcaggaaatcctggatttcatctgccggaccctcagcgtcagtagcaagaatattagcttgcatggagatccctgcggctgctgctgctgccctctatccaccttggccttggacctgctgtctgcactcatcctcgcgtgtggaagccggctcttgcgctttgggatcctgatcggccgcctgcttccccaggtcctcaattcctggagcatcggtagagattccctctctccaggccaggagaggccttacagcacggttcggaccaaggtgtatgcgatattagagctgtgggtgcaggtttgtggggcctcggcgggaatgcttcagggaggagcctctggagaggccctgctcacccacctgctcagcgacatctccccgccagctgatgcccttaagctgcgtagcccgcgggggagccctgatgggagtttgcagactgggaagcctagcgcccccaagaagctaaagctggatgtgggggaagctatggccccgccaagccaccgcctcttgcctgtgccctgcaagccttctccctcggccagcgagaagatagccttgaggtctcctctttgctcagaagcactggtgacctgtgctgctctgacccacccccgggttcctcccctgcagcccatgggccccacctgccccacacctgctccagttcccctgaggccccatcgcccttcagggccccaccgttccatcctccgggccccatgccctcagtgggctccatgccctcagcaggccccatgctcagcaggccccatgccctcagcaggccctgtgccctcggcacgccctggacctcccaccacagccaaccacctaggcctttctgtcccaggcctagtgtctgtccctccccggcttcttcctggccctgagaaccaccgggcaggctcaaatgaggaccccatccttgcccctagtgggactcccccacctactatacccccagatgaaacttttggggggagagtgcccagaccagcctttgtccactatgacaaggaggaggcatctgatgtggagatctccttggaaagtgactctgatgacagcgtggtgatcgtgcccgaggggcttccccccctgccacccccaccaccctcaggtgccacaccaccccctatagcccccactgggccaccaacagcctcccctcctgtgccagcgaaggaggagcctgaagaacttcctgcagccccagggcctctcccgccacccccacctccgccgccgcctgttcctggtcctgtgacgctccctccaccccagttggtccctgaagggactcctggtgggggaggacccccagccctggaagaggatttgacagttattaatatcaacagcagtgatgaagaggaggaggaagaggaagaagaggaagaagaagaagaggaagaagaggaagaggaggaagactttgaggaagaggaagaggatgaagaggaatattttgaagaggaagaagaggaggaagaagagtttgaggaagaatttgaggaagaagaaggtgagttagaggaagaagaagaagaggaggatgaggaggaggaagaagaactggaagaggtggaagacctggagtttggcacagcaggaggggaggtagaagaaggtgcacctccacccccaaccctgcctccagctctgcctccccctgagtctcccccaaaggtgcagccagaacccgaacctgaacccgggctgcttttggaagtggaggagccagggacggaggaggagcgtggggctgacacagctcccaccctggcccctgaagcgctcccctcccagggagaggtggagagggaaggggaaagccctgcggcagggccccctccccaggagcttgttgaagaagagccctctgctcccccaaccctgttggaagaggagactgaggatgggagtgacaaggtgcagcccccaccagagacacctgcagaagaagagatggagacagagacagaggccgaagctctccaggaaaaggagcaggatgacacagctgccatgctggccgacttcatcgattgtccccctgatgatgagaagccaccacctcccacagagcctgactcctagccatcttctgcaccccactctttgtttccaataaagttatgtccttagatagcg

SEQ ID NO: 179801 - DNA, 4105 bp, Artificial Sequence
  derived and/or modified sequence
acaggcagcctcatccgccatcactccgggaaccgagcaccccgctgcctcggcgcccaggctgctctctccgcgcatgctccttcccagcttgagcccgcgagtccagcctgccttcactcagtgcgcaagaccgcagccccctccccacgccccctccccagtaggcggccgtcgcggtgtgtttgcgtcatcgcgccacgccaccactggaacccgggggaagatggcggcagccgttctgagtgggccctctgcgggctccgcggctggggttcctggcgggaccgggggtctctcggcagtgagctcgggcccgcggctccgcctgctgctgctggagagtgtttctggtttgctgcaacctcgaacggggtctgccgttgctccggtgcatcccccaaaccgctcggccccacatttgcccgggctcatgtgcctattgcggctgcatgggtcggtgggcggggcccagaacctttcagctcttggggcattggtgagtctcagtaatgcacgtctcagttccatcaaaactcggtttgagggcctgtgtctgctgtccctgctggtaggggagagccccacagagctattccagcagcactgtgtgtcttggcttcggagcattcagcaggtgttacagacccaggacccgcctgccacaatggagctggccgtggctgtcctgagggacctcctccgatatgcagcccagctgcctgcactgttccgggacatctccatgaaccacctccctggccttctcacctccctgctgggcctcaggccagagtgtgagcagtcagcattggaaggaatgaaggcttgtatgacctatttccctcgggcttgtggttctctcaaaggcaagctggcctcattttttctgtctagggtggatgccttgagccctcagctccaacagttggcctgtgagtgttattcccggctgccctctttaggggctggcttttcccaaggcctgaagcacaccgagagctgggagcaggagctacacagtctgctggcctcactgcacaccctgctgggggccctgtacgagggagcagagactgctcctgtgcagaatgaaggccctggggtggagatgctgctgtcctcagaagatggtgatgcccatgtccttctccagcttcggcagaggttttcgggactggcccgctgcctagggctcatgctcagctctgagtttggagctcccgtgtccgtccctgtgcaggaaatcctggatttcatctgccggaccctcagcgtcagtagcaagaatattgtaagtgggatttgtcatctcttcagagcccttgctcaggataccaggcaaccaggaaagtactggggacctgagtctccccaaacagtgtcatcctggagtcgtcccagagagcttcctacttttgtccaaataacatcacttcctatgtgtcgtgacacaggagcacagtgtcagagtgtagcaaatgcttccttgggggagggtgaatttggggatgctgagtcattgctgagaggcccagccatccttcttaccttccatccagggtctattttagaggataggggtttgattttgttgggagagctgagatcaggggttgggtttcttacctatgtgtacatatgtaaatggtcattccctgtttctgtctctctctggctctcactttcttcctccactctttatctctgccccttttttctccagagcttgcatggagatggtcccctgcggctgctgctgctgccctctatccaccttgaggccttggacctgctgtctgcactcatcctcgcgtgtggaagccggctcttgcgctttgggatcctgatcggccgcctgcttccccaggtcctcaattcctggagcatcggtagagattccctctctccaggccaggagaggccttacagcacggttcggaccaaggtgtatgcgatattagagctgtgggtgcaggtttgtggggcctcggcgggaatgcttcagggaggagcctctggagaggccctgctcacccacctgctcagcgacatctccccgccagctgatgcccttaagctgcgtagcccgcgggggagccctgatgggagtttgcagactgggaagcctagcgcccccaagaagctaaagctggatgtgggggaagctatggccccgccaagccaccggaaaggggatagcaatgccaacagcgacgtgtgtgcggctgcactcagaggcctcagccggaccatcctcatgtgtgggcctctcatcaaggaggagactcacaggagactgcatgacctggtcctccccctggtcatgggtgtacagcagggtgaggtcctaggcagctccccgtacacgagctcccgctgccgccgtgaactctactgcctgctgctggcgctgctgctggccccgtctcctcgctgcccacctcctcttgcctgtgccctgcaagccttctccctcggccagcgagaagatagccttgaggtctcctctttctgctcagaagcactggtgacctgtgctgctctgacccacccccgggttcctcccctgcagcccatgggccccacctgccccacacctgctccagttccccctcctgaggccccatcgcccttcagggccccaccgttccatcctccgggccccatgccctcagtgggctccatgccctcagcaggccccatgccttcagcaggccccatgccctcagcaggccctgtgccctcggcacgccctggacctcccaccacagccaaccacctaggcctttctgtcccaggcctagtgtctgtccctccccggcttcttcctggccctgagaaccaccgggcaggctcaaatgaggaccccatccttgcccctagtgggactcccccacctactatacccccagatgaaacttttggggggagagtgcccagaccagcctttgtccactatgacaaggaggaggcatctgatgtggagatctccttggaaagtgactctgatgacagcgtggtgatcgtgcccgaggggcttccccccctgccacccccaccaccctcaggtgccacaccaccccctatagcccccactgggccaccaacagcctcccctcctgtgccagcgaaggaggagcctgaagaacttcctgcagccccagggcctctcccgccacccccacctccgccgccgcctgttcctggtcctgtgacgctccctccaccccagttggtccctgaagggactcctggtgggggaggacccccagccctggaagaggatttgacagttattaatatcaacagcagtgatgaagaggaggaggaagaggaagaagaggaagaagaagaagaggaagaagaggaagaggaggaagactttgaggaagaggaagaggatgaagaggaatattttgaagaggaagaagaggaggaagaagagtttgaggaagaatttgaggaagaagaaggtgagttagaggaagaagaagaagaggaggatgaggaggaggaagaagaactggaagaggtggaagacctggagtttggcacagcaggaggggaggtagaagaaggtgcacctccacccccaaccctgcctccagctctgcctccccctgagtctcccccaaaggtgcagccagaacccgaacctgaacccgggctgcttttggaagtggaggagccagggacggaggaggagcgtggggctgacacagctcccaccctggcccctgaagcgctcccctcccagggagaggtggagagggaaggggaaagccctgcggcagggccccctccccaggagcttgttgaagaagagccctctgctcccccaaccctgttggaagaggagactgaggatgggagtgacaaggtgcagcccccaccagagacacctgcagaagaagagatggagacagagacagaggccgaagctctccaggaaaaggagcaggatgacacagctgccatgctggccgacttcatcgattgtccccctgatgatgagaagccaccacctcccacagagcctgactcctagccatcttctgcaccccactctttgtttccaataaagttatgtccttagatagcg

SEQ ID NO: 179802 - DNA, 3280 bp, Artificial Sequence
  derived and/or modified sequence
aacccgggggaagatggcggcagccgttctgagtgggccctctgcgggctccgcggctggggttcctggcgggaccgggggtctctcggcagtgagctcgggcccgcggctccgcctgctgctgctggagagtgtttctggtttgctgcaacctcgaacggggtctgccgttgctccggtgcatcccccaaaccgctcggccccacatttgcccgggctcatgtgcctattgcggctgcatgggtcggtgggcggggcccagaacctttcagctcttggggcattggtgagtctcagtaatgcacgtctcagttccatcaaaactcggtttgagggcctgtgtctgctgtccctgctggtaggggagagccccacagagctattccagcagcactgtgtgtcttggcttcggagcattcagcaggtgttacagtatccgtgtctccacaccctcttttctgccaggtagtggcttggatggtcagactgacattaaccgtggcattcctcagaagacccaggacccgcctgccacaatggagctggccgtggctgtcctgagggacctcctccgatatgcagcccagctgcctgcactgttccgggacatctccatgaaccacctccctggccttctcacctccctgctgggcctcaggccagagtgtgagcagtcagcattggaaggaatgaaggcttgtatgacctatttccctcgggcttgtggttctctcaaaggcaagctggcctcattttttctgtctagggtggatgccttgagccctcagctccaacagttggcctgtgagtgttattcccggctgccctctttaggggctggcttttcccaaggcctgaagcacaccgagagctgggagcaggagctacacagtctgctggcctcactgcacaccctgctgggggccctgtacgagggagcagagactgctcctgtgcagaatgaaggccctggggtggagatgctgctgtcctcagaagatggtgatgcccatgtccttctccagcttcggcagaggttttcgggactggcccgctgcctagggctcatgctcagctctgagtttggagctcccgtgtccgtccctgtgcaggaaatcctggatttcatctgccggaccctcagcgtcagtagcaagaatattagcttgcatggagatggtcccctgcggctgctgctgctgccctctatccaccttgaggccttggacctgctgtctgcactcatcctcgcgtgtggaagccggctcttgcgctttgggatcctgatcggccgcctgcttccccaggtcctcaattcctggagcatcggtagagattccctctctccaggccaggagaggccttacagcacggttcggaccaaggtgtatgcgatattagagctgtgggtgcaggtttgtggggcctcggcgggaatgcttcagggaggagcctctggagaggccctgctcacccacctgctcagcgacatctccccgccagctgatgcccttaagctgcgtagcccgcgggggagccctgatgggagtttgcagactgggaagcctagcgcccccaagaagctaaagctggatgtgggggaagctatggccccgccaagccaccggaaaggggatagcaatgccaacagcgacgtgtgtgcggctgcactcagaggcctcagccggaccatcctcatgtgtgggcctctcatcaaggaggagactcacaggagactgcatgacctggtcctccccctggtcatgggtgtacagcagggtgaggtcctaggcagctccccgtacacgagctcccgctgccgccgtgaactctactgcctgctgctggcgctgctgctggccccgtctcctcgctgcccacctcctcttgcctgtgccctgcaagccttctccctcggccagcgagaagatagccttgaggtctcctctttctgctcagaagcactggtgacctgtgctgctctgacccacccccgggttcctcccctgcagcccatgggccccacctgccccacacctgctccagttccccctcctgaggccccatcgcccttcagggccccaccgttccatcctccgggccccatgccctcagtgggctccatgccctcagcaggccccatgccttcagcaggccccatgccctcagcaggccctgtgccctcggcacgccctggacctcccaccacagccaaccacctaggcctttctgtcccaggcctagtgtctgtccctccccggcttcttcctggccctgagaaccaccgggcaggctcaaatgaggaccccatccttgcccctagtgggactcccccacctactatacccccagatgaaacttttggggggagagtgcccagaccagcctttgtccactatgacaaggaggaggcatctgatgtggagatctccttggaaagtgactctgatgacagcgtggtgatcgtgcccgaggggcttccccccctgccacccccaccaccctcaggtgccacaccaccccctatagcccccactgggccaccaacagcctcccctcctgtgccagcgaaggaggagcctgaagaacttcctgcagccccagggcctctcccgccacccccacctccgccgccgcctgttcctggtcctgtgacgctccctccaccccagttggtccctgaagggactcctggtgggggaggacccccagccctggaagaggatttgacagttattaatatcaacagcagtgatgaagaggaggaggaagaggaagaagaggaagaagaagaagaggaagaagaggaagaggaggaagactttgaggaagaggaagaggatgaagaggaatattttgaagaggaagaagaggaggaagaagagtttgaggaagaatttgaggaagaagaaggtgagttagaggaagaagaagaagaggaggatgaggaggaggaagaagaactggaagaggtggagagggaaggggaaagccctgcggcagggccccctccccaggagcttgttgaagaagagccctctgctcccccaaccctgttggaagaggagactgaggatgggagtgacaaggtgcagcccccaccagagacacctgcagaagaagagatggagacagagacagaggccgaagctctccaggaaaaggagcaggatgacacagctgccatgctggccgacttcatcgattgtccccctgatgatgagaagccaccacctcccacagagcctgactcctagccatcttctgcaccccactcttt

SEQ ID NO: 179803 - DNA, 3661 bp, Artificial Sequence
  derived and/or modified sequence
atccgccatcactccgggaaccgagcaccccgctgcctcggcgcccaggctgctctctccgcgcatgctccttcccagcttgagcccgcgagtccagcctgccttcactcagtgcgcaagaccgcagccccctccccacgccccctccccagtaggcggccgtcgcggtgtgtttgcgtcatcgcgccacgccaccactggaacccgggggaagatggcggcagccgttctgagtgggccctctgcgggctccgcggctggggttcctggcgggaccgggggtctctcggcagtgagctcgggcccgcggctccgcctgctgctgctggagagtgtttctggtttgctgcaacctcgaacggggtctgccgttgctccggtgcatcccccaaaccgctcggccccacatttgcccgggctcatgtgcctattgcggctgcatgggtcggtgggcggggcccagaacctttcagctcttggggcattggtgagtctcagtaatgcacgtctcagttccatcaaaactcggtttgagggcctgtgtctgctgtccctgctggtaggggagagccccacagagctattccagcagcactgtgtgtcttggcttcggagcattcagcaggtgttacagacccaggacccgcctgccacaatggagctggccgtggctgtcctgagggacctcctccgatatgcagcccagctgcctgcactgttccgggacatctccatgaaccacctccctggccttctcacctccctgctgggcctcaggccagagtgtgagcagtcagcattggaaggaatgaaggcttgtatgacctatttccctcgggcttgtggttctctcaaaggcaagctggcctcattttttctgtctagggtggatgccttgagccctcagctccaacagttggcctgtgagtgttattcccggctgccctctttaggggctggcttttcccaaggcctgaagcacaccgagagctgggagcaggagctacacagtctgctggcctcactgcacaccctgctgggggccctgtacgagggagcagagactgctcctgtgcagaatgaaggccctggggtggagatgctgctgtcctcagaagatggtgatgcccatgtccttctccagcttcggcagaggttttcgggactggcccgctgcctagggctcatgctcagctctgagtttggagctcccgtgtccgtccctgtgcaggaaatcctggatttcatctgccggaccctcagcgtcagtagcaagaatattagcttgcatggagatggtcccctgcggctgctgctgctgccctctatccaccttgaggccttggacctgctgtctgcactcatcctcgcgtgtggaagccggctcttgcgctttgggatcctgatcggccgcctgcttccccaggtcctcaattcctggagcatcggtagagattccctctctccaggccaggagaggccttacagcacggttcggaccaaggtgtatgcgatattagagctgtgggtgcaggtttgtggggcctcggcgggaatgcttcagggaggagcctctggagaggccctgctcacccacctgctcagcgacatctccccgccagctgatgcccttaagctgcgtagcccgcgggggagccctgatgggagtttgcagactgggaagcctagcgcccccaagaagctaaagctggatgtgggggaagctatggccccgccaagccaccggaaaggggatagcaatgccaacagcgacgtgtgtgcggctgcactcagaggcctcagccggaccatcctcatgtgtgggcctctcatcaaggaggagactcacaggagactgcatgacctggtcctccccctggtcatgggtgtacagcagggtgaggtcctaggcagctccccgtacacgagctcccgctgccgccgtgaactctactgcctgctgctggcgctgctgctggccccgtctcctcgctgcccacctcctcttgcctgtgccctgcaagccttctccctcggccagcgagaagatagccttgaggtctcctctttctgctcagaagcactggtgacctgtgctgctctgacccacccccgggttcctcccctgcagcccatgggccccacctgccccacacctgctccagttccccctcctgaggccccatcgcccttcagggccccaccgttccatcctccgggccccatgccctcagtgggctccatgccctcagcaggccccatgccttcagcaggccccatgccctcagcaggccctgtgccctcggcacgccctggacctcccaccacagccaaccacctaggcctttctgtcccaggcctagtgtctgtccctccccggcttcttcctggccctgagaaccaccgggcaggctcaaatgaggaccccatccttgcccctagtgggactcccccacctactatacccccagatgaaacttttggggggagagtgcccagaccagcctttgtccactatgacaaggaggaggcatctgatgtggagatctccttggaaagtgactctgatgacagcgtggtgatcgtgcccgaggggcttccccccctgccacccccaccaccctcaggtgccacaccaccccctatagcccccactgggccaccaacagcctcccctcctgtgccagcgaaggaggagcctgaagaacttcctgcagccccagggcctctcccgccacccccacctccgccgccgcctgttcctggtcctgtgacgctccctccaccccagttggtccctgaagggactcctggtgggggaggacccccagccctggaagaggatttgacagttattaatatcaacagcagtgatgaagaggaggaggaagaggaagaagaggaagaagaagaagaggaagaagaggaagaggaggaagactttgaggaagaggaagaggatgaagaggaatattttgaagaggaagaagaggaggaagaagagtttgaggaagaatttgaggaagaagaaggtgagttagaggaagaagaagaagaggaggatgaggaggaggaagaagaactggaagaggtggaagacctggagtttggcacagcaggaggggaggtagaagaaggtgcacctccacccccaaccctgcctccagctctgcctccccctgagtctcccccaaaggtgcagccagaacccgaacctgaacccgggctgcttttggaagtggaggagccagggacggaggaggagcgtggggctgacacagctcccaccctggcccctgaagcgctcccctcccagggagaggtggagagggaaggggaaagccctgcggcagggccccctccccaggagcttgttgaagaagagccctctgctcccccaaccctgttggaagaggagactgaggatgggagtgacaaggtgcagcccccaccagagacacctgcagaagaagagatggagacagagacagaggccgaagctctccaggaaaaggagcaggatgacacagctgccatgctggccgacttcatcgattgtccccctgatgatgagaagccaccacctcccacagagcctgactcctagccatcttctgcaccccactctttgtttccaataaagttatgtccttagatagcg

SEQ ID NO: 179804 - protein, 910 aa, Artificial Sequence
  derived and/or modified sequence
MASSAQSGGSSGGPAVPTVQRGIIKMVLSGCAIIVRGQPRGGPPPERQINLSNIRAGNLARRAAATQPDAKDTPDEPWAFPAREFLRKKLIGKEVCFTIENKTPQGREYGMIYLGKDTNGENIAESLVAEGLATRREGMRANNPEQNRLSECEEQAKAAKKGMWSEGNGSHTIRDLKYTIENPRHFVDSHHQKPVNAIIEHVRDGSVVRALLLPDYYLVTVMLSGIKCPTFRREADGSETPEPFAAEAKFFTESRLLQRDVQIILESCHNQNILGTILHPNGNITELLLKEGFARCVDWSIAVYTRGAEKLRAAERFAKERRLRIWRDYVAPTANLDQKDKQFVAKVMQVLNADAIVVKLNSGDYKTIHLSSIRPPRLEGENTQDKNKKLRPLYDIPYMFEAREFLRKKLIGKKVNVTVDYIRPASPATETVPAFSERTCATVTIGGINIAEALVSKGLATVIRYRQDDDQRSSHYDELLAAEARAIKNGKGLHSKKEVPIHRVADISGDTQKAKQFLPFLQRAGRSEAVVEYVFSGSRLKLYLPKETCLITFLLAGIECPRGARNLPGLVQEGEPFSEEATLFTKELVLQREVEVEVESMDKAGNFIGWLHIDGANLSVLLVEHALSKVHFTAERSSYYKSLLSAEEAAKQKKEKVWAHYEEQPVEEVMPVLEEKERSASYKPVFVTEITDDLHFYVQDVETGTQLEKLMENMRNDIASHPPVEGSYAPRRGEFCIAKFVDGEWYRARVEKVESPAKIHVFYIDYGNREVLPSTRLGTLSPAFSTRVLPAQATEYAFAFIQVPQDDDARTDAVDSVVRDIQNTQCLLNVEHLSAGCPHVTLQFADSKGDVGLGLVKEGLVMVEVRKEKQFQKVITEYLNAQESAKSARLNLWRYGDFRADDADEFGYSR

SEQ ID NO: 179805 - protein, 900 aa, Artificial Sequence
  derived and/or modified sequence
MASSAVPTVQRGIIKMVLSGCAIIVRGQPRGGPPPERQINLSNIRAGNLARRAAATQPDAKDTPDEPWAFPAREFLRKKLIGKEVCFTIENKTPQGREYGMIYLGKDTNGENIAESLVAEGLATRREGMRANNPEQNRLSECEEQAKAAKKGMWSEGNGSHTIRDLKYTIENPRHFVDSHHQKPVNAIIEHVRDGSVVRALLLPDYYLVTVMLSGIKCPTFRREADGSETPEPFAAEAKFFTESRLLQRDVQIILESCHNQNILGTILHPNGNITELLLKEGFARCVDWSIAVYTRGAEKLRAAERFAKERRLRIWRDYVAPTANLDQKDKQFVAKVMQVLNADAIVVKLNSGDYKTIHLSSIRPPRLEGENTQDKNKKLRPLYDIPYMFEAREFLRKKLIGKKVNVTVDYIRPASPATETVPAFSERTCATVTIGGINIAEALVSKGLATVIRYRQDDDQRSSHYDELLAAEARAIKNGKGLHSKKEVPIHRVADISGDTQKAKQFLPFLQRAGRSEAVVEYVFSGSRLKLYLPKETCLITFLLAGIECPRGARNLPGLVQEGEPFSEEATLFTKELVLQREVEVEVESMDKAGNFIGWLHIDGANLSVLLVEHALSKVHFTAERSSYYKSLLSAEEAAKQKKEKVWAHYEEQPVEEVMPVLEEKERSASYKPVFVTEITDDLHFYVQDVETGTQLEKLMENMRNDIASHPPVEGSYAPRRGEFCIAKFVDGEWYRARVEKVESPAKIHVFYIDYGNREVLPSTRLGTLSPAFSTRVLPAQATEYAFAFIQVPQDDDARTDAVDSVVRDIQNTQCLLNVEHLSAGCPHVTLQFADSKGDVGLGLVKEGLVMVEVRKEKQFQKVITEYLNAQESAKSARLNLWRYGDFRADDADEFGYSR

SEQ ID NO: 179806 - DNA, 3522 bp, Artificial Sequence
  derived and/or modified sequence
acgcttgcgcggcgagtagaacgtgtggcggcggcggagatcgcgtctctttcgctccgtgtcccgctgctgctcctgtgagcgcccggcgagtccgtcccgtccaccgtccgcagctggtagccagcctgcccctcgcctcgactccctttcaccaacaccgacacccacattgacacctccagtccggccagccgctccactcgttgcctttgcatctccacacatggcgtcctccgcgcagagcggcggctcctccgggggacccgcggtccccaccgtgcagcggggcatcatcaagatggtcctctcagggtgcgccatcattgtccgaggtcagcctcgtggtgggcctcctcctgagcggcagatcaacctcagcaacattcgtgctggaaatcttgctcgccgggcagccgccacacaacctgatgcaaaggatacccctgatgagccctgggcatttccagctcgagagttccttcgaaagaagctgattgggaaggaagtctgtttcacgatagaaaacaagactccccaggggcgagagtatggcatgatctaccttggaaaagataccaatggggaaaacattgcagaatcactggttgcagagggcttagccacccggagagaaggcatgagagctaataatcctgagcagaaccggctttcagaatgtgaagaacaagcaaaggcagccaagaaagggatgtggagtgaggggaacggttcacatactatccgggatctcaagtataccattgaaaacccaaggcactttgtggactcacaccaccagaagcctgttaatgctatcatcgagcatgtgcgggacggcagtgtggtcagggccctgctcctcccagattactacctggttacagtcatgctgtcaggcatcaagtgcccaacttttcgacgggaagcagatggcagtgaaactccagagccttttgctgcagaagccaaatttttcactgagtcgcgactgcttcagagagatgttcagatcattctggagagctgccacaaccagaacattctgggtaccatccttcatccaaatggcaacatcacagagctcctcctgaaggaaggtttcgcacgctgtgtggactggtcgattgcagtttacacccggggcgcagaaaagctgagggcggcagagaggtttgccaaagagcgcaggctgagaatatggagagactatgtggctcccacagctaatttggaccaaaaggacaagcagtttgttgccaaggtgatgcaggttctgaatgctgatgccattgttgtgaagctgaactcaggcgattacaagacgattcacctgtccagcatccgaccaccgaggctggagggggagaacacccaggataagaacaagaaactgcgtcccctgtatgacattccttacatgtttgaggcccgggaatttcttcgaaaaaagcttattgggaagaaggtcaatgtgacggtggactacattagaccagccagcccagccacagagacagtgcctgccttttcagagcgtacctgtgccactgtcaccattggaggaataaacattgctgaggctcttgtcagcaaaggtctagccacagtgatcagataccggcaggatgatgaccagagatcatcacactacgatgaactgcttgctgcagaggccagagctattaagaatggcaaaggattgcatagcaagaaggaagtgcctatccaccgtgttgcagatatatctggggatacccaaaaagcaaagcagttcctgccttttcttcagcgggcaggtcgttctgaagctgtggtggaatacgtcttcagtggttctcgtctcaaactctatttgccaaaggaaacttgccttatcaccttcttgcttgcaggcattgaatgccccagaggagcccgaaacctcccaggcttggtgcaggaaggagagcccttcagcgaggaagctacacttttcaccaaggaactggtgctgcagcgagaggtggaggtggaggtggagagcatggacaaggccggcaactttatcggctggctgcacatcgacggtgccaacctgtccgtcctgctggtggagcacgcgctctccaaggtccacttcaccgccgaacgcagctcctactacaagtccctgctgtctgccgaggaggccgcaaagcagaagaaagagaaggtctgggcccactatgaggagcagcccgtggaggaggtgatgccagtgctggaggagaaggagcgatctgctagctacaagcccgtgtttgtgactgagatcactgatgacctgcacttctacgtgcaggatgtggagaccggcacccagttggagaagctgatggagaacatgcgcaatgacattgccagtcacccccctgtagagggctcctatgccccccgcaggggagagttctgcattgccaaatttgtagatggagaatggtaccgtgcccgagtagagaaagtcgagtctcctgccaaaatacatgtcttctacattgactacggcaacagagaggtcctgccatccacccgcctgggtaccctatcacctgccttcagcactcgggtgctgccagctcaagccacggagtatgccttcgccttcatccaggtgccccaagatgatgatgcccgcacggacgccgtggacagcgtagttcgggatatccagaacactcagtgcctgctcaacgtggaacacctgagtgccggctgcccccatgtcaccctgcagtttgcagattccaagggcgatgtggggctgggcttggtgaaggaagggctggtcatggtggaggtgcgcaaggagaaacagttccagaaagtgatcacagaatacctgaatgcccaagagtcagccaagagcgccaggctgaacctgtggcgctatggagactttcgagctgatgatgcagacgaatttggctacagccgctaaggaggggatcgggtttggcccccagccccgctcacgccagtccctcttcctctgccgggagggtgttttcaactccaaaccccagagaggggttgtagattgggtccagctttgcttcagtgtgtggaaatgtctcgtggggtggcatcggggctgcggggtggggaccccaaggctttctggggcagacccttgtcctctgggatgatgggcactgctatccacagtctctgccagttggttttatttggaggtttgtgggctttttttaaaaaaaaaaagtcctcaaatcaggaagaaacatcaaagactatgtcctagtggagggagtaatcctaacacccaggctggccgccagctggcacctgcctctatcccagactgccctcgtcccagctctctgtccaactgttgattatgtgatttttctgatacgtccattctcaaatgccagtgtgttcacatcttcgctctggccagcccattctgtatttaaagcttttgaggcccaataaaatagtacgtgctgtctgcagcccttattgatcaaaaaaaaaaaaaaa

SEQ ID NO: 179807 - DNA, 2733 bp, Artificial Sequence
  derived and/or modified sequence
atggccagcagcgcccagagcggcggcagcagcggcggccccgccgtgcccaccgtgcagagaggcatcatcaagatggtgctgagcggctgcgccatcatcgtgagaggccagcccagaggcggccccccccccgagagacagatcaacctgagcaacatcagagccggcaacctggccagaagagccgccgccacccagcccgacgccaaggacacccccgacgagccctgggccttccccgccagagagttcctgagaaagaagctgatcggcaaggaggtgtgcttcaccatcgagaacaagaccccccagggcagagagtacggcatgatctacctgggcaaggacaccaacggcgagaacatcgccgagagcctggtggccgagggcctggccaccagaagagagggcatgagagccaacaaccccgagcagaacagactgagcgagtgcgaggagcaggccaaggccgccaagaagggcatgtggagcgagggcaacggcagccacaccatcagagacctgaagtacaccatcgagaaccccagacacttcgtggacagccaccaccagaagcccgtgaacgccatcatcgagcacgtgagagacggcagcgtggtgagagccctgctgctgcccgactactacctggtgaccgtgatgctgagcggcatcaagtgccccaccttcagaagagaggccgacggcagcgagacccccgagcccttcgccgccgaggccaagttcttcaccgagagcagactgctgcagagagacgtgcagatcatcctggagagctgccacaaccagaacatcctgggcaccatcctgcaccccaacggcaacatcaccgagctgctgctgaaggagggcttcgccagatgcgtggactggagcatcgccgtgtacaccagaggcgccgagaagctgagagccgccgagagattcgccaaggagagaagactgagaatctggagagactacgtggcccccaccgccaacctggaccagaaggacaagcagttcgtggccaaggtgatgcaggtgctgaacgccgacgccatcgtggtgaagctgaacagcggcgactacaagaccatccacctgagcagcatcagaccccccagactggagggcgagaacacccaggacaagaacaagaagctgagacccctgtacgacatcccctacatgttcgaggccagagagttcctgagaaagaagctgatcggcaagaaggtgaacgtgaccgtggactacatcagacccgccagccccgccaccgagaccgtgcccgccttcagcgagagaacctgcgccaccgtgaccatcggcggcatcaacatcgccgaggccctggtgagcaagggcctggccaccgtgatcagatacagacaggacgacgaccagagaagcagccactacgacgagctgctggccgccgaggccagagccatcaagaacggcaagggcctgcacagcaagaaggaggtgcccatccacagagtggccgacatcagcggcgacacccagaaggccaagcagttcctgcccttcctgcagagagccggcagaagcgaggccgtggtggagtacgtgttcagcggcagcagactgaagctgtacctgcccaaggagacctgcctgatcaccttcctgctggccggcatcgagtgccccagaggcgccagaaacctgcccggcctggtgcaggagggcgagcccttcagcgaggaggccaccctgttcaccaaggagctggtgctgcagagagaggtggaggtggaggtggagagcatggacaaggccggcaacttcatcggctggctgcacatcgacggcgccaacctgagcgtgctgctggtggagcacgccctgagcaaggtgcacttcaccgccgagagaagcagctactacaagagcctgctgagcgccgaggaggccgccaagcagaagaaggagaaggtgtgggcccactacgaggagcagcccgtggaggaggtgatgcccgtgctggaggagaaggagagaagcgccagctacaagcccgtgttcgtgaccgagatcaccgacgacctgcacttctacgtgcaggacgtggagaccggcacccagctggagaagctgatggagaacatgagaaacgacatcgccagccacccccccgtggagggcagctacgcccccagaagaggcgagttctgcatcgccaagttcgtggacggcgagtggtacagagccagagtggagaaggtggagagccccgccaagatccacgtgttctacatcgactacggcaacagagaggtgctgcccagcaccagactgggcaccctgagccccgccttcagcaccagagtgctgcccgcccaggccaccgagtacgccttcgccttcatccaggtgccccaggacgacgacgccagaaccgacgccgtggacagcgtggtgagagacatccagaacacccagtgcctgctgaacgtggagcacctgagcgccggctgcccccacgtgaccctgcagttcgccgacagcaagggcgacgtgggcctgggcctggtgaaggagggcctggtgatggtggaggtgagaaaggagaagcagttccagaaggtgatcaccgagtacctgaacgcccaggagagcgccaagagcgccagactgaacctgtggagatacggcgacttcagagccgacgacgccgacgagttcggctacagcagatag

SEQ ID NO: 179808 - DNA, 2703 bp, Artificial Sequence
  derived and/or modified sequence
atggccagcagcgccgtgcccaccgtgcagagaggcatcatcaagatggtgctgagcggctgcgccatcatcgtgagaggccagcccagaggcggccccccccccgagagacagatcaacctgagcaacatcagagccggcaacctggccagaagagccgccgccacccagcccgacgccaaggacacccccgacgagccctgggccttccccgccagagagttcctgagaaagaagctgatcggcaaggaggtgtgcttcaccatcgagaacaagaccccccagggcagagagtacggcatgatctacctgggcaaggacaccaacggcgagaacatcgccgagagcctggtggccgagggcctggccaccagaagagagggcatgagagccaacaaccccgagcagaacagactgagcgagtgcgaggagcaggccaaggccgccaagaagggcatgtggagcgagggcaacggcagccacaccatcagagacctgaagtacaccatcgagaaccccagacacttcgtggacagccaccaccagaagcccgtgaacgccatcatcgagcacgtgagagacggcagcgtggtgagagccctgctgctgcccgactactacctggtgaccgtgatgctgagcggcatcaagtgccccaccttcagaagagaggccgacggcagcgagacccccgagcccttcgccgccgaggccaagttcttcaccgagagcagactgctgcagagagacgtgcagatcatcctggagagctgccacaaccagaacatcctgggcaccatcctgcaccccaacggcaacatcaccgagctgctgctgaaggagggcttcgccagatgcgtggactggagcatcgccgtgtacaccagaggcgccgagaagctgagagccgccgagagattcgccaaggagagaagactgagaatctggagagactacgtggcccccaccgccaacctggaccagaaggacaagcagttcgtggccaaggtgatgcaggtgctgaacgccgacgccatcgtggtgaagctgaacagcggcgactacaagaccatccacctgagcagcatcagaccccccagactggagggcgagaacacccaggacaagaacaagaagctgagacccctgtacgacatcccctacatgttcgaggccagagagttcctgagaaagaagctgatcggcaagaaggtgaacgtgaccgtggactacatcagacccgccagccccgccaccgagaccgtgcccgccttcagcgagagaacctgcgccaccgtgaccatcggcggcatcaacatcgccgaggccctggtgagcaagggcctggccaccgtgatcagatacagacaggacgacgaccagagaagcagccactacgacgagctgctggccgccgaggccagagccatcaagaacggcaagggcctgcacagcaagaaggaggtgcccatccacagagtggccgacatcagcggcgacacccagaaggccaagcagttcctgcccttcctgcagagagccggcagaagcgaggccgtggtggagtacgtgttcagcggcagcagactgaagctgtacctgcccaaggagacctgcctgatcaccttcctgctggccggcatcgagtgccccagaggcgccagaaacctgcccggcctggtgcaggagggcgagcccttcagcgaggaggccaccctgttcaccaaggagctggtgctgcagagagaggtggaggtggaggtggagagcatggacaaggccggcaacttcatcggctggctgcacatcgacggcgccaacctgagcgtgctgctggtggagcacgccctgagcaaggtgcacttcaccgccgagagaagcagctactacaagagcctgctgagcgccgaggaggccgccaagcagaagaaggagaaggtgtgggcccactacgaggagcagcccgtggaggaggtgatgcccgtgctggaggagaaggagagaagcgccagctacaagcccgtgttcgtgaccgagatcaccgacgacctgcacttctacgtgcaggacgtggagaccggcacccagctggagaagctgatggagaacatgagaaacgacatcgccagccacccccccgtggagggcagctacgcccccagaagaggcgagttctgcatcgccaagttcgtggacggcgagtggtacagagccagagtggagaaggtggagagccccgccaagatccacgtgttctacatcgactacggcaacagagaggtgctgcccagcaccagactgggcaccctgagccccgccttcagcaccagagtgctgcccgcccaggccaccgagtacgccttcgccttcatccaggtgccccaggacgacgacgccagaaccgacgccgtggacagcgtggtgagagacatccagaacacccagtgcctgctgaacgtggagcacctgagcgccggctgcccccacgtgaccctgcagttcgccgacagcaagggcgacgtgggcctgggcctggtgaaggagggcctggtgatggtggaggtgagaaaggagaagcagttccagaaggtgatcaccgagtacctgaacgcccaggagagcgccaagagcgccagactgaacctgtggagatacggcgacttcagagccgacgacgccgacgagttcggctacagcagatag

SEQ ID NO: 179809 - DNA, 2733 bp, Artificial Sequence
  derived and/or modified sequence
atggcttcctcagctcaatccggcggtagttcagggggacccgccgtgcccacggtccaacggggcattatcaagatggttctgagcggctgtgcaattatcgttcgaggccagccacgcggcggaccccctccagaaaggcaaatcaatctgtccaacatccgggcgggaaatctggctcggagggcagccgcaacccagccagacgctaaggatacccctgatgaaccatgggccttcccagccagggaattcctgcgtaagaagttaatcgggaaggaagtgtgctttacgattgaaaataagaccccccaaggaagagaatacggcatgatctatctgggcaaggatactaacggtgaaaacattgctgaaagtctagttgctgaaggcttggccaccaggcgagagggcatgagagctaataatccagagcagaaccgtctatctgagtgcgaggaacaggcaaaagccgctaaaaaggggatgtggtctgaagggaatgggtcccataccatacgtgatttgaaatataccatagaaaacccccgacacttcgtcgacagtcatcatcagaaacccgtgaacgctataatcgaacatgtacgggacggcagtgtggttagagccttactcctgcccgattactacttagtaactgtgatgttgtctggcatcaaatgtcctacattcagacgagaagctgatggctccgagacgcccgagccttttgccgccgaggccaagttcttcaccgagtcgagattattgcaacgtgatgtacagattattctggaatcatgccataaccagaacatccttggtacaatcctgcatccaaatgggaatattactgaactactgctgaaggaggggtttgccaggtgcgtggattggtcgatagcagtgtatactcgtggtgctgaaaagctccgcgcagccgaacggtttgccaaagagaggaggttgcggatatggagagactatgtggcacccacagcaaatctggatcaaaaagacaaacaatttgttgccaaggtcatgcaggttctgaatgcggatgcaattgtggtaaaactgaattctggcgactataagacaattcacctttcttcaattagacctccacgattggaaggcgagaatactcaggacaaaaataagaaactaagaccgctctacgacatcccctacatgttcgaggctagagagttccttcggaaaaagctgataggcaaaaaggtgaatgtcaccgtggattacatcaggccggcctctcccgccacagagactgtgccagctttctctgaacggacctgcgctaccgttactatcggcggaattaacattgctgaagccttggtctctaagggcctcgccaccgttatccgatataggcaggatgatgaccagcgatcatctcattacgatgagctgctggctgccgaagcaagagcgatcaaaaacgggaaggggttgcactccaaaaaagaagtccccatccaccgggttgcggacatctccggcgacacccaaaaagccaagcagtttttacctttcctgcaacgtgcgggtaggtcggaggcagtggtcgagtacgtgttttctggctctaggctaaaattgtacctgcccaaagagacgtgtcttataacattcctgcttgctgggatcgagtgccctcgcggcgcgagaaatctgcctgggctcgttcaggagggagaaccttttagtgaggaggctacactgtttaccaaggaacttgtgctgcagcgggaggtagaagtggaggtggaaagcatggataaagctggcaatttcatcggttggctgcacattgacggcgctaacctgagcgtgctgctggtggaacatgctctgagtaaagtgcactttactgccgaacggtcctcctactataagtcccttctcagtgcggaggaggccgctaagcagaaaaaggaaaaggtttgggcgcattatgaagaacagcccgtggaagaagtgatgccagtgttagaggaaaaggagcggtcagcctcatacaagccagtatttgtgaccgaaatcaccgacgacttgcacttttacgtccaggatgttgaaaccggcacacaactggaaaaactgatggagaacatgcgtaatgatatcgcatctcacccacctgttgagggatcctatgctccccgtcggggcgaattctgcatcgcaaaatttgtggacggggagtggtaccgcgctagagtggagaaggtggagtcccccgccaaaatccatgtgttctacatcgactatgggaacagagaggttttgccttctacaaggctgggaaccctgtcaccagctttctcaacacgcgtgctgcccgcacaggcaaccgaatacgcctttgcattcatccaggtccctcaagacgatgatgctcggactgacgcagttgacagtgtggtgagagatattcagaatacccagtgcctattgaatgtagaacacttaagcgcagggtgcccccatgtaaccctgcaatttgccgatagcaagggcgatgtaggcctgggtcttgtaaaggaagggttggtaatggttgaggtccgaaaagagaagcaattccagaaggtaatcaccgagtacctgaatgcccaggagtccgcgaaatcagcccggttgaatctgtggagatacggcgattttagagctgacgacgcagatgaattcggctattctcgatag

SEQ ID NO: 179810 - DNA, 2703 bp, Artificial Sequence
  derived and/or modified sequence
atggccagcagtgccgttcctactgtgcaacgggggattattaagatggtgctgagtgggtgtgccataatcgtgagagggcaacccagagggggaccgcccccagagcgccagattaatctgagcaatataagagcaggcaatctggcccgccgcgcagccgccacacagccggacgcaaaagatacacccgatgaaccatgggcatttcccgcccgtgagtttttgagaaaaaaattaattggcaaggaggtgtgtttcactatcgagaataagacacctcagggaagagaatatggaatgatctatctcgggaaagatacaaatggagagaatatagctgagtcacttgtggctgagggcctagctactagaagggaaggcatgcgagccaacaaccccgaacagaacaggttgtcagaatgtgaagaacaggctaaagcagccaagaaggggatgtggagcgaagggaatgggtcccacacgattcgggacctcaagtatactattgaaaaccctcggcactttgttgactcacatcatcagaaaccagtgaacgcaattatcgagcatgtgcgggatggcagtgtcgtgcgcgcgctcttgctgccggactattacctagtaacagttatgctgagcgggatcaagtgccccacttttcgccgcgaggccgacggtagtgagaccccggaacctttcgctgccgaggctaaattcttcaccgaaagtaggctcctccagcgcgacgttcagattatcttggagtcttgtcataatcagaacatcttaggaactattctgcaccccaatgggaacataacagaactgttgctgaaggagggatttgccaggtgtgttgattggtcgatcgccgtttacacccgcggggccgagaagctgagagcagccgagcggtttgccaaagaacgtagactccgcatttggagagattacgtcgcccctaccgctaatctcgatcaaaaagacaagcagttcgtggctaaagtgatgcaggtgctgaatgcagacgctatcgttgttaaactcaacagtggggactacaagacaattcatctcagctctattcggccaccccgtctggagggcgaaaacacacaggataagaataagaagctgcgccccctttacgatattccttatatgttcgaagcgagggaattcctgcgaaaaaagcttattggcaagaaggtgaacgtaaccgtcgactacatccgaccggcctcacccgcaactgaaactgttccagctttctctgagaggacatgcgccactgtgaccataggaggaataaacattgccgaagctctcgtctccaaaggtctagcaaccgtgattagatataggcaggatgatgaccagagatcatcccattatgacgagctgctggccgccgaggctcgggcaataaagaacggtaaaggcctgcactcaaagaaggaggtccctattcatagagtggctgacatcagcggcgacacacagaaggccaaacagttccttccgttcctgcagagagcaggcagaagcgaagccgttgtggagtacgtgttttctggatccaggttgaagctgtatttgcccaaagaaacttgtctgattacctttttgctggccggtattgagtgtcccaggggggctagaaacctccctggcctggtgcaggaaggtgagcccttttcagaggaggcaaccctctttacaaaggagcttgtacttcaacgggaggtggaagtcgaagtggagagcatggacaaagccggcaacttcatcgggtggctccatatcgacggtgcaaatctgtcggtgttattggtagagcatgcactcagcaaggtacattttaccgcggaaagatctagctactataagagcctgttgtctgccgaggaagcagcaaagcagaaaaaagaaaaagtttgggctcattatgaggagcagccagtcgaggaagtcatgccagtcctagaggagaaggaacggtcggcatcgtacaagccagtgttcgtgacggagatcaccgatgatctgcatttctatgtgcaagatgtcgaaacaggaactcagttggagaaacttatggaaaatatgcggaacgatatcgcctcacatcctcctgtggaggggagctacgcaccacggcggggggagttctgcatcgcaaaatttgttgacggggaatggtatcgggccagagttgaaaaagtcgagtcccctgcaaagattcatgtgttctatatagattacggaaaccgggaagtgctgcctagcactcgtctaggaacgctgtctcccgccttttccactcgcgttctgcctgcgcaggccacggaatatgcttttgcatttattcaggtgccgcaagacgatgatgcccgaacggatgccgtggatagcgtggtgcgggatatccagaacacccagtgcctcctgaacgtcgagcaccttagcgccggttgtccgcacgtgactctgcagttcgctgattcaaaaggagacgtcggactgggcctcgtcaaagaaggcttagtgatggtggaggttaggaaagagaagcagtttcagaaagttatcacagagtacctgaatgcccaggaatccgctaagagcgctcgcctcaatctttggcgatacggagattttcgggccgatgacgccgacgagttcggttactctcgatag

SEQ ID NO: 179811 - DNA, 2733 bp, Artificial Sequence
  derived and/or modified sequence
atggccagcagcgcccagagcggcggcagcagcggcggccctgctgtgcccaccgtgcagaggggcatcatcaagatggtgctgagcggctgtgccatcatcgtgcggggccagccccggggcggccccccacctgagcggcagatcaacctgagcaacatccgggccggcaacctggccaggagagctgctgccacccagccagatgccaaggacaccccagatgagccctgggccttccctgcccgggagttcctgaggaagaagctgattggcaaggaggtgtgcttcaccatcgagaacaagaccccccagggccgggagtatggcatgatctacctgggcaaggacaccaatggagaaaatattgctgagagcctggtggccgagggcctggccacccggcgggagggcatgagggccaacaaccctgagcagaaccggctgtctgaatgtgaggagcaggccaaggccgccaagaagggcatgtggagcgagggcaatggcagccacaccatccgggacctgaagtacaccatcgagaaccccaggcactttgtggacagccaccaccagaagcctgtgaatgccatcattgaacatgtgagagatggctctgtggtgcgggccctgctgctgcctgactactacctggtgacagtgatgctgagcggcatcaagtgccccaccttccggcgggaggctgatggcagcgagaccccagagccctttgctgctgaggccaagttcttcacagagagccggctgctgcagagagatgtgcagatcatcctggagagctgccacaaccagaacatcctgggcaccatcctgcaccccaatggaaacatcacagagctgctgctgaaggagggctttgcccgctgtgtggactggagcattgctgtgtacaccagaggagctgagaagctgcgggctgctgagagatttgccaaggagcggcggctgcgcatctggagggactatgtggcccccacagccaacctggaccagaaggacaagcagtttgtggccaaggtgatgcaggtgctgaatgctgatgccatcgtggtgaagctgaacagcggggactacaagaccatccacctgagcagcatccggcccccccggctggagggggagaacacccaggacaagaacaagaagctgcggcccctgtatgacatcccctacatgtttgaggcccgggagttcctgaggaagaagctgattggcaagaaggtgaatgtgacagtggactacatccggcctgccagccctgccacagaaacagtgcctgccttcagcgagaggacctgtgccaccgtgaccatcggcggcatcaacattgctgaggccctggtgtccaagggcctggccaccgtcatccgctaccggcaggatgatgaccagaggagcagccactatgatgagctgctggccgctgaggcccgggccatcaagaatggcaagggcctgcacagcaagaaggaggtgcccatccaccgggtggccgacatcagcggggacacccagaaggccaagcagttcctgcccttcctgcagagagctggccgctctgaggccgtggtggagtatgtgttcagcggcagccggctgaagctgtacctgcccaaggagacctgcctgatcaccttcctgctggccggcattgaatgtcccaggggggccaggaacctgcccggcctggtgcaggagggggagcccttcagcgaggaggccaccctcttcaccaaggagctggtgctgcagcgggaggtggaggtggaggtggagagcatggacaaggccggcaacttcatcggctggctgcacattgatggagccaacctgtctgtgctgctggtggagcacgccctgagcaaggtgcacttcaccgctgagaggagcagctactacaagagcctgctgtctgctgaggaggccgccaagcagaagaaggagaaggtgtgggcccactatgaggagcagcctgtggaggaggtgatgcctgtgctggaggagaaggagaggtctgccagctacaagcctgtgtttgtgacagagatcacagatgacctgcacttctacgtgcaggatgtggagaccggcacccagctggagaagctgatggagaacatgagaaatgacatcgccagccacccccctgtggagggcagctatgcccccaggagaggagagttctgcatcgccaagtttgtggatggagagtggtaccgggcccgggtggagaaggtggagagccctgccaagatccacgtgttctacatcgactatggcaaccgggaggtgctgcccagcacccggctgggcaccctgagccctgccttcagcaccagggtgctgcctgcccaggccacagaatatgcctttgccttcatccaggtgccccaggatgatgatgccaggacagatgctgtggacagcgtggtgcgggacatccagaacacccagtgcctgctgaatgtggagcacctgtctgctggctgcccccacgtgaccctgcagtttgctgacagcaaaggagatgtgggcctgggcctggtgaaggagggcctggtgatggtggaggtgaggaaggagaagcagttccagaaggtgatcacagagtacctgaatgcccaggagagcgccaagagcgcccggctgaacctgtggaggtatggagacttccgggcagatgatgctgatgaatttggctacagcaggtag

SEQ ID NO: 179812 - DNA, 2703 bp, Artificial Sequence
  derived and/or modified sequence
atggccagcagcgctgtgcccaccgtgcagaggggcatcatcaagatggtgctgagcggctgtgccatcatcgtgcggggccagccccggggcggccccccacctgagcggcagatcaacctgagcaacatccgggccggcaacctggccaggagagctgctgccacccagccagatgccaaggacaccccagatgagccctgggccttccctgcccgggagttcctgaggaagaagctgattggcaaggaggtgtgcttcaccatcgagaacaagaccccccagggccgggagtatggcatgatctacctgggcaaggacaccaatggagaaaatattgctgagagcctggtggccgagggcctggccacccggcgggagggcatgagggccaacaaccctgagcagaaccggctgtctgaatgtgaggagcaggccaaggccgccaagaagggcatgtggagcgagggcaatggcagccacaccatccgggacctgaagtacaccatcgagaaccccaggcactttgtggacagccaccaccagaagcctgtgaatgccatcattgaacatgtgagagatggctctgtggtgcgggccctgctgctgcctgactactacctggtgacagtgatgctgagcggcatcaagtgccccaccttccggcgggaggctgatggcagcgagaccccagagccctttgctgctgaggccaagttcttcacagagagccggctgctgcagagagatgtgcagatcatcctggagagctgccacaaccagaacatcctgggcaccatcctgcaccccaatggaaacatcacagagctgctgctgaaggagggctttgcccgctgtgtggactggagcattgctgtgtacaccagaggagctgagaagctgcgggctgctgagagatttgccaaggagcggcggctgcgcatctggagggactatgtggcccccacagccaacctggaccagaaggacaagcagtttgtggccaaggtgatgcaggtgctgaatgctgatgccatcgtggtgaagctgaacagcggggactacaagaccatccacctgagcagcatccggcccccccggctggagggggagaacacccaggacaagaacaagaagctgcggcccctgtatgacatcccctacatgtttgaggcccgggagttcctgaggaagaagctgattggcaagaaggtgaatgtgacagtggactacatccggcctgccagccctgccacagaaacagtgcctgccttcagcgagaggacctgtgccaccgtgaccatcggcggcatcaacattgctgaggccctggtgtccaagggcctggccaccgtcatccgctaccggcaggatgatgaccagaggagcagccactatgatgagctgctggccgctgaggcccgggccatcaagaatggcaagggcctgcacagcaagaaggaggtgcccatccaccgggtggccgacatcagcggggacacccagaaggccaagcagttcctgcccttcctgcagagagctggccgctctgaggccgtggtggagtatgtgttcagcggcagccggctgaagctgtacctgcccaaggagacctgcctgatcaccttcctgctggccggcattgaatgtcccaggggggccaggaacctgcccggcctggtgcaggagggggagcccttcagcgaggaggccaccctcttcaccaaggagctggtgctgcagcgggaggtggaggtggaggtggagagcatggacaaggccggcaacttcatcggctggctgcacattgatggagccaacctgtctgtgctgctggtggagcacgccctgagcaaggtgcacttcaccgctgagaggagcagctactacaagagcctgctgtctgctgaggaggccgccaagcagaagaaggagaaggtgtgggcccactatgaggagcagcctgtggaggaggtgatgcctgtgctggaggagaaggagaggtctgccagctacaagcctgtgtttgtgacagagatcacagatgacctgcacttctacgtgcaggatgtggagaccggcacccagctggagaagctgatggagaacatgagaaatgacatcgccagccacccccctgtggagggcagctatgcccccaggagaggagagttctgcatcgccaagtttgtggatggagagtggtaccgggcccgggtggagaaggtggagagccctgccaagatccacgtgttctacatcgactatggcaaccgggaggtgctgcccagcacccggctgggcaccctgagccctgccttcagcaccagggtgctgcctgcccaggccacagaatatgcctttgccttcatccaggtgccccaggatgatgatgccaggacagatgctgtggacagcgtggtgcgggacatccagaacacccagtgcctgctgaatgtggagcacctgtctgctggctgcccccacgtgaccctgcagtttgctgacagcaaaggagatgtgggcctgggcctggtgaaggagggcctggtgatggtggaggtgaggaaggagaagcagttccagaaggtgatcacagagtacctgaatgcccaggagagcgccaagagcgcccggctgaacctgtggaggtatggagacttccgggcagatgatgctgatgaatttggctacagcaggtag

SEQ ID NO: 179813 - DNA, 2733 bp, Artificial Sequence
  derived and/or modified sequence
atggccagcagcgcccagagcggcggcagcagcggcggccccgccgtgccgacggtgcagagagggattatcaaaatggtgttatcaggatgtgctattattgtccgcggacagccgcgaggggggcctccacctgaaaggcagattaacctaagcaatatcagggcaggaaatttagcccgacgcgccgccgccactcaaccagatgccaaagataccccagatgaaccatgggcctttcccgctagggaattcctccgtaagaaacttatcgggaaagaggtatgctttacaatagagaataagactcctcaaggaagagagtacggaatgatatatcttggaaaggacacaaatggagagaacattgcggaaagtcttgtggccgagggccttgcaacaaggagagagggaatgcgagccaataacccagagcagaataggctgtcagaatgtgaggaacaggcaaaggccgccaaaaagggcatgtggtccgagggcaatggaagtcataccatacgagatctgaagtacacaattgagaacccgcgtcatttcgtcgacagtcaccaccagaagcccgtgaatgcgattatcgagcacgtgcgtgacggttctgttgtccgcgctctgctgctcccagattactaccttgtgacagtgatgctcagcggcattaaatgccctacattccggcgggaagcagacggaagtgaaacacccgagccgtttgccgcggaggccaagttctttaccgaatcaagactcctccagagagacgtccaaataattcttgaatcttgccataaccaaaacatcctgggaaccatcctgcatccaaacgggaatattaccgagctgcttctcaaagaaggtttcgctaggtgtgtggactggtccatcgccgtttacaccagaggggctgagaagctgcgtgccgcagagcggtttgcaaaagaacgacgcctccgaatctggcgcgattatgtagctcccactgcgaacttggatcaaaaggacaaacaattcgtagcaaaggtgatgcaggtgttgaatgccgatgcaatcgtagtgaaattaaattccggtgattataaaactatacacctgagttccatcaggccccctcggctcgaaggagaaaatacacaggacaaaaataagaaactgcgtccattatatgatatcccatacatgttcgaagcgagagagttcctcaggaaaaaactgattggaaagaaagtgaatgttacagtggactacatcagacccgcctctccagccaccgaaacagtgcccgctttctctgagcgtacgtgcgcaactgttacaattgggggcattaacattgccgaggctctcgtgagcaagggtcttgccacggtgattcggtataggcaagatgatgaccagcgctcaagtcactacgacgaactgttggccgcagaagcgagagctatcaagaacggcaagggtctgcattctaaaaaggaggtcccgatccatagggtcgccgacataagcggcgacacccagaaagcaaagcagtttctgccttttcttcagagagccggaagaagcgaggctgtagtcgaatacgtattctctggttccagactcaagctctacttacccaaagagacgtgtctcattactttcctgctcgcggggattgagtgtccacggggcgcccgaaacctacccggtctggtacaggaaggcgaacccttctccgaggaagctaccctgtttactaaagagcttgttctgcagcgagaagtggaggtcgaggttgaaagcatggataaagcaggcaactttatcggctggctgcacatagatggcgccaacctgagcgtgctcctggtggagcacgccctgagtaaagtgcacttcactgctgaacgttcctcatactataagtctcttctatcagctgaagaggcggctaaacagaagaaggaaaaagtgtgggcccattacgaagaacagccggtggaggaggttatgcccgtgctggaggagaaggaaaggagcgcatcatataaacccgtttttgtgactgaaatcactgatgacctgcatttctatgtgcaggatgtggagacagggacccaactggagaagctgatggaaaacatgcggaatgatatcgccagccacccgcctgtggaaggttcttatgcaccacggcggggagaattctgcatagcaaagttcgtcgacggtgagtggtaccgagcccgcgtcgagaaagttgaatccccagcaaaaattcacgttttttacattgactacggtaaccgggaagtactgcctagcaccagactgggcacactcagccccgctttcagcacacgagtgctgcccgcccaagctactgaatatgcatttgctttcattcaggtcccacaggatgacgatgctcgtactgacgccgttgactcagtggtgagggacattcagaatactcagtgcctgcttaatgttgagcacctttctgccggatgtccacatgtgacattgcaattcgctgacagtaaaggtgacgttggcttggggcttgtgaaagaaggcctggtcatggtcgaagtccggaaggagaaacagttccagaaggtgattactgaatacctcaacgctcaggaaagcgctaaaagtgcacgcctgaacctttggagatacggagattttcgcgctgacgatgctgatgagtttggatactcacgctag

SEQ ID NO: 179814 - DNA, 2703 bp, Artificial Sequence
  derived and/or modified sequence
atggccagcagcgccgtgcccaccgtgcagcggggcatcatcaagatggtgctgtctggttgtgcaatcatcgtgcgagggcagccccgcggaggccctccacccgaaaggcaaatcaacctaagcaacatccgcgccggcaacctggccagacgcgctgccgccacccagcccgacgccaaggacacacctgacgagccatgggcctttccggctagagagttcttgaggaaaaaattgatcggcaaggaagtctgttttacaatagaaaacaagacaccccagggtagagagtatggtatgatctacctgggtaaggacaccaatggcgaaaacatagcagaatccctagtggctgagggactggccacacgcagggaagggatgagagccaataacccggaacaaaaccgcctttctgaatgtgaagagcaggctaaggctgccaagaaggggatgtggtccgaagggaacggatctcacaccattcgcgacctgaaatatacgatcgagaacccccgtcactttgtggactcccaccaccagaaaccggtcaatgctataattgagcacgtacgagacggaagcgtggttcgggcgcttctactgcccgactactatttggttacagtgatgctttcagggatcaaatgtcctaccttccggagggaggctgatggatccgaaactcccgagccgttcgccgccgaggccaagttttttactgaatctcgtctgctccaaagagatgttcaaatcatactggaaagctgccacaatcaaaatatccttgggactatcctgcaccccaatggcaacatcacagaacttctgttgaaagaggggtttgctcggtgtgtggattggagcatcgccgtctacacccgcggcgccgagaagctccgcgctgctgaaagattcgctaaggaaagacgtctaaggatatggagagactatgtcgcccctaccgctaacctcgaccagaaggacaagcagtttgttgcaaaggtaatgcaggtgttaaacgcggacgctatagtggtgaaactcaactcaggcgactataaaacaattcatctgtccagcatccgtcctccgagactggagggcgaaaatacccaagacaagaacaaaaaacttcgtccactttatgacatcccctatatgttcgaggctagagagttccttagaaaaaagctgattgggaaaaaagttaacgttactgtggattatatacggcccgccagccctgctactgagactgtgcccgccttttctgagcgcacatgtgctaccgtcactatcggcggaattaacatcgccgaagccttagtgtcaaaaggattggcaaccgtgattcgctaccggcaggacgacgaccaacgctctagtcactacgacgagttgcttgctgctgaggccagggctataaagaatggcaaggggctccatagcaaaaaggaggtgcctatccaccgggtggcggatatttcaggcgatacccaaaaagccaagcagtttctgccatttctgcaacgggccggtcggagcgaggcggttgtggagtatgttttctccggaagtagactgaaattatatctcccaaaagagacctgccttatcacattcctgctcgccggcatcgaatgtcctagaggcgcacggaaccttccgggactggtacaggaaggcgagcctttctctgaagaagctactctctttaccaaggagctggttctgcagcgggaggttgaagtggaagtggagagcatggataaagctggtaactttatcggttggctccatatagatggcgcaaatcttagtgtattacttgtggagcacgctctgagcaaagtgcacttcacagcagagaggagctcatactataaatcgttactctcagccgaggaggcagccaagcaaaaaaaggaaaaagtgtgggcccattatgaggaacagcctgtggaggaagtcatgccagtgcttgaggagaaagagaggtccgctagctataagccagtcttcgtgacagagataactgatgatctgcacttttatgtccaggacgttgagactgggacccagctcgagaaactcatggaaaatatgagaaacgacattgccagtcacccccccgtggagggcagctatgccccccgacgcggagagttctgcatcgcaaagtttgtcgacggggaatggtatcgggccagggtggagaaagtggagagccctgcaaagatccatgtgttctatatagattatggcaacagagaagtgctgccctcaacgaggctggggactctttctccagcattctccactagggtactgcctgcacaagccaccgagtacgcctttgctttcattcaggtgccccaggatgacgacgctagaacagatgctgtggattcagttgtgagagacatccagaacacacagtgtctgcttaatgttgagcatttgagcgccggatgcccacatgttaccctgcaatttgctgatagtaaaggcgacgttggactgggcttagtgaaagaaggcctcgtaatggttgaggtacggaaagagaaacagtttcagaaagtgattaccgaatacctcaatgctcaggaatctgccaagtccgcaagactgaatctgtggaggtatggtgatttccgggcagacgatgccgatgagttcggctattcccggtag

SEQ ID NO: 179815 - DNA, 2733 bp, Artificial Sequence
  derived and/or modified sequence
atggcaagttcggcgcagtccggtggatcctcgggtggacctgcggtcccaaccgttcaacggggtattattaaaatggtcctgtcaggatgcgccatcattgtgaggggtcagccacggggaggcccaccaccagaaagacagatcaatctatcaaacatcagggccggaaacctcgcacggcgagcagccgctacgcagccagacgctaaggacaccccagacgagccatgggccttccccgctagagagttcctcaggaagaaacttatcgggaaagaggtgtgcttcactattgagaacaagaccccccagggcagagagtacggaatgatctacttaggcaaggatacaaacggtgaaaacatcgcagagtcactcgtagccgagggcctcgcaacacggcgagaaggaatgcgggctaataatcctgagcaaaaccgcctctctgagtgtgaagagcaggcgaaagccgctaaaaagggcatgtggagcgagggcaatgggtcacatactatacgggatctcaagtacacgattgagaatccacgacactttgtggattcgcatcaccagaagccggtgaatgccatcatcgaacacgtccgcgacggatccgtggtgcgcgctctgctgctgcccgactactacctcgtcaccgtcatgttatctggaattaaatgccctacattccggcgagaggctgatggctctgaaactccagagccatttgccgcagaggccaaattttttaccgagagtagactgctgcaaagagacgtgcagatcatcctcgaatcgtgccataatcagaacatcttggggactatacttcatcctaacggaaacattaccgagcttttgctgaaggagggttttgccagatgtgtggactggagcattgccgtgtacacccgcggagctgagaagctccgagcggcagaaagatttgccaaggagagaagactgcgcatctggcgggattacgtcgcaccgactgctaacctcgaccagaaagataagcagtttgtcgccaaggtgatgcaggttcttaatgcagatgcaattgtggtgaaactgaactccggcgattacaaaacgatccatctgagctccatccgacctcccagattagaaggcgagaacacacaggacaagaacaaaaagcttcggcctctgtacgacataccatacatgttcgaagctagagagttcctcaggaagaagctgattggtaagaaggtcaacgtaacagttgattatattaggccggcatctccagcgacagaaacggttccagccttctctgagcgaacttgcgccacggtcactatcgggggaatcaatatcgcggaagcgcttgtgagtaagggccttgctactgtcatccggtaccgccaggatgatgatcagaggagtagccattacgatgagctgctggcagccgaggccagggctattaaaaatggaaaagggctccattccaagaaggaagttcctatccaccgcgtcgcagatatttccggagacacgcagaaggcaaaacagtttctgccctttttacaaagggcgggacggtccgaggcagtggtggagtacgtgttctcaggctctagacttaagctgtacctccctaaagagacctgcctgatcacttttctcctagctggcatagaatgtcccagaggtgcccgaaatctgccgggacttgttcaggaaggcgagcctttctcagaagaagccacactgttcactaaggagttagtgctgcaaagggaggtggaagtggaggtggagtcaatggataaagccggtaacttcattgggtggctgcatatagatggggcaaatctcagcgtcctcttagtcgagcatgccctatctaaagtccacttcacagcagagaggtcttcatactataaaagtcttttgagtgcggaggaggcagccaagcagaaaaaagagaaagtttgggctcactatgaggagcagcctgtggaggaggtgatgccagttctagaagagaaggagagatcagcatcttataaaccagtgttcgtaacggagatcactgatgatctccatttttacgttcaggatgtagagaccgggactcagctagagaaactaatggagaacatgaggaacgatatagctagccaccccccagtggaaggctcatacgctcctcgtagaggcgaattctgcattgcaaaattcgtggacggcgagtggtacagagccagggtggagaaggtggagtcgccagctaaaatccacgtgttttacatcgattatggtaaccgagaggttcttccgtcaacaaggctcggaaccctttcacctgccttctcgactcgggtcctgccagctcaggcaacagaatatgcctttgccttcatccaggttccacaggatgacgacgctagaaccgacgccgtcgattcagtagttagggatattcaaaatactcagtgcctcttgaatgtggagcatctgtccgccggatgtccccatgtgaccctgcagtttgccgattctaaaggggacgtgggactgggcttggttaaggaagggctcgtgatggtcgaagtgcggaaagaaaaacagttccagaaagtgataactgagtacctaaatgctcaggagagcgcgaagtcagccagactgaatttgtggagatacggagactttagagccgatgatgctgatgaattcggatattcccggtag

SEQ ID NO: 179816 - DNA, 2703 bp, Artificial Sequence
  derived and/or modified sequence
atggcatcatctgctgttcccaccgtgcagcgcggaattatcaagatggtcctaagcggttgtgccattatcgtccgcggacagccaagaggtggaccaccacctgagaggcagattaacctgtccaatatccgtgctggcaacctcgccaggcgagccgcagccacccagcccgatgcaaaggatactccagatgagccatgggcctttccagctagggagtttctgcgcaagaaactgattggcaaagaagtatgttttacaattgaaaacaagaccccccagggcagggaatacggcatgatctacttaggcaaggacacgaatggcgagaacatcgccgaatctctggtggccgaagggctcgcgacacggagggaaggaatgcgagctaacaacccggagcagaataggctgagtgagtgtgaggaacaggcaaaagccgctaagaagggaatgtggagcgaggggaacggctcacataccataagagacctaaagtataccattgagaatccaaggcactttgtggactcacaccaccagaagcctgtcaacgcaatcatcgaacacgtacgtgatggttctgtggtgcgggcactcctactgcctgactactacctcgtgaccgtgatgttgtctggcataaaatgcccaacatttagacgagaagctgacgggtcagaaaccccggaaccatttgctgccgaggcaaaattcttcaccgaaagtcgccttctccagcgggacgtccagatcatactggaatcttgtcacaaccagaatatcctgggcacgatcctgcatccaaatgggaatatcaccgagcttctgttaaaggaagggtttgctaggtgtgtggactggtccatagccgtgtacactagaggagccgagaaactccgagctgcagaacgattcgccaaggagagaaggctgcgcatctggcgcgattacgtggcacctaccgctaacctggaccagaaagataagcaattcgtggccaaggttatgcaggtgttgaacgcagacgctattgtagtgaaattaaattcaggcgattataaaaccatccacctctcatcaattcggcctcccaggttagagggcgaaaatacgcaagataaaaataagaagttacgtcccttatatgatatcccctatatgtttgaagcccgtgaattcttacgcaagaagctgattgggaagaaagtcaacgttacagtggattatattcggcctgctagtcctgccacggagaccgtgcctgcattctccgaaagaacttgcgctaccgttactattgggggaataaatattgcggaagccttggtaagcaagggcctcgctaccgttatccgataccgccaggatgatgatcaacgatcttcacactatgatgagctgctggccgctgaagccagagctatcaaaaatggtaaggggctccactcaaagaaggaagtgccgatccacagggttgcagatatctccggcgacacgcagaaagccaaacagtttctcccctttctacagagagcgggacgctccgaagccgtcgttgagtacgtgttctcaggaagcaggctgaaactgtacctgcccaaagagacatgcttgattaccttcttattggctgggatagaatgtcccagaggtgctcgcaatctgcccggacttgtgcaggaaggagagccttttagcgaggaagcaaccctctttacaaaagaattggttttgcagagggaggtggaggtcgaggtggagtcaatggataaggccggaaattttatcggctggctgcacatagacggggctaaccttagtgtgttgcttgttgaacacgccttgtctaaagtgcactttactgctgagagatcatcgtattacaagagtctcctaagcgccgaagaggccgctaagcagaaaaaagaaaaagtctgggctcattacgaggaacagccagtagaagaggtgatgcccgtcctcgaggagaaagagagaagtgctagttataagccagtgtttgtgactgagattactgatgatctgcacttttatgtacaggacgtcgaaacaggcacgcagctcgaaaaactcatggagaacatgagaaatgatatcgcctctcacccgcctgtcgaaggctcttatgccccaagacgcggtgagttctgcatcgccaagtttgtagatggggaatggtatagggccagagtagagaaggtagagtcccctgccaagatccatgtgttctatattgactacgggaatagggaggtactgccttccactagactcgggaccctttcccccgcttttagcaccagggttctgcccgctcaagcaaccgagtacgcctttgccttcatacaggtcccgcaggatgacgatgcacgaaccgacgccgttgatagcgtggttagagatattcagaacacgcagtgcctgttgaatgtagagcacttatctgctggttgccctcacgttactctgcagttcgcggactccaaaggcgatgtcggccttggactggtgaaagagggtctcgtcatggttgaggtaaggaaggaaaagcaatttcagaaagttattaccgagtatctgaatgcccaagagagcgccaaaagtgcaaggctgaacctgtggcggtacggagatttccgagcagacgatgcagacgaatttgggtacagtcgctag

SEQ ID NO: 179817 - DNA, 3476 bp, Artificial Sequence
  derived and/or modified sequence
ggcggagatcgcgtctctttcgctccgtgtcccgctgctgctcctgtgagcgcccggcgagtccgtcccgtccaccgtccgcagctggtagccagcctgcccctcgcctcgactccctttcaccaacaccgacacccacattgacacctccagtccggccagccgctccactcgttgcctttgcatctccacacatggcgtcctccgcgcagagcggcggctcctccgggggacccgcggtccccaccgtgcagcggggcatcatcaagatggtcctctcagggtgcgccatcattgtccgaggtcagcctcgtggtgggcctcctcctgagcggcagatcaacctcagcaacattcgtgctggaaatcttgctcgccgggcagccgccacacaacctgatgcaaaggatacccctgatgagccctgggcatttccagctcgagagttccttcgaaagaagctgattgggaaggaagtctgtttcacgatagaaaacaagactccccaggggcgagagtatggcatgatctaccttggaaaagataccaatggggaaaacattgcagaatcactggttgcagagggcttagccacccggagagaaggcatgagagctaataatcctgagcagaaccggctttcagaatgtgaagaacaagcaaaggcagccaagaaagggatgtggagtgaggggaacggttcacatactatccgggatctcaagtataccattgaaaacccaaggcactttgtggactcacaccaccagaagcctgttaatgctatcatcgagcatgtgcgggacggcagtgtggtcagggccctgctcctcccagattactacctggttacagtcatgctgtcaggcatcaagtgcccaacttttcgacgggaagcagatggcagtgaaactccagagccttttgctgcagaagccaaatttttcactgagtcgcgactgcttcagagagatgttcagatcattctggagagctgccacaaccagaacattctgggtaccatccttcatccaaatggcaacatcacagagctcctcctgaaggaaggtttcgcacgctgtgtggactggtcgattgcagtttacacccggggcgcagaaaagctgagggcggcagagaggtttgccaaagagcgcaggctgagaatatggagagactatgtggctcccacagctaatttggaccaaaaggacaagcagtttgttgccaaggtgatgcaggttctgaatgctgatgccattgttgtgaagctgaactcaggcgattacaagacgattcacctgtccagcatccgaccaccgaggctggagggggagaacacccaggataagaacaagaaactgcgtcccctgtatgacattccttacatgtttgaggcccgggaatttcttcgaaaaaagcttattgggaagaaggtcaatgtgacggtggactacattagaccagccagcccagccacagagacagtgcctgccttttcagagcgtacctgtgccactgtcaccattggaggaataaacattgctgaggctcttgtcagcaaaggtctagccacagtgatcagataccggcaggatgatgaccagagatcatcacactacgatgaactgcttgctgcagaggccagagctattaagaatggcaaaggattgcatagcaagaaggaagtgcctatccaccgtgttgcagatatatctggggatacccaaaaagcaaagcagttcctgccttttcttcagcgggcaggtcgttctgaagctgtggtggaatacgtcttcagtggttctcgtctcaaactctatttgccaaaggaaacttgccttatcaccttcttgcttgcaggcattgaatgccccagaggagcccgaaacctcccaggcttggtgcaggaaggagagcccttcagcgaggaagctacacttttcaccaaggaactggtgctgcagcgagaggtggaggtggaggtggagagcatggacaaggccggcaactttatcggctggctgcacatcgacggtgccaacctgtccgtcctgctggtggagcacgcgctctccaaggtccacttcaccgccgaacgcagctcctactacaagtccctgctgtctgccgaggaggccgcaaagcagaagaaagagaaggtctgggcccactatgaggagcagcccgtggaggaggtgatgccagtgctggaggagaaggagcgatctgctagctacaagcccgtgtttgtgactgagatcactgatgacctgcacttctacgtgcaggatgtggagaccggcacccagttggagaagctgatggagaacatgcgcaatgacattgccagtcacccccctgtagagggctcctatgccccccgcaggggagagttctgcattgccaaatttgtagatggagaatggtaccgtgcccgagtagagaaagtcgagtctcctgccaaaatacatgtcttctacattgactacggcaacagagaggtcctgccatccacccgcctgggtaccctatcacctgccttcagcactcgggtgctgccagctcaagccacggagtatgccttcgccttcatccaggtgccccaagatgatgatgcccgcacggacgccgtggacagcgtagttcgggatatccagaacactcagtgcctgctcaacgtggaacacctgagtgccggctgcccccatgtcaccctgcagtttgcagattccaagggcgatgtggggctgggcttggtgaaggaagggctggtcatggtggaggtgcgcaaggagaaacagttccagaaagtgatcacagaatacctgaatgcccaagagtcagccaagagcgccaggctgaacctgtggcgctatggagactttcgagctgatgatgcagacgaatttggctacagccgctaaggaggggatcgggtttggcccccagccccgctcacgccagtccctcttcctctgccgggagggtgttttcaactccaaaccccagagaggggttgtagattgggtccagctttgcttcagtgtgtggaaatgtctcgtggggtggcatcggggctgcggggtggggaccccaaggctttctggggcagacccttgtcctctgggatgatgggcactgctatccacagtctctgccagttggttttatttggaggtttgtgggctttttttaaaaaaaaaaagtcctcaaatcaggaagaaacatcaaagactatgtcctagtggagggagtaatcctaacacccaggctggccgccagctggcacctgcctctatcccagactgccctcgtcccagctctctgtccaactgttgattatgtgatttttctgatacgtccattctcaaatgccagtgtgttcacatcttcgctctggccagcccattctgtatttaaagcttttgaggcccaataaaatagtacgtgctgtctgcagcccttattgatca

SEQ ID NO: 179818 - DNA, 3429 bp, Artificial Sequence
  derived and/or modified sequence
tctctttcgctccgtgtcccgctgctgctcctgtgagcgcccggcgagtccgtcccgtccaccgtccgcagctggtagccagcctgcccctcgcctcgactccctttcaccaacaccgacacccacattgacacctccagtccggccagccgctccactcgttgcctttgcatctccacacatggcgtcctccgcggtccccaccgtgcagcggggcatcatcaagatggtcctctcagggtgcgccatcattgtccgaggtcagcctcgtggtgggcctcctcctgagcggcagatcaacctcagcaacattcgtgctggaaatcttgctcgccgggcagccgccacacaacctgatgcaaaggatacccctgatgagccctgggcatttccagctcgagagttccttcgaaagaagctgattgggaaggaagtctgtttcacgatagaaaacaagactccccaggggcgagagtatggcatgatctaccttggaaaagataccaatggggaaaacattgcagaatcactggttgcagagggcttagccacccggagagaaggcatgagagctaataatcctgagcagaaccggctttcagaatgtgaagaacaagcaaaggcagccaagaaagggatgtggagtgaggggaacggttcacatactatccgggatctcaagtataccattgaaaacccaaggcactttgtggactcacaccaccagaagcctgttaatgctatcatcgagcatgtgcgggacggcagtgtggtcagggccctgctcctcccagattactacctggttacagtcatgctgtcaggcatcaagtgcccaacttttcgacgggaagcagatggcagtgaaactccagagccttttgctgcagaagccaaatttttcactgagtcgcgactgcttcagagagatgttcagatcattctggagagctgccacaaccagaacattctgggtaccatccttcatccaaatggcaacatcacagagctcctcctgaaggaaggtttcgcacgctgtgtggactggtcgattgcagtttacacccggggcgcagaaaagctgagggcggcagagaggtttgccaaagagcgcaggctgagaatatggagagactatgtggctcccacagctaatttggaccaaaaggacaagcagtttgttgccaaggtgatgcaggttctgaatgctgatgccattgttgtgaagctgaactcaggcgattacaagacgattcacctgtccagcatccgaccaccgaggctggagggggagaacacccaggataagaacaagaaactgcgtcccctgtatgacattccttacatgtttgaggcccgggaatttcttcgaaaaaagcttattgggaagaaggtcaatgtgacggtggactacattagaccagccagcccagccacagagacagtgcctgccttttcagagcgtacctgtgccactgtcaccattggaggaataaacattgctgaggctcttgtcagcaaaggtctagccacagtgatcagataccggcaggatgatgaccagagatcatcacactacgatgaactgcttgctgcagaggccagagctattaagaatggcaaaggattgcatagcaagaaggaagtgcctatccaccgtgttgcagatatatctggggatacccaaaaagcaaagcagttcctgccttttcttcagcgggcaggtcgttctgaagctgtggtggaatacgtcttcagtggttctcgtctcaaactctatttgccaaaggaaacttgccttatcaccttcttgcttgcaggcattgaatgccccagaggagcccgaaacctcccaggcttggtgcaggaaggagagcccttcagcgaggaagctacacttttcaccaaggaactggtgctgcagcgagaggtggaggtggaggtggagagcatggacaaggccggcaactttatcggctggctgcacatcgacggtgccaacctgtccgtcctgctggtggagcacgcgctctccaaggtccacttcaccgccgaacgcagctcctactacaagtccctgctgtctgccgaggaggccgcaaagcagaagaaagagaaggtctgggcccactatgaggagcagcccgtggaggaggtgatgccagtgctggaggagaaggagcgatctgctagctacaagcccgtgtttgtgactgagatcactgatgacctgcacttctacgtgcaggatgtggagaccggcacccagttggagaagctgatggagaacatgcgcaatgacattgccagtcacccccctgtagagggctcctatgccccccgcaggggagagttctgcattgccaaatttgtagatggagaatggtaccgtgcccgagtagagaaagtcgagtctcctgccaaaatacatgtcttctacattgactacggcaacagagaggtcctgccatccacccgcctgggtaccctatcacctgccttcagcactcgggtgctgccagctcaagccacggagtatgccttcgccttcatccaggtgccccaagatgatgatgcccgcacggacgccgtggacagcgtagttcgggatatccagaacactcagtgcctgctcaacgtggaacacctgagtgccggctgcccccatgtcaccctgcagtttgcagattccaagggcgatgtggggctgggcttggtgaaggaagggctggtcatggtggaggtgcgcaaggagaaacagttccagaaagtgatcacagaatacctgaatgcccaagagtcagccaagagcgccaggctgaacctgtggcgctatggagactttcgagctgatgatgcagacgaatttggctacagccgctaaggaggggatcgggtttggcccccagccccgctcacgccagtccctcttcctctgccgggagggtgttttcaactccaaaccccagagaggggttgtagattgggtccagctttgcttcagtgtgtggaaatgtctcgtggggtggcatcggggctgcggggtggggaccccaaggctttctggggcagacccttgtcctctgggatgatgggcactgctatccacagtctctgccagttggttttatttggaggtttgtgggctttttttaaaaaaaaaaagtcctcaaatcaggaagaaacatcaaagactatgtcctagtggagggagtaatcctaacacccaggctggccgccagctggcacctgcctctatcccagactgccctcgtcccagctctctgtccaactgttgattatgtgatttttctgatacgtccattctcaaatgccagtgtgttcacatcttcgctctggccagcccattctgtatttaaagcttttgaggcccaataaaatagtacgtgctgtctgcagcccttattg

SEQ ID NO: 179819 - protein, 319 aa, Artificial Sequence
  derived and/or modified sequence
MMVLKVEELVTGKKNGNGEAGEFLPEDFRDGEYEAAVTLEKQEDLKTLLAHPVTLGEQQWKSEKQREAELKKKKLEQRSKLENLEDLEIIIQLKKRKKYRKTKVPVVKEPEPEIITEPVDVPTFLKAALENKLPVVEKFLSDKNNPDVCDEYKRTALHRACLEGHLAIVEKLMEAGAQIEFRDMLESTAIHWASRGGNLDVLKLLLNKGAKISARDKLLSTALHVAVRTGHYECAEHLIACEADLNAKDREGDTPLHDAVRLNRYKMIRLLIMYGADLNIKNCAGKTPMDLVLHWQNGTKAIFDSLRENSYKTSRIATF

SEQ ID NO: 179820 - DNA, 960 bp, Artificial Sequence
  derived and/or modified sequence
atgatggtgctgaaggtggaggagctggtgaccggcaagaagaacggcaacggcgaggccggcgagttcctgcccgaggacttcagagacggcgagtacgaggccgccgtgaccctggagaagcaggaggacctgaagaccctgctggcccaccccgtgaccctgggcgagcagcagtggaagagcgagaagcagagagaggccgagctgaagaagaagaagctggagcagagaagcaagctggagaacctggaggacctggagatcatcatccagctgaagaagagaaagaagtacagaaagaccaaggtgcccgtggtgaaggagcccgagcccgagatcatcaccgagcccgtggacgtgcccaccttcctgaaggccgccctggagaacaagctgcccgtggtggagaagttcctgagcgacaagaacaaccccgacgtgtgcgacgagtacaagagaaccgccctgcacagagcctgcctggagggccacctggccatcgtggagaagctgatggaggccggcgcccagatcgagttcagagacatgctggagagcaccgccatccactgggccagcagaggcggcaacctggacgtgctgaagctgctgctgaacaagggcgccaagatcagcgccagagacaagctgctgagcaccgccctgcacgtggccgtgagaaccggccactacgagtgcgccgagcacctgatcgcctgcgaggccgacctgaacgccaaggacagagagggcgacacccccctgcacgacgccgtgagactgaacagatacaagatgatcagactgctgatcatgtacggcgccgacctgaacatcaagaactgcgccggcaagacccccatggacctggtgctgcactggcagaacggcaccaaggccatcttcgacagcctgagagagaacagctacaagaccagcagaatcgccaccttctag

SEQ ID NO: 179821 - DNA, 960 bp, Artificial Sequence
  derived and/or modified sequence
atgatggtgctgaaggtagaggaacttgtgaccgggaagaagaacggaaacggggaagcgggagaatttctgccagaggattttagggatggggagtacgaagccgctgtcacgctcgaaaagcaggaggaccttaaaacacttttggcacatcccgtgactctgggggaacagcagtggaagagcgaaaaacagcgcgaggcagagcttaagaagaaaaagctcgaacaacgatcaaaactcgagaatctcgaagacctggaaattattattcagctgaaaaaaagaaaaaagtaccggaagacgaaggtacccgtcgtaaaagagccagagcccgagatcatcacggagcctgtcgacgtccctacttttctcaaagcggcactggagaacaagcttcctgtggtagagaaattcttatctgataaaaacaacccagacgtgtgtgacgaatacaaacgcacagcgctgcatcgcgcctgcctggagggccacctggccatcgtagagaaactgatggaagctggtgcccagatcgagttccgtgatatgcttgagagtaccgctatccattgggctagcagaggggggaacctcgacgtactcaagctgctccttaataaaggcgcaaagatcagtgctagggacaaactactgagcactgctcttcatgttgccgttcgaacaggtcattacgaatgtgccgagcaccttattgcttgcgaagcagacctcaacgctaaggaccgcgagggagacaccccactgcacgatgctgtgcgcctgaacagatataaaatgatccgcctactgatcatgtatggggctgacctcaacattaagaactgtgctggtaagacacctatggatctcgtgttgcactggcagaatgggaccaaggccatctttgattccttacgcgagaatagttataaaacttcccgcatcgctaccttctag

SEQ ID NO: 179822 - DNA, 1979 bp, Artificial Sequence
  derived and/or modified sequence
acatattcagcagggttagcttgtcctcccctccctcttcagcttcccagacactgagtctggaatgaaaattcacctgcctctgagttggctcctaatgggggtgggagtgttacttcggttcccaggttggaagattatctcacccggccccagctatataagctgaccggtgtggaggggcccagcagggccaactccagggattccttccacgacagaaaaacatacaagactccttcagccaacatgatggtactgaaagtagaggaactggtcactggaaagaagaatggcaatggggaggcaggggaattccttcctgaggatttcagagatggagagtatgaagctgctgttactttagagaagcaggaggatctgaagacacttctagcccaccctgtgaccctgggggagcaacagtggaaaagcgagaaacaacgagaggcagagctcaaaaagaaaaaactagaacaaagatcaaagcttgaaaatttagaagaccttgaaataatcattcaactgaagaaaaggaaaaaatacaggaaaactaaagttccagttgtaaaggaaccagaacctgaaatcattacggaacctgtggatgtgcctacgtttctgaaggctgctctggagaataaactgccagtagtagaaaaattcttgtcagacaagaacaatccagatgtttgtgatgagtataaacggacagctcttcatagagcatgcttggaaggacatttggcaattgtggagaagttaatggaagctggagcccagatcgaattccgtgatatgcttgaatccacagccatccactgggcaagccgtggaggaaacctggatgttttaaaattgttgctgaataaaggagcaaaaattagcgcccgagataagttgctcagcacagcgctgcatgtggcggtgaggactggccactatgagtgcgcggagcatcttatcgcctgtgaggcagacctcaacgccaaagacagagaaggagataccccgttgcatgatgcggtgagactgaaccgctataagatgatccgactcctgattatgtatggcgcggatctcaacatcaagaactgtgctgggaagacgccgatggatctggtgctacactggcagaatggaaccaaagcaatattcgacagcctcagagagaactcctacaagacctctcgcatagctacattctgaggcaaacgacagactcttaatcagtaaatgttcactggcattttgaaggcatggcccaagagaagagacactagccataaaatctagtttctatttatcaacgtgttgtgaagatgtacctaatgaagttttgagaaagcacagggttataggtgtttaaatttcctttagtgaaactcttatttatttttatgtattcctgtttatttatttactgccacgctactgatattcagaccttcatgatcatccatctggtgagcagagcttcatttgtatataacactttcagagccttcccacccataggtagttcttaaaccaggtgaaagagcaaagttcaagtgcctacttatgtgtcattcgctcatgtaagagtttttaagagagggctgattatcacagccctcttttctcctgaatttttaatgcagaagtttgaatgaagcaagggaaggcatgtagggacaggaaaggaaacaatggaaggaaagtgattctgtgaaaaggacagtgaagccagctattttacccccaggctggattttttttttttttttttttttttttttttaccgagtacacagagtacccaagtgaagagaacgtcatgagtgtaagtgcaaatcagtggaaggagcggcaaactgggacatgcagaattgaatttgctcaaaaaagatgaaaggaaatgcaaactgtaaatgtataaatgtatattgtattgtatgtacattttatattcataataaaggcaatcaaactctaaa

SEQ ID NO: 179823 - DNA, 960 bp, Artificial Sequence
  derived and/or modified sequence
atgatggtgctgaaggtggaggagctggtgacaggcaagaagaatggaaatggagaggccggggagttcctgcctgaggacttcagagatggagaatatgaagctgctgtgaccctggagaagcaggaggacctgaagaccctgctggcccaccctgtgaccctgggggagcagcagtggaagtctgagaagcagcgggaggccgagctgaagaagaagaagctggagcagaggagcaagctggagaacctggaggacctggagatcatcatccagctgaagaagaggaagaagtacaggaagaccaaggtgcctgtggtgaaggagcctgagcctgagatcatcacagagcctgtggatgtgcccaccttcctgaaggccgccctggagaacaagctgcctgtggtggagaagttcctgagtgacaagaacaacccagatgtgtgtgatgagtacaagaggacagccctgcaccgggcctgcctggagggccacctggccatcgtggagaagctgatggaggccggggcccagatcgagttccgggacatgctggagagcacagccatccactgggccagccggggcggcaacctggatgtgctgaagctgctgctgaacaagggggccaagatcagcgcccgggacaagctgctgagcacagccctgcacgtggccgtgaggacaggccactatgaatgtgccgagcacctgattgcctgtgaggccgacctgaatgccaaggaccgggagggggacacccccctgcatgatgctgtgcggctgaaccgctacaagatgatccggctgctgatcatgtacggggctgacctgaacatcaagaactgtgccggcaagacccccatggacctggtgctgcactggcagaatggcaccaaggccatctttgacagcctgcgggagaacagctacaagaccagccgcatcgccaccttctag

SEQ ID NO: 179824 - DNA, 960 bp, Artificial Sequence
  derived and/or modified sequence
atgatggtgctgaaggtggaggagctggtgaccggcaagaagaacgggaatggcgaggccggtgaatttctccccgaagactttagagatggagagtacgaggccgctgtcaccctggaaaaacaggaagacctgaagaccctactggctcatccagttacgttaggagaacagcagtggaaatctgagaagcagcgggaggctgaattgaagaaaaagaaattggaacagcgatccaagcttgagaatctggaggatctagagattattatccagttgaaaaaacggaagaaatatagaaaaacaaaagtgcccgtggtcaaagaaccagaaccagagatcatcaccgaaccagtggacgtgccaacctttctgaaagccgccctagagaataaactcccagtagtggagaagttcctgtctgataaaaacaaccccgatgtgtgtgatgagtataaacggacggccctccaccgcgcttgccttgagggccaccttgcaatcgtggaaaagctgatggaggcaggtgcccagatcgagttcagggacatgctggaaagtaccgcaattcactgggcaagcagaggcggaaatcttgacgtgctgaaacttcttctgaacaagggagcaaagatttccgctcgcgacaaactgttgtccacagcactccacgttgcagtgcggacaggacactatgaatgtgccgaacatctaatcgcttgtgaagcagatttgaatgccaaagatcgcgagggcgacacacctctgcatgatgctgtccgccttaacaggtacaagatgataagactgctcataatgtacggagccgacctgaatattaaaaactgtgctggcaagacacccatggatctggttttgcattggcaaaacggcacaaaagcaattttcgatagcctgcgcgaaaattcttacaagacctctaggattgcgactttctag

SEQ ID NO: 179825 - DNA, 960 bp, Artificial Sequence
  derived and/or modified sequence
atgatggtgctgaaggttgaggaattagttacagggaagaagaacggaaatggcgaagccggagaattcctccccgaggacttccgtgatggggaatatgaggcagctgttactctggaaaagcaggaggaccttaagaccctgctggcccacccagtgacacttggagaacaacaatggaagagtgagaaacaaagagaagccgaactgaaaaaaaagaagttggaacaaaggagcaagttggaaaatctcgaagacctggagatcatcatacagctgaaaaagaggaagaagtatagaaagactaaggtccctgtggttaaagagcctgagccagaaatcattactgaacccgtggacgtccctaccttcctgaaagcggcactagagaataagctaccagtcgttgaaaagttcctgtccgacaaaaacaatcccgatgtttgtgacgaatacaaacggacagccctccaccgagcatgcctcgaggggcacctggcaatcgtggaaaagcttatggaagctggagcacagattgagttcagagatatgctggagtccactgccattcactgggcatcacggggagggaacctggacgtgctaaaacttttgctaaacaaaggcgctaaaatatcagccagagataagctactctctacagccctgcatgtggccgtgcgaacaggtcactacgaatgcgcagagcacttaatcgcctgtgaggcagatcttaatgccaaagatagagagggggatacaccactgcacgacgctgtcaggctgaatcgctataagatgatacggctgttgatcatgtacggagcagacttgaacatcaagaattgcgcaggcaagaccccaatggacctcgtactgcattggcagaatggaactaaagctatctttgactctctgagggaaaactcatacaaaacttcgcgaatcgccaccttttag

SEQ ID NO: 179826 - protein, 325 aa, Artificial Sequence
  derived and/or modified sequence
MLAARLVCLRTLPSRVFHPAFTKASPVVKNSITKNQWLLTPSREYATKTRIGIRRGRTGQELKEAALEPSMEKIFKIDQMGRWFVAGGAIEKAVIWPQYVKDRIHSTYMYLAGSIGLTALSAIAISRTPVLMNFMMRGSWVTIGVTFAAMVGAGMLVRSIPYDQSPGPKHLAWLLHSGVMGAVVAPLTILGGPLLIRAAWYTAGIVGGLSTVAMCAPSEKFLNMGAPLGVGLGLVFVSSLGSMFLPPTTVAGATLYSVAMYGGLVLFSMFLLYDTQKVIKRAEVSPMYGVQKYDPINSMLSIYMDTLNIFMRVATMLATGGNRKK

SEQ ID NO: 179827 - protein, 345 aa, Artificial Sequence
  derived and/or modified sequence
MLAARLVCLRTLPSRVFHPAFTKASPVVKNSITKNQWLLTPSREYATKTRIGIRRGRTGQELKEAALEPSMEKIFKIDQMGRWFVAGGAAVGLGALCYYGLGLSNEIGAIEKAVIWPQYVKDRIHSTYMYLAGSIGLTALSAIAISRTPVLMNFMMRGSWVTIGVTFAAMVGAGMLVRSIPYDQSPGPKHLAWLLHSGVMGAVVAPLTILGGPLLIRAAWYTAGIVGGLSTVAMCAPSEKFLNMGAPLGVGLGLVFVSSLGSMFLPPTTVAGATLYSVAMYGGLVLFSMFLLYDTQKVIKRAEVSPMYGVQKYDPINSMLSIYMDTLNIFMRVATMLATGGNRKK

SEQ ID NO: 179828 - protein, 319 aa, Artificial Sequence
  derived and/or modified sequence
MLAARLVCLRTLPSRVFHPAFTKASPVVKNSITKNQWLLTPSREYATKTRIGIRRGRTGQELKEAALEPSMEKIFKIDQMGRWFVAGGAAVGLGALCYYGLGLSNEIGAIEKAVIWPQYVKDRIHSTYMYLAGSIGLTALSAIAISRTPVLMNFMMRGSWVTIGVTFAAMVGAGMLVRSIPYDQSPGPKHLAWLLHSGVMGAVVAPLTILGGPLLIRAAWYTAGIVGGLSTVAMCAPSEKFLNMGAPLGVGLGLVFVSSLGSMFLPPTTVAGATLYSVAMYGGLVLFSMFLLYDTQKVSSVQKYHQCMEFKNMIPLTRC

SEQ ID NO: 179829 - protein, 332 aa, Artificial Sequence
  derived and/or modified sequence
MLAARLVCLRTLPFVKNSITKNQWLLTPSREYATKTRIGIRRGRTGQELKEAALEPSMEKIFKIDQMGRWFVAGGAAVGLGALCYYGLGLSNEIGAIEKAVIWPQYVKDRIHSTYMYLAGSIGLTALSAIAISRTPVLMNFMMRGSWVTIGVTFAAMVGAGMLVRSIPYDQSPGPKHLAWLLHSGVMGAVVAPLTILGGPLLIRAAWYTAGIVGGLSTVAMCAPSEKFLNMGAPLGVGLGLVFVSSLGSMFLPPTTVAGATLYSVAMYGGLVLFSMFLLYDTQKVIKRAEVSPMYGVQKYDPINSMLSIYMDTLNIFMRVATMLATGGNRKK

SEQ ID NO: 179830 - DNA, 978 bp, Artificial Sequence
  derived and/or modified sequence
atgctggccgccagactggtgtgcctgagaaccctgcccagcagagtgttccaccccgccttcaccaaggccagccccgtggtgaagaacagcatcaccaagaaccagtggctgctgacccccagcagagagtacgccaccaagaccagaatcggcatcagaagaggcagaaccggccaggagctgaaggaggccgccctggagcccagcatggagaagatcttcaagatcgaccagatgggcagatggttcgtggccggcggcgccatcgagaaggccgtgatctggccccagtacgtgaaggacagaatccacagcacctacatgtacctggccggcagcatcggcctgaccgccctgagcgccatcgccatcagcagaacccccgtgctgatgaacttcatgatgagaggcagctgggtgaccatcggcgtgaccttcgccgccatggtgggcgccggcatgctggtgagaagcatcccctacgaccagagccccggccccaagcacctggcctggctgctgcacagcggcgtgatgggcgccgtggtggcccccctgaccatcctgggcggccccctgctgatcagagccgcctggtacaccgccggcatcgtgggcggcctgagcaccgtggccatgtgcgcccccagcgagaagttcctgaacatgggcgcccccctgggcgtgggcctgggcctggtgttcgtgagcagcctgggcagcatgttcctgccccccaccaccgtggccggcgccaccctgtacagcgtggccatgtacggcggcctggtgctgttcagcatgttcctgctgtacgacacccagaaggtgatcaagagagccgaggtgagccccatgtacggcgtgcagaagtacgaccccatcaacagcatgctgagcatctacatggacaccctgaacatcttcatgagagtggccaccatgctggccaccggcggcaacagaaagaagtag

SEQ ID NO: 179831 - DNA, 1038 bp, Artificial Sequence
  derived and/or modified sequence
atgctggccgccagactggtgtgcctgagaaccctgcccagcagagtgttccaccccgccttcaccaaggccagccccgtggtgaagaacagcatcaccaagaaccagtggctgctgacccccagcagagagtacgccaccaagaccagaatcggcatcagaagaggcagaaccggccaggagctgaaggaggccgccctggagcccagcatggagaagatcttcaagatcgaccagatgggcagatggttcgtggccggcggcgccgccgtgggcctgggcgccctgtgctactacggcctgggcctgagcaacgagatcggcgccatcgagaaggccgtgatctggccccagtacgtgaaggacagaatccacagcacctacatgtacctggccggcagcatcggcctgaccgccctgagcgccatcgccatcagcagaacccccgtgctgatgaacttcatgatgagaggcagctgggtgaccatcggcgtgaccttcgccgccatggtgggcgccggcatgctggtgagaagcatcccctacgaccagagccccggccccaagcacctggcctggctgctgcacagcggcgtgatgggcgccgtggtggcccccctgaccatcctgggcggccccctgctgatcagagccgcctggtacaccgccggcatcgtgggcggcctgagcaccgtggccatgtgcgcccccagcgagaagttcctgaacatgggcgcccccctgggcgtgggcctgggcctggtgttcgtgagcagcctgggcagcatgttcctgccccccaccaccgtggccggcgccaccctgtacagcgtggccatgtacggcggcctggtgctgttcagcatgttcctgctgtacgacacccagaaggtgatcaagagagccgaggtgagccccatgtacggcgtgcagaagtacgaccccatcaacagcatgctgagcatctacatggacaccctgaacatcttcatgagagtggccaccatgctggccaccggcggcaacagaaagaagtag

SEQ ID NO: 179832 - DNA, 960 bp, Artificial Sequence
  derived and/or modified sequence
atgctggccgccagactggtgtgcctgagaaccctgcccagcagagtgttccaccccgccttcaccaaggccagccccgtggtgaagaacagcatcaccaagaaccagtggctgctgacccccagcagagagtacgccaccaagaccagaatcggcatcagaagaggcagaaccggccaggagctgaaggaggccgccctggagcccagcatggagaagatcttcaagatcgaccagatgggcagatggttcgtggccggcggcgccgccgtgggcctgggcgccctgtgctactacggcctgggcctgagcaacgagatcggcgccatcgagaaggccgtgatctggccccagtacgtgaaggacagaatccacagcacctacatgtacctggccggcagcatcggcctgaccgccctgagcgccatcgccatcagcagaacccccgtgctgatgaacttcatgatgagaggcagctgggtgaccatcggcgtgaccttcgccgccatggtgggcgccggcatgctggtgagaagcatcccctacgaccagagccccggccccaagcacctggcctggctgctgcacagcggcgtgatgggcgccgtggtggcccccctgaccatcctgggcggccccctgctgatcagagccgcctggtacaccgccggcatcgtgggcggcctgagcaccgtggccatgtgcgcccccagcgagaagttcctgaacatgggcgcccccctgggcgtgggcctgggcctggtgttcgtgagcagcctgggcagcatgttcctgccccccaccaccgtggccggcgccaccctgtacagcgtggccatgtacggcggcctggtgctgttcagcatgttcctgctgtacgacacccagaaggtgagcagcgtgcagaagtaccaccagtgcatggagttcaagaacatgatccccctgaccagatgctag

SEQ ID NO: 179833 - DNA, 999 bp, Artificial Sequence
  derived and/or modified sequence
atgctggccgccagactggtgtgcctgagaaccctgcccttcgtgaagaacagcatcaccaagaaccagtggctgctgacccccagcagagagtacgccaccaagaccagaatcggcatcagaagaggcagaaccggccaggagctgaaggaggccgccctggagcccagcatggagaagatcttcaagatcgaccagatgggcagatggttcgtggccggcggcgccgccgtgggcctgggcgccctgtgctactacggcctgggcctgagcaacgagatcggcgccatcgagaaggccgtgatctggccccagtacgtgaaggacagaatccacagcacctacatgtacctggccggcagcatcggcctgaccgccctgagcgccatcgccatcagcagaacccccgtgctgatgaacttcatgatgagaggcagctgggtgaccatcggcgtgaccttcgccgccatggtgggcgccggcatgctggtgagaagcatcccctacgaccagagccccggccccaagcacctggcctggctgctgcacagcggcgtgatgggcgccgtggtggcccccctgaccatcctgggcggccccctgctgatcagagccgcctggtacaccgccggcatcgtgggcggcctgagcaccgtggccatgtgcgcccccagcgagaagttcctgaacatgggcgcccccctgggcgtgggcctgggcctggtgttcgtgagcagcctgggcagcatgttcctgccccccaccaccgtggccggcgccaccctgtacagcgtggccatgtacggcggcctggtgctgttcagcatgttcctgctgtacgacacccagaaggtgatcaagagagccgaggtgagccccatgtacggcgtgcagaagtacgaccccatcaacagcatgctgagcatctacatggacaccctgaacatcttcatgagagtggccaccatgctggccaccggcggcaacagaaagaagtag

SEQ ID NO: 179834 - DNA, 978 bp, Artificial Sequence
  derived and/or modified sequence
atgctcgccgcccgcctggtgtgtctaaggacccttccctcccgcgtgtttcatccagccttcactaaggcaagccctgtggtgaaaaacagtatcactaaaaatcagtggcttctaactccgtctagagaatatgctacgaagacacgaatcggcatcagacgcggtagaaccggccaggagcttaaagaggcagctctggagccttccatggaaaaaatatttaagattgatcagatggggcgctggtttgtcgccggtggcgctatagagaaagcggttatctggccacagtatgtaaaagaccggattcattcgacatatatgtacctcgccgggagcattggactgacagcactttcggcaatcgcgatcagccgcacacccgtcttgatgaactttatgatgagggggtcatgggtcacaattggagtgacattcgcggccatggtaggtgcaggcatgctggtcaggagtatcccttacgaccagagccccgggcctaagcatctggcctggcttctgcatagtggggtgatgggtgcggtggtagcaccacttacaatcctcggggggcccctgcttattcgggccgcctggtacacagccggtattgtgggagggctgtcaacggtggccatgtgcgcgccttcagaaaagttcctcaacatgggtgccccattaggcgtgggcctcggcttggtctttgtatcttccctcgggagcatgtttctcccccctactacagtggcgggcgcaacactgtattccgttgccatgtatggaggactcgttctcttttcgatgttcctgctgtacgatacgcagaaagtcatcaagagggccgaagtctctcccatgtacggcgtacagaaatacgaccccatcaactctatgttatccatatatatggacactctgaatattttcatgcgggtcgccaccatgctagcgaccggcggcaaccgtaaaaagtag

SEQ ID NO: 179835 - DNA, 1038 bp, Artificial Sequence
  derived and/or modified sequence
atgcttgctgctcggctcgtttgcttacggaccctgcctagtagagtgttccatcccgcctttactaaagcttctccagttgtcaaaaactccattacaaaaaatcaatggttgctaaccccttctagggagtacgctactaaaaccagaatagggataaggcggggcaggactggccaagagctgaaggaggcagcacttgagccgtctatggagaagatcttcaagatcgaccaaatgggaaggtggtttgtggccggtggagctgcagtggggttgggagctctgtgctattatggactgggacttagtaacgagattggcgctatcgagaaagccgtgatatggcctcagtatgtgaaagaccgcatccacagcacctacatgtacttagctggctcaatcggcttaaccgcactgagtgccatcgccatatctagaacgccagtcttgatgaacttcatgatgcggggctcctgggtgacaattggagtgacatttgccgcgatggtgggagcgggaatgttggtgcggagcatcccttacgatcagtcccccgggcccaaacaccttgcctggctgttgcacagcggcgtgatgggagcagttgttgcccccttgactattttgggaggcccattgctgattagggctgcctggtatacagcagggatcgtcggcggcttgtccacagtcgccatgtgcgccccttctgagaaattcctcaacatgggggccccgctcggcgttggcctgggcctggtgtttgtgtcctccctgggctccatgttcctgcctcccacaactgtggctggggcaaccttgtactcagtcgctatgtatggcgggctggtattattcagtatgttcctcctgtacgatacacagaaggtgatcaagcgggccgaagtctctcctatgtacggcgtgcagaagtacgatccaattaactccatgctgagtatctatatggacacgcttaacatattcatgcgagtggcaacaatgctcgctaccggtggcaataggaagaagtag

SEQ ID NO: 179836 - DNA, 960 bp, Artificial Sequence
  derived and/or modified sequence
atgctcgctgctaggctggtttgtctccggacgctcccgtctagagtgttccatcccgccttcaccaaggctagtccggttgtcaaaaattctatcacaaagaatcagtggctcctgaccccttccagagagtacgcaacgaaaaccaggatcggtattagaaggggcaggacaggccaggagctgaaggaagccgccctggaaccctctatggagaagatattcaagatcgaccagatgggtagatggtttgtcgctggaggcgctgccgtcgggctcggagcgctctgctactacggcctaggattatcgaacgagatcggagccattgagaaggctgtgatctggcctcagtacgtcaaggaccgaattcactccacttacatgtacttggctgggagtatcggcttaacagcgctgagtgcgatcgcgatcagtcgcacaccagtgttgatgaacttcatgatgcgggggagctgggttaccatcggcgtcactttcgcagcaatggtgggggcaggcatgctggtccgatctattccatacgaccaatcacctggcccaaagcatctggcctggctacttcatagcggtgttatgggtgccgtggtcgctcctctcaccatcctggggggaccactactgattcgtgccgcctggtatacggccgggattgtcggtggtctctccaccgtcgctatgtgcgccccaagcgagaagttcttgaatatgggcgcccccctcggggtggggctggggctcgtgttcgtatcatcattgggttcaatgttcttacctcctaccaccgtggctggggcaacactgtactcagttgccatgtacggaggcctggtgctgttcagcatgtttctgctctatgatacccagaaggtttcaagtgtgcaaaagtatcaccaatgcatggagttcaagaacatgataccactcacccgctgttag

SEQ ID NO: 179837 - DNA, 999 bp, Artificial Sequence
  derived and/or modified sequence
atgttagcggctagactggtgtgcctgcgaacgctgccttttgtaaagaattcaatcactaagaaccagtggctgctgactcccagccgcgaatacgctactaagacccggatcgggatacgaagagggcgaactggacaggagttaaaggaggctgctctcgagccaagcatggagaagatattcaagattgatcagatgggcagatggttcgtagccgggggggccgcagtgggccttggagccttatgctactacggccttggtctgtccaacgaaattggcgccattgaaaaggctgtgatctggcctcagtacgttaaggatcgaatccactcgacctacatgtatctggcagggtccatcggactaacagcgctgagcgcgatcgctattagccggacaccagttctgatgaattttatgatgcggggctcctgggtgactatcggcgtgacctttgctgccatggtgggcgccgggatgctagttagatcaattccgtatgaccaaagccccgggcctaaacatctggcttggctactgcatagtggtgtgatgggggccgtggtggccccccttactatcctgggagggcctctgctcatccgggcagcatggtacacagcaggcatcgttggggggttgtctaccgtggcgatgtgcgcgccttctgagaaatttttgaacatgggcgcccccctgggggtaggactgggtttggtgttcgtgtcgagcctggggtctatgttcttgccccccacaacagtggcaggcgctaccttatatagcgttgcgatgtacggcggcctcgtacttttctcaatgttcctgctgtacgatacacagaaagtcatcaagcgggccgaagtgagtccaatgtacggcgtacaaaaatacgatccaataaacagcatgctgagtatctatatggacaccctgaatatcttcatgcgcgttgctactatgctggccacgggcggaaatcggaagaagtag

SEQ ID NO: 179838 - DNA, 1878 bp, Artificial Sequence
  derived and/or modified sequence
gaagggaaactgcgaggcgaaggtgaccggggaccgagcatttcagatctgctcggtagacctggtgcaccaccaccatgttggctgcaaggctggtgtgtctccggacactaccttctagggttttccacccagctttcaccaaggcctcccctgttgtgaagaattccatcacgaagaatcaatggctgttaacacctagcagggaatatgccaccaaaacaagaattgggatccggcgtgggagaactggccaagaactcaaagaggcagcattggaaccatcgatggaaaaaatatttaaaattgatcagatgggaagatggtttgttgctggaggggctattgaaaaggctgtaatttggcctcagtatgtcaaggatagaattcattccacctatatgtacttagcagggagtattggtttaacagctttgtctgccatagcaatcagcagaacgcctgttctcatgaacttcatgatgagaggctcttgggtgacaattggtgtgacctttgcagccatggttggagctggaatgctggtacgatcaataccatatgaccagagcccaggcccaaagcatcttgcttggttgctacattctggtgtgatgggtgcagtggtggctcctctgacaatattagggggtcctcttctcatcagagctgcatggtacacagctggcattgtgggaggcctctccactgtggccatgtgtgcgcccagtgaaaagtttctgaacatgggtgcacccctgggagtgggcctgggtctcgtctttgtgtcctcattgggatctatgtttcttccacctaccaccgtggctggtgccactctttactcagtggcaatgtacggtggattagttcttttcagcatgttccttctgtatgatacccagaaagtaatcaagcgtgcagaagtatcaccaatgtatggagttcaaaaatatgatcccattaactcgatgctgagtatctacatggatacattaaatatatttatgcgagttgcaactatgctggcaactggaggcaacagaaagaaatgaagtgactcagcttctggcttctctgctacatcaaatatcttgtttaatggggcagatatgcattaaatagtttgtacaagcagctttcgttgaagtttagaagataagaaacatgtcatcatatttaaatgttccggtaatgtgatgcctcaggtctgcctttttttctggagaataaatgcagtaatcctctcccaaataagcacacacattttcaattctcatgtttgagtgattttaaaatgttttggtgaatgtgaaaactaaagtttgtgtcatgagaatgtaagtcttttttctactttaaaatttagtaggttcactgagtaactaaaatttagcaaacctgtgtttgcatatttttttggagtgcagaatattgtaattaatgtcataagtgatttggagctttggtaaagggaccagagagaaggagtcacctgcagtcttttgtttttttaaatacttagaacttagcacttgtgttattgattagtgaggagccagtaagaaacatctgggtatttggaaacaagtggtcattgttacattcatctgctgaacttaacaaaactgttcatcctgaaacaggcacaggtgatgcattctcctgctgttgcttctcagtgctctctttccaatatagatgtggtcatgtttgacttgtacagaatgttaatcatacagagaatccttgatggaattatatatgtgtgttttacttttgaatgttacaaaaggaaataactttaaaactattctcaagagaaaatattcaaagcatgaaatatgttgctttttccagaatacaaacagtatactc

SEQ ID NO: 179839 - DNA, 2128 bp, Artificial Sequence
  derived and/or modified sequence
ttttccgacagaggcctgcccgtgattggctgctcgtactatttacgtcctttcgatgttgcgtcatgcagtgcgccggaggaactgtgctctttgaggccgacgctaggggcccggaagggaaactgcgaggcgaaggtgaccggggaccgagcatttcagatctgctcggtagacctggtgcaccaccaccatgttggctgcaaggctggtgtgtctccggacactaccttctagggttttccacccagctttcaccaaggcctcccctgttgtgaagaattccatcacgaagaatcaatggctgttaacacctagcagggaatatgccaccaaaacaagaattgggatccggcgtgggagaactggccaagaactcaaagaggcagcattggaaccatcgatggaaaaaatatttaaaattgatcagatgggaagatggtttgttgctggaggggctgctgttggtcttggagcattgtgctactatggcttgggactgtctaatgagattggagctattgaaaaggctgtaatttggcctcagtatgtcaaggatagaattcattccacctatatgtacttagcagggagtattggtttaacagctttgtctgccatagcaatcagcagaacgcctgttctcatgaacttcatgatgagaggctcttgggtgacaattggtgtgacctttgcagccatggttggagctggaatgctggtacgatcaataccatatgaccagagcccaggcccaaagcatcttgcttggttgctacattctggtgtgatgggtgcagtggtggctcctctgacaatattagggggtcctcttctcatcagagctgcatggtacacagctggcattgtgggaggcctctccactgtggccatgtgtgcgcccagtgaaaagtttctgaacatgggtgcacccctgggagtgggcctgggtctcgtctttgtgtcctcattgggatctatgtttcttccacctaccaccgtggctggtgccactctttactcagtggcaatgtacggtggattagttcttttcagcatgttccttctgtatgatacccagaaagtaatcaagcgtgcagaagtatcaccaatgtatggagttcaaaaatatgatcccattaactcgatgctgagtatctacatggatacattaaatatatttatgcgagttgcaactatgctggcaactggaggcaacagaaagaaatgaagtgactcagcttctggcttctctgctacatcaaatatcttgtttaatggggcagatatgcattaaatagtttgtacaagcagctttcgttgaagtttagaagataagaaacatgtcatcatatttaaatgttccggtaatgtgatgcctcaggtctgcctttttttctggagaataaatgcagtaatcctctcccaaataagcacacacattttcaattctcatgtttgagtgattttaaaatgttttggtgaatgtgaaaactaaagtttgtgtcatgagaatgtaagtcttttttctactttaaaatttagtaggttcactgagtaactaaaatttagcaaacctgtgtttgcatatttttttggagtgcagaatattgtaattaatgtcataagtgatttggagctttggtaaagggaccagagagaaggagtcacctgcagtcttttgtttttttaaatacttagaacttagcacttgtgttattgattagtgaggagccagtaagaaacatctgggtatttggaaacaagtggtcattgttacattcatctgctgaacttaacaaaactgttcatcctgaaacaggcacaggtgatgcattctcctgctgttgcttctcagtgctctctttccaatatagatgtggtcatgtttgacttgtacagaatgttaatcatacagagaatccttgatggaattatatatgtgtgttttacttttgaatgttacaaaaggaaataactttaaaactattctcaagagaaaatattcaaagcatgaaatatgttgctttttccagaatacaaacagtatactcatgattgctaagtgtttttttatttttgcatatttattgaactgtctaattgaatacagcttgctcttgtcacc

SEQ ID NO: 179840 - DNA, 2375 bp, Artificial Sequence
  derived and/or modified sequence
gtcatgcagtgcgccggaggaactgtgctctttgaggccgacgctaggggcccggaagggaaactgcgaggcgaaggtgaccggggaccgagcatttcagatctgctcggtagacctggtgcaccaccaccatgttggctgcaaggctggtgtgtctccggacactaccttctagggttttccacccagctttcaccaaggcctcccctgttgtgaagaattccatcacgaagaatcaatggctgttaacacctagcagggaatatgccaccaaaacaagaattgggatccggcgtgggagaactggccaagaactcaaagaggcagcattggaaccatcgatggaaaaaatatttaaaattgatcagatgggaagatggtttgttgctggaggggctgctgttggtcttggagcattgtgctactatggcttgggactgtctaatgagattggagctattgaaaaggctgtaatttggcctcagtatgtcaaggatagaattcattccacctatatgtacttagcagggagtattggtttaacagctttgtctgccatagcaatcagcagaacgcctgttctcatgaacttcatgatgagaggctcttgggtgacaattggtgtgacctttgcagccatggttggagctggaatgctggtacgatcaataccatatgaccagagcccaggcccaaagcatcttgcttggttgctacattctggtgtgatgggtgcagtggtggctcctctgacaatattagggggtcctcttctcatcagagctgcatggtacacagctggcattgtgggaggcctctccactgtggccatgtgtgcgcccagtgaaaagtttctgaacatgggtgcacccctgggagtgggcctgggtctcgtctttgtgtcctcattgggatctatgtttcttccacctaccaccgtggctggtgccactctttactcagtggcaatgtacggtggattagttcttttcagcatgttccttctgtatgatacccagaaagtatcaagcgtgcagaagtatcaccaatgtatggagttcaaaaatatgatcccattaactcgatgctgagtatctacatggatacattaaatatatttatgcgagttgcaactatgctggcaactggaggcaacagaaagaaatgaagtgactcagcttctggcttctctgctacatcaaatatcttgtttaatggggcagatatgcattaaatagtttgtacaagcagctttcgttgaagtttagaagataagaaacatgtcatcatatttaaatgttccggtaatgtgatgcctcaggtctgcctttttttctggagaataaatgcagtaatcctctcccaaataagcacacacattttcaattctcatgtttgagtgattttaaaatgttttggtgaatgtgaaaactaaagtttgtgtcatgagaatgtaagtcttttttctactttaaaatttagtaggttcactgagtaactaaaatttagcaaacctgtgtttgcatatttttttggagtgcagaatattgtaattaatgtcataagtgatttggagctttggtaaagggaccagagagaaggagtcacctgcagtcttttgtttttttaaatacttagaacttagcacttgtgttattgattagtgaggagccagtaagaaacatctgggtatttggaaacaagtggtcattgttacattcatctgctgaacttaacaaaactgttcatcctgaaacaggcacaggtgatgcattctcctgctgttgcttctcagtgctctctttccaatatagatgtggtcatgtttgacttgtacagaatgttaatcatacagagaatccttgatggaattatatatgtgtgttttacttttgaatgttacaaaaggaaataactttaaaactattctcaagagaaaatattcaaagcatgaaatatgttgctttttccagaatacaaacagtatactcatgattgctaagtgtttttttatttttgcatatttattgaactgtctaattgaatacagcttgctcttgtcacctcttcaagctttcaagcctttatagaaaagcttctttgtggcttacactggaaattatgaaagcagtttttctcctaagacttttggtttctcgcattgcctctcagactaagcactaaaaagcaaagcaaaacagaactagttctgtcttaatgaaatatatcaacccaaaagtgtaatgaggaaaatgcttcattagtttcccctagcagacttttacttctcttacactgctacaccattactttcttgagacatttgtaagttctttgatacagaagagttatatttagaagtctttaatgaaggg

SEQ ID NO: 179841 - DNA, 1301 bp, Artificial Sequence
  derived and/or modified sequence
acgtcctttcgatgttgcgtcatgcagtgcgccggaggaactgtgctctttgaggccgacgctaggggcccggaagggaaactgcgaggcgaaggtgaccggggaccgagcatttcagatctgctcggtagacctggtgcaccaccaccatgttggctgcaaggctggtgtgtctccggacactaccttttgtgaagaattccatcacgaagaatcaatggctgttaacacctagcagggaatatgccaccaaaacaagaattgggatccggcgtgggagaactggccaagaactcaaagaggcagcattggaaccatcgatggaaaaaatatttaaaattgatcagatgggaagatggtttgttgctggaggggctgctgttggtcttggagcattgtgctactatggcttgggactgtctaatgagattggagctattgaaaaggctgtaatttggcctcagtatgtcaaggatagaattcattccacctatatgtacttagcagggagtattggtttaacagctttgtctgccatagcaatcagcagaacgcctgttctcatgaacttcatgatgagaggctcttgggtgacaattggtgtgacctttgcagccatggttggagctggaatgctggtacgatcaataccatatgaccagagcccaggcccaaagcatcttgcttggttgctacattctggtgtgatgggtgcagtggtggctcctctgacaatattagggggtcctcttctcatcagagctgcatggtacacagctggcattgtgggaggcctctccactgtggccatgtgtgcgcccagtgaaaagtttctgaacatgggtgcacccctgggagtgggcctgggtctcgtctttgtgtcctcattgggatctatgtttcttccacctaccaccgtggctggtgccactctttactcagtggcaatgtacggtggattagttcttttcagcatgttccttctgtatgatacccagaaagtaatcaagcgtgcagaagtatcaccaatgtatggagttcaaaaatatgatcccattaactcgatgctgagtatctacatggatacattaaatatatttatgcgagttgcaactatgctggcaactggaggcaacagaaagaaatgaagtgactcagcttctggcttctctgctacatcaaatatcttgtttaatggggcagatatgcattaaatagtttgtacaagcagctttcgttgaagtttagaagataagaaacatgtcatcatatttaaatgttccggtaatgtgatgcctcag

SEQ ID NO: 179842 - DNA, 978 bp, Artificial Sequence
  derived and/or modified sequence
atgctggccgcccggctggtgtgcctgcggaccctgcccagcagggtcttccacccagccttcaccaaggccagccctgtggtgaagaacagcatcaccaagaaccagtggctgctgacccccagccgggagtatgccaccaagaccagaattggcatccggcggggccgcacaggccaggagctgaaggaggccgccctggagcccagcatggagaagatcttcaagattgaccagatgggccgctggtttgtggccggcggggccatcgagaaggctgtgatctggccccagtatgtgaaggaccgcatccacagcacctacatgtacctggccggcagcatcggcctgacagccctgagcgccatcgccatcagcaggacccctgtgctgatgaacttcatgatgaggggctcctgggtgaccatcggcgtgacctttgctgccatggtgggcgccggcatgctggtgcgcagcatcccctatgaccagagccctggccccaagcacctggcctggctgctgcacagcggcgtgatgggcgctgtggtggcccccctgaccatcctgggcggccccctgctgatccgggccgcctggtacacagctggcatcgtgggcggcctgagcacagtggccatgtgtgcccccagcgagaagttcctgaacatgggcgcccccctgggcgtgggcctgggcctggtgtttgtgagcagcctgggctccatgttcctgccccccaccaccgtggccggggccaccctgtacagcgtggccatgtatggaggcctggtgctcttctccatgttcctgctgtatgacacccagaaggtgatcaagagagctgaggtgagccccatgtatggagtgcagaagtatgaccccatcaacagcatgctgagcatctacatggacaccctgaacatcttcatgagggtggccaccatgctggccactggaggcaacaggaagaagtag

SEQ ID NO: 179843 - DNA, 1038 bp, Artificial Sequence
  derived and/or modified sequence
atgctggccgcccggctggtgtgcctgcggaccctgcccagcagggtcttccacccagccttcaccaaggccagccctgtggtgaagaacagcatcaccaagaaccagtggctgctgacccccagccgggagtatgccaccaagaccagaattggcatccggcggggccgcacaggccaggagctgaaggaggccgccctggagcccagcatggagaagatcttcaagattgaccagatgggccgctggtttgtggccggcggcgctgctgtgggcctgggcgccctgtgctactacggcctgggcctgagcaatgaaattggagccatcgagaaggctgtgatctggccccagtatgtgaaggaccgcatccacagcacctacatgtacctggccggcagcatcggcctgacagccctgagcgccatcgccatcagcaggacccctgtgctgatgaacttcatgatgaggggctcctgggtgaccatcggcgtgacctttgctgccatggtgggcgccggcatgctggtgcgcagcatcccctatgaccagagccctggccccaagcacctggcctggctgctgcacagcggcgtgatgggcgctgtggtggcccccctgaccatcctgggcggccccctgctgatccgggccgcctggtacacagctggcatcgtgggcggcctgagcacagtggccatgtgtgcccccagcgagaagttcctgaacatgggcgcccccctgggcgtgggcctgggcctggtgtttgtgagcagcctgggctccatgttcctgccccccaccaccgtggccggggccaccctgtacagcgtggccatgtatggaggcctggtgctcttctccatgttcctgctgtatgacacccagaaggtgatcaagagagctgaggtgagccccatgtatggagtgcagaagtatgaccccatcaacagcatgctgagcatctacatggacaccctgaacatcttcatgagggtggccaccatgctggccactggaggcaacaggaagaagtag

SEQ ID NO: 179844 - DNA, 960 bp, Artificial Sequence
  derived and/or modified sequence
atgctggccgcccggctggtgtgcctgcggaccctgcccagcagggtcttccacccagccttcaccaaggccagccctgtggtgaagaacagcatcaccaagaaccagtggctgctgacccccagccgggagtatgccaccaagaccagaattggcatccggcggggccgcacaggccaggagctgaaggaggccgccctggagcccagcatggagaagatcttcaagattgaccagatgggccgctggtttgtggccggcggcgctgctgtgggcctgggcgccctgtgctactacggcctgggcctgagcaatgaaattggagccatcgagaaggctgtgatctggccccagtatgtgaaggaccgcatccacagcacctacatgtacctggccggcagcatcggcctgacagccctgagcgccatcgccatcagcaggacccctgtgctgatgaacttcatgatgaggggctcctgggtgaccatcggcgtgacctttgctgccatggtgggcgccggcatgctggtgcgcagcatcccctatgaccagagccctggccccaagcacctggcctggctgctgcacagcggcgtgatgggcgctgtggtggcccccctgaccatcctgggcggccccctgctgatccgggccgcctggtacacagctggcatcgtgggcggcctgagcacagtggccatgtgtgcccccagcgagaagttcctgaacatgggcgcccccctgggcgtgggcctgggcctggtgtttgtgagcagcctgggctccatgttcctgccccccaccaccgtggccggggccaccctgtacagcgtggccatgtatggaggcctggtgctcttctccatgttcctgctgtatgacacccagaaggtgtcctctgtgcagaagtaccaccagtgcatggagttcaagaacatgatccccctgacccgctgctag

SEQ ID NO: 179845 - DNA, 999 bp, Artificial Sequence
  derived and/or modified sequence
atgctggccgcccggctggtgtgcctgcggaccctgccctttgtgaagaacagcatcaccaagaaccagtggctgctgacccccagccgggagtatgccaccaagacccgcatcggcatcagaagaggccgcacaggccaggagctgaaggaggccgccctggagcccagcatggagaagatcttcaagattgaccagatgggccgctggtttgtggccggcggcgctgctgtgggcctgggcgccctgtgctactacggcctgggcctgagcaatgagatcggggccatcgagaaggccgtcatctggccccagtatgtgaaggaccgcatccacagcacctacatgtacctggccggcagcatcggcctgacagccctgagcgccatcgccatcagcaggacccctgtgctgatgaacttcatgatgaggggctcctgggtgaccatcggcgtgacctttgctgccatggtgggcgccggcatgctggtgcgcagcatcccctatgaccagagccctggccccaagcacctggcctggctgctgcacagcggcgtgatgggcgctgtggtggcccccctgaccatcctgggcggccccctgctgatccgggccgcctggtacacagctggcatcgtgggcggcctgagcacagtggccatgtgtgcccccagcgagaagttcctgaacatgggcgcccccctgggcgtgggcctgggcctggtgtttgtgagcagcctgggctccatgttcctgccccccaccaccgtggccggggccaccctgtacagcgtggccatgtatggaggcctggtgctcttctccatgttcctgctgtatgacacccagaaggtgatcaagagagctgaggtgagccccatgtatggagtgcagaagtatgaccccatcaacagcatgctgagcatctacatggacaccctgaacatcttcatgagggtggccaccatgctggccaccggcggcaacaggaagaagtag

SEQ ID NO: 179846 - DNA, 978 bp, Artificial Sequence
  derived and/or modified sequence
atgctggccgcccggctggtgtgcctgcggaccctgcccagccgggtgtttcaccctgctttcacgaaagccagcccagttgtaaagaacagtatcacaaaaaaccagtggctacttactcctagccgcgaatacgcaactaaaacaagaatcggaatccgacgggggcggacagggcaggaactgaaggaggcagctctggagccctccatggaaaagatattcaaaatcgaccagatggggcgctggttcgtggcaggtggtgccatagaaaaggctgtgatctggccacagtatgtcaaagaccgcattcactccacttatatgtacctggccggaagcattggattaactgcactttctgccattgcaatcagccggacacccgttttgatgaatttcatgatgagaggatcatgggtgactattggtgtgacgttcgccgccatggtgggagccggcatgctagtgcggtctatcccgtatgaccaatccccaggcccaaaacaccttgcttggttactgcacagcggcgttatgggcgctgtagtcgcccctctcacaatccttggcggacccttgcttatcagggctgcgtggtacacagctggtatcgtcggcggcctgtccacagtggccatgtgcgctccaagtgaaaagtttctcaatatgggagctcccctgggagtggggctggggctggtttttgtgtcaagcctggggtccatgttcctcccccctaccacagtggcaggggcaaccctgtacagcgtagctatgtacggcggcctggtactctttagtatgttcttgctgtacgacacccagaaggtcatcaaacgtgctgaggtgtcacccatgtatggggtgcagaaatatgacccaatcaattctatgctctccatttatatggacacattaaacatctttatgcgcgtggccacaatgcttgctaccggcgggaatcggaagaaatag

SEQ ID NO: 179847 - DNA, 1038 bp, Artificial Sequence
  derived and/or modified sequence
atgctggccgcccggctggtgtgcctgcggaccctgcccagccgggtctttcaccccgccttcaccaaggctagccctgttgtgaagaactccatcaccaagaatcagtggctgttgactccatctcgtgaatatgctaccaaaacccgtattgggattcggcggggccgtactgggcaagagttgaaggaggcggctctggagccttccatggagaaaatatttaaaatcgaccaaatgggccgctggtttgtggccggaggagccgctgtgggcctgggcgcgctctgctattatgggctgggtctgagtaacgaaatcggcgccatagagaaagccgtcatctggccgcaatacgtgaaggaccggatccacagtacttacatgtacctggccggaagtatcgggctgaccgctctgtcagctatcgctattagccgaacacccgtcctgatgaatttcatgatgagagggtcctgggtcaccatcggtgtgacttttgcggctatggtgggcgccggtatgttagttcgctctattccgtacgatcagagtcccgggcctaaacatctcgcatggctcctgcattccggggtcatgggcgctgtggtggctcctctgactattctgggtggacctctgctcatccgggctgcgtggtacaccgcaggaattgtaggcgggctgtcaaccgtggccatgtgtgctccttctgaaaagttcctgaatatgggcgctccccttggagtaggccttgggctcgtctttgtgagctctttaggctctatgtttctgccgccgactaccgtggcaggagctacactgtatagcgtggccatgtacggaggattagtgcttttcagcatgtttctcttgtatgacactcagaaggtgattaagagggccgaagtgtcgcctatgtacggagtgcagaagtacgaccccattaatagcatgctgagcatttatatggacaccctgaatatttttatgagggtcgcgactatgctggccactggtggaaatagaaaaaagtag

SEQ ID NO: 179848 - DNA, 960 bp, Artificial Sequence
  derived and/or modified sequence
atgctggccgcccggctggtgtgcctgcggaccctgcccagccgggtgttccacccagcttttaccaaggcctctccagtggttaagaattccataaccaagaaccagtggctgctgacaccatccagagaatatgcaactaagactaggataggcattagaaggggaaggacgggacaggaattgaaggaagccgccctggaaccgagtatggagaaaatcttcaaaattgatcagatgggtcgctggtttgttgcaggcggagccgccgtgggcctcggggccttgtgctattatggccttggcctgagtaatgagattggagccatagagaaggccgtcatttggcctcagtacgtgaaggaccggatacactctacctacatgtacctggcaggaagtatcggtctgaccgccctgtctgcaatcgccatctctaggacacctgttctgatgaattttatgatgaggggcagttgggtaacaatcggcgtaacttttgccgcgatggtaggtgccggtatgttagtcagatccataccttatgatcaatctcctgggcctaagcacctcgcgtggcttttacattctggagtcatgggtgctgtggtggcacctctgaccatcctgggcgggccgttgctgattcgggcggcctggtatacggcggggatcgtaggggggctctccactgtggccatgtgtgctcctagcgaaaagtttctgaatatgggagccccactaggagtgggactcggattggtttttgttagctccctcggcagcatgttcctgccacctacaaccgttgcgggagcaacgctatactctgtagcaatgtacggagggcttgtgcttttttctatgtttttgctttacgacacacaaaaagtgagctccgtgcagaagtaccaccagtgtatggaatttaagaatatgattcctctcacacggtgctag

SEQ ID NO: 179849 - DNA, 999 bp, Artificial Sequence
  derived and/or modified sequence
atgctggccgcccggctggtgtgcctgcggaccctgcccttcgtgaagaactctattacgaaaaatcagtggctgcttactccgtcacgagaatatgcaaccaaaacccgcattggaattaggcgggggcggactggacaggaactgaaggaagctgccctggagcctagtatggaaaagatctttaagatagaccagatgggcagatggttcgtcgctggaggtgcagcggtgggacttggagccctatgctactacggactggggttgtcaaatgaaataggggccatcgaaaaggctgtgatctggccccagtatgtcaaggatagaatccattctacctatatgtatctggctggtagcattggtctgactgcattgtctgcaatcgctatctcccgcacccccgtgctgatgaatttcatgatgagaggctcttgggtcaccataggtgtaacattcgctgccatggtaggcgctgggatgctggttaggtcgattccatatgaccagagccccgggccaaagcatctggcgtggctgctgcatagcggtgtgatgggggcggtggtggcaccacttactatcttaggaggtcctctcctgattagagcagcttggtatacagcaggtattgttggagggttgtcaacggtggctatgtgcgcacccagcgagaagtttcttaatatgggcgcccctttgggcgtggggctcggtctcgtcttcgtatcatcactggggtccatgtttctcccccctactaccgtcgcaggagccacattatattccgtggctatgtacgggggattagtgctattcagcatgttcctactgtatgacacccaaaaggtgataaagcgcgccgaggtgagtccaatgtacggcgtgcaaaagtatgaccccataaacagcatgctctccatttatatggatacactgaacatttttatgagggtggcgacaatgctcgccactggtggaaaccgaaagaagtag

SEQ ID NO: 179850 - DNA, 978 bp, Artificial Sequence
  derived and/or modified sequence
atgcttgcagcccgtttagtatgcttaaggactctgccgtctcgggtttttcaccctgcttttacgaaggcctcaccagtggtcaaaaacagcatcactaaaaaccagtggcttctgactccctctagagagtacgcgacaaaaaccaggatcgggattcgcagaggtcggaccgggcaagaactgaaggaagcggctttggaaccaagcatggaaaagatcttcaaaatcgaccagatggggaggtggtttgtggcgggaggcgctatagaaaaggccgtcatctggccccaatatgtgaaagaccgaattcacagcacctatatgtacctggccggaagcattggacttaccgcccttagcgctatcgctatctctcgcaccccagtcctgatgaattttatgatgcggggatcctgggtcacgatcggcgtaacatttgccgcaatggtgggggcaggaatgctggtgaggtctatcccttatgatcagtccccaggtccgaaacatctagcatggctattacatagcggggtgatgggcgcagtggtggcaccactgacgatcctgggaggaccactgctcattcgtgcagcttggtacaccgctgggattgttggaggactgtctacagtggcaatgtgtgcacccagcgaaaagttcttaaatatgggggcaccactgggggtaggactgggactggtgtttgtgtcatccttgggatctatgttccttcctccaacaaccgttgccggagccaccttatatagcgtggccatgtacgggggactggtgcttttctccatgtttcttctgtatgatacccaaaaagtgattaagagagccgaggtgtccccaatgtacggtgtacagaaatacgacccaattaacagcatgctgtcaatttacatggacaccctcaatatatttatgagagtggctacgatgcttgcgaccgggggaaaccggaaaaagtag

SEQ ID NO: 179851 - DNA, 1038 bp, Artificial Sequence
  derived and/or modified sequence
atgctcgctgcccgtctagtgtgcctgaggacgttgcctagtcgggtgttccacccagcttttactaaagcctcacccgtcgtcaaaaactctatcacaaagaaccagtggcttctgacccctagccgggagtatgccaccaagaccagaattgggatccgccgaggcagaacagggcaagaattgaaagaagcagcactggaaccttccatggaaaagatcttcaagatcgatcagatggggaggtggtttgttgctggcggagccgcagtcgggctgggcgcactgtgctattatggtttggggctgtccaatgaaattggagctattgagaaggctgtcatatggccacaatacgtaaaggacaggattcactcgacatacatgtaccttgccggatctattgggctcaccgctctctcggccattgccattagcagaacacctgttctcatgaatttcatgatgcgcggatcttgggttaccattggagtgaccttcgctgctatggttggcgctggcatgctggtgcgatcaatcccctacgatcagtctcctggtcctaaacacttagcttggcttctgcactctggcgtcatgggggctgtggtcgccccactaactattctgggaggaccgctgctcattagagccgcatggtatacggcaggaatagtcgggggactgtctaccgtggctatgtgtgccccatccgagaaatttctgaatatgggagctccacttggcgtgggcctggggctggtttttgtgagcagcttggggagtatgtttcttccgccaacgaccgtggcaggggcaacactttactccgttgctatgtacggcggtttagtcctgttttctatgttcctcctctatgatactcaaaaagtgattaaacgtgccgaagtgagcccaatgtatggcgtgcaaaagtatgatcctatcaacagtatgctgtctatttacatggataccctaaatatctttatgagagtcgcgacaatgctagccaccgggggaaaccggaaaaaatag

SEQ ID NO: 179852 - DNA, 960 bp, Artificial Sequence
  derived and/or modified sequence
atgctagctgccaggttggtctgcctgagaaccttgccgtctcgcgtgttccacccggcttttactaaggcttcccccgttgtcaaaaattccattacaaagaatcagtggctcctaactccatctagagagtacgcaacaaagacgaggattggcatcaggcgcggacgaaccggacaggagctaaaggaagccgcactggaacccagtatggaaaagattttcaagattgaccagatgggaagatggttcgtggcagggggagccgctgtcggactaggagccctgtgttattacggtttagggcttagtaatgagattggagcaattgagaaagccgtcatatggccgcagtatgtgaaggacaggatccacagtacttatatgtatcttgccggtagcatcggtctgaccgccctatcggctatcgctatcagcagaacaccagttctgatgaattttatgatgagaggctcttgggtgaccataggagttacgttcgccgcaatggtgggggctggcatgttggttaggtccatcccctacgatcagagtccagggcctaagcatctcgcctggctgctgcactcgggcgttatgggggcagtggttgccccactcacaatactgggtggcccactgctcatacgggctgcatggtacacggctggcatcgtgggaggcctctccacagttgcaatgtgcgcccctagtgagaaatttttgaatatgggcgcaccgctgggcgtcgggctgggcctcgttttcgtgagctcgctcggcagtatgttcttgccccctacaacggtagcaggagccacactctattctgtggccatgtatgggggactggtacttttcagcatgttcctgctttatgatacccagaaagtgtcctctgtgcagaagtaccaccaatgtatggagttcaaaaatatgattccccttactcggtgttag

SEQ ID NO: 179853 - DNA, 999 bp, Artificial Sequence
  derived and/or modified sequence
atgcttgccgctcgacttgtgtgcctgaggacccttccattcgtaaaaaactcgataacaaagaaccagtggcttctaacaccatcaagggagtacgcgacgaaaaccaggataggcattagaaggggtcggaccgggcaggaactgaaagaggcagcactggaacctagcatggagaagatcttcaagattgatcagatgggaaggtggtttgtggccggaggcgctgcagtaggactgggggcactgtgctattacggccttggattgagcaatgaaattggggcaattgagaaagctgtgatttggccacagtacgtaaaggatcgtattcattctacatatatgtatttagcgggaagcattggcctcactgcactgtctgccatagcgataagcagaaccccagttctgatgaactttatgatgcgcggtagttgggtgacaattggggtgacctttgccgcaatggttggtgcaggaatgctcgtccggtctatcccttatgatcagagccccggtcccaagcatttggcgtggttgcttcattcgggagtgatgggagcagtggtcgccccactgacgatcctgggaggcccactgctgatcagagctgcctggtataccgcagggatcgtaggcggactgtccaccgtggctatgtgtgcgcctagcgaaaagtttctcaatatgggcgcacccctgggcgtcggcctgggcctggttttcgtctcctccctcgggagtatgtttctgccgcctactacagtggctggggctactctatacagcgtcgctatgtacggaggtctggtgttgttctctatgtttctcctttatgacacccaaaaggtaataaaacgggctgaagtctccccaatgtatggggtccagaaatatgatccaattaactcgatgctgagcatctatatggacacattaaacatctttatgagagtagccaccatgctggccacaggcggaaacaggaagaaatag

SEQ ID NO: 179854 - protein, 209 aa, Artificial Sequence
  derived and/or modified sequence
MAEAEEQETGSLEESTDESEEEESEEEPKLKYERLSNGVTEILQKDAASCMTVHDKFLALGTHYGKVYLLDVQGNITQKFDVSPVKINQISLDESGEHMGVCSEDGKVQVFGLYSGEEFHETFDCPIKIIAVHPHFVRSSCKQFVTGGKKLLLFERSWMNRWKSAVLHEGEGNIRSVKWRGHLIAWANNMSKKPEAWRVAKKMKSYLNN

SEQ ID NO: 179855 - protein, 854 aa, Artificial Sequence
  derived and/or modified sequence
MAEAEEQETGSLEESTDESEEEESEEEPKLKYERLSNGVTEILQKDAASCMTVHDKFLALGTHYGKVYLLDVQGNITQKFDVSPVKINQISLDESGEHMGVCSEDGKVQVFGLYSGEEFHETFDCPIKIIAVHPHFVRSSCKQFVTGGKKLLLFERSWMNRWKSAVLHEGEGNIRSVKWRGHLIAWANNMGVKIFDIISKQRITNVPRDDISLRPDMYPCSLCWKDNVTLIIGWGTSVKVCSVKERHASEMRDLPSRYVEIVSQFETEFYISGLAPLCDQLVVLSYVKEISEKTEREYCARPRLDIIQPLSETCEEISSDALTVRGFQENECRDYHLEYSEGESLFYIVSPRDVVVAKERDQDDHIDWLLEKKKYEEALMAAEISQKNIKRHKILDIGLAYINHLVERGDYDIAARKCQKILGKNAALWEYEVYKFKEIGQLKAISPYLPRGDPVLKPLIYEMILHEFLESDYEGFATLIREWPGDLYNNSVIVQAVRDHLKKDSQNKTLLKTLAELYTYDKNYGNALEIYLTLRHKDVFQLIHKHNLFSSIKDKIVLLMDFDSEKAVDMLLDNEDKISIKKVVEELEDRPELQHVYLHKLFKRDHHKGQRYHEKQISLYAEYDRPNLLPFLRDSTHCPLEKALEICQQRNFVEETVYLLSRMGNSRSALKMIMEELHDVDKAIEFAKEQDDGELWEDLILYSIDKPPFITGLLNNIGTHVDPILLIHRIKEGMEIPNLRDSLVKILQDYNLQILLREGCKKILVADSLSLLKKMHRTQMKGVLVDEENICESCLSPILPSDAAKPFSVVVFHCRHMFHKECLPMPSMNSAAQFCNICSAKNRGPGSAILEMKK

SEQ ID NO: 179856 - DNA, 630 bp, Artificial Sequence
  derived and/or modified sequence
atggccgaggccgaggagcaggagaccggcagcctggaggagagcaccgacgagagcgaggaggaggagagcgaggaggagcccaagctgaagtacgagagactgagcaacggcgtgaccgagatcctgcagaaggacgccgccagctgcatgaccgtgcacgacaagttcctggccctgggcacccactacggcaaggtgtacctgctggacgtgcagggcaacatcacccagaagttcgacgtgagccccgtgaagatcaaccagatcagcctggacgagagcggcgagcacatgggcgtgtgcagcgaggacggcaaggtgcaggtgttcggcctgtacagcggcgaggagttccacgagaccttcgactgccccatcaagatcatcgccgtgcacccccacttcgtgagaagcagctgcaagcagttcgtgaccggcggcaagaagctgctgctgttcgagagaagctggatgaacagatggaagagcgccgtgctgcacgagggcgagggcaacatcagaagcgtgaagtggagaggccacctgatcgcctgggccaacaacatgagcaagaagcccgaggcctggagagtggccaagaagatgaagagctacctgaacaactag

SEQ ID NO: 179857 - DNA, 2565 bp, Artificial Sequence
  derived and/or modified sequence
atggccgaggccgaggagcaggagaccggcagcctggaggagagcaccgacgagagcgaggaggaggagagcgaggaggagcccaagctgaagtacgagagactgagcaacggcgtgaccgagatcctgcagaaggacgccgccagctgcatgaccgtgcacgacaagttcctggccctgggcacccactacggcaaggtgtacctgctggacgtgcagggcaacatcacccagaagttcgacgtgagccccgtgaagatcaaccagatcagcctggacgagagcggcgagcacatgggcgtgtgcagcgaggacggcaaggtgcaggtgttcggcctgtacagcggcgaggagttccacgagaccttcgactgccccatcaagatcatcgccgtgcacccccacttcgtgagaagcagctgcaagcagttcgtgaccggcggcaagaagctgctgctgttcgagagaagctggatgaacagatggaagagcgccgtgctgcacgagggcgagggcaacatcagaagcgtgaagtggagaggccacctgatcgcctgggccaacaacatgggcgtgaagatcttcgacatcatcagcaagcagagaatcaccaacgtgcccagagacgacatcagcctgagacccgacatgtacccctgcagcctgtgctggaaggacaacgtgaccctgatcatcggctggggcaccagcgtgaaggtgtgcagcgtgaaggagagacacgccagcgagatgagagacctgcccagcagatacgtggagatcgtgagccagttcgagaccgagttctacatcagcggcctggcccccctgtgcgaccagctggtggtgctgagctacgtgaaggagatcagcgagaagaccgagagagagtactgcgccagacccagactggacatcatccagcccctgagcgagacctgcgaggagatcagcagcgacgccctgaccgtgagaggcttccaggagaacgagtgcagagactaccacctggagtacagcgagggcgagagcctgttctacatcgtgagccccagagacgtggtggtggccaaggagagagaccaggacgaccacatcgactggctgctggagaagaagaagtacgaggaggccctgatggccgccgagatcagccagaagaacatcaagagacacaagatcctggacatcggcctggcctacatcaaccacctggtggagagaggcgactacgacatcgccgccagaaagtgccagaagatcctgggcaagaacgccgccctgtgggagtacgaggtgtacaagttcaaggagatcggccagctgaaggccatcagcccctacctgcccagaggcgaccccgtgctgaagcccctgatctacgagatgatcctgcacgagttcctggagagcgactacgagggcttcgccaccctgatcagagagtggcccggcgacctgtacaacaacagcgtgatcgtgcaggccgtgagagaccacctgaagaaggacagccagaacaagaccctgctgaagaccctggccgagctgtacacctacgacaagaactacggcaacgccctggagatctacctgaccctgagacacaaggacgtgttccagctgatccacaagcacaacctgttcagcagcatcaaggacaagatcgtgctgctgatggacttcgacagcgagaaggccgtggacatgctgctggacaacgaggacaagatcagcatcaagaaggtggtggaggagctggaggacagacccgagctgcagcacgtgtacctgcacaagctgttcaagagagaccaccacaagggccagagataccacgagaagcagatcagcctgtacgccgagtacgacagacccaacctgctgcccttcctgagagacagcacccactgccccctggagaaggccctggagatctgccagcagagaaacttcgtggaggagaccgtgtacctgctgagcagaatgggcaacagcagaagcgccctgaagatgatcatggaggagctgcacgacgtggacaaggccatcgagttcgccaaggagcaggacgacggcgagctgtgggaggacctgatcctgtacagcatcgacaagccccccttcatcaccggcctgctgaacaacatcggcacccacgtggaccccatcctgctgatccacagaatcaaggagggcatggagatccccaacctgagagacagcctggtgaagatcctgcaggactacaacctgcagatcctgctgagagagggctgcaagaagatcctggtggccgacagcctgagcctgctgaagaagatgcacagaacccagatgaagggcgtgctggtggacgaggagaacatctgcgagagctgcctgagccccatcctgcccagcgacgccgccaagcccttcagcgtggtggtgttccactgcagacacatgttccacaaggagtgcctgcccatgcccagcatgaacagcgccgcccagttctgcaacatctgcagcgccaagaacagaggccccggcagcgccatcctggagatgaagaagtag

SEQ ID NO: 179858 - DNA, 630 bp, Artificial Sequence
  derived and/or modified sequence
atggctgaagccgaagagcaggaaacgggatccctcgaggagtctactgacgagagcgaggaagaagagtccgaggaagaacccaaactgaaatacgaaagactctcgaacggggtgaccgagatccttcaaaaggacgcggcctcatgtatgaccgtacacgataagtttctcgcactgggcactcactatggtaaagtatatctccttgacgtgcagggaaatatcactcaaaaatttgatgtgtcaccagtaaaaatcaatcagattagtcttgatgaaagcggcgagcacatgggcgtttgttcagaggacggcaaggttcaggtatttggattgtactcgggcgaagagttccatgagacgttcgattgtcctattaagataattgccgtgcatccacactttgtgaggagctcatgtaagcaatttgtcactggggggaagaaactgctcctattcgagaggtcctggatgaacagatggaaatcggcagttttgcatgagggtgaggggaacatacgatctgtgaaatggcgtggccacttgatagcatgggctaacaacatgagcaagaagcccgaagcttggcgagtggctaagaagatgaagtcatatctaaacaactag

SEQ ID NO: 179859 - DNA, 2565 bp, Artificial Sequence
  derived and/or modified sequence
atggcagaggcggaggagcaggaaaccggtagtctggaggagagtacggacgagtcagaagaggaggaatccgaggaggagcctaagctgaaatatgagcgcttgagtaatggcgtgacagagatacttcagaaggatgctgcatcttgtatgacggtccatgataagttcctggcactcggcacacactatggcaaggtctacctattggacgtccagggcaacattacccaaaagttcgacgtatccccagtcaagataaatcagatttcgctagatgagtctggcgagcatatgggcgtctgctccgaggatggcaaggtgcaggtttttgggctctacagcggagaagaattccacgaaacattcgattgcccaataaagataatagccgtccatcctcacttcgtgcgcagcagctgcaaacagttcgttactggaggcaagaagctgctcctctttgagcgtagctggatgaaccgatggaaatccgccgtattgcatgagggggaaggcaatattcgatccgtaaaatggagaggacacctaattgcatgggccaacaatatgggggtcaagatattcgacattatttctaagcaacgaattaccaatgtccccagagatgacatctcccttcgtccagacatgtatccatgcagtctgtgttggaaagataatgtgacactaatcatagggtggggcacttcggtcaaggtgtgcagcgtgaaggagaggcatgcgagtgaaatgcgggatctcccatcacgttacgtagaaatcgttagccagttcgagacggaattctatatctctggccttgctccactctgtgatcagttggtggtgctctcatatgtcaaggaaatatctgagaaaacagagcgagagtattgcgcgagaccacgactagacattattcaaccgctctctgagacgtgcgaagaaatcagctccgatgccctgacagtgaggggattccaggaaaacgagtgccgcgattatcacctggaatacagcgaaggtgagagcctcttctacatcgtctcacctcgcgacgtggtggtcgcgaaggagagagaccaggacgatcacatagactggcttttagagaaaaagaaatatgaagaagcactgatggcagccgaaatctctcagaaaaacattaagaggcacaagatcctggatatcggcttggcctacattaaccatctcgttgaacgaggagactacgatatagctgctagaaagtgtcagaagatcctaggcaagaacgctgctctgtgggaatacgaggtatacaaatttaaggagatcggccagctcaaggctattagtccgtatctgcctcggggggatccagtcctgaaaccgttgatctatgaaatgattctccacgagtttctggaatccgattacgaaggcttcgccacgcttatcagggaatggcctggagacctgtataataattcagtgatagtccaagctgtccgggaccacctcaagaaggactctcagaataaaactctgcttaaaacccttgccgagctttatacctacgataagaactatggcaatgccctagagatttatctaacactccgacataaggacgtgttccagcttatccacaagcacaacttgttctcctctataaaagataagatcgtgctgctcatggatttcgactctgagaaggccgtggacatgctactggataacgaggataagattagtattaaaaaggtggtggaggagctggaggatcggcccgagttacagcacgtctacctgcacaaactgttcaagcgtgatcaccataaggggcagcgatatcacgaaaaacagattagcctctacgccgagtatgaccggcctaatctgctaccttttctgagggacagtactcattgtcccctggagaaggcactggagatctgtcaacagaggaacttcgtggaagaaaccgtgtacctactatcacgcatggggaactcaagatctgcactcaaaatgataatggaggaattacacgatgtcgacaaagcgatagaattcgcaaaggagcaggacgacggggaattgtgggaggacctgatcctttactctattgacaagcccccgtttattacaggccttctgaataacataggaacacacgtggaccctatcctcctcatccaccggattaaagaaggtatggagatcccgaacttacgggactctttagtaaaaatccttcaagattataacctgcagatactgttgcgggaaggttgtaagaagattctagtggccgactcccttagcttactcaagaaaatgcatcgaactcagatgaaaggcgtattagtggatgaagagaacatttgcgagagttgtttgtctcctatcctgccgtctgacgcagctaaaccattcagtgtggtggtatttcactgtcgacacatgtttcacaaggagtgtcttccgatgccctcaatgaattcggcagcccaattctgtaatatttgcagcgccaaaaacagaggacccggctcagccatacttgaaatgaagaagtag

SEQ ID NO: 179860 - DNA, 630 bp, Artificial Sequence
  derived and/or modified sequence
atggccgaggccgaggagcaggagaccggcagcctggaggagagcacagatgaaagtgaggaggaggagagcgaggaggagcccaagctgaagtatgaaaggctgagcaatggagtgacagagatcctgcagaaggatgctgccagctgcatgacagtgcatgacaagttcctggccctgggcacccactacggcaaggtgtacctgctggatgtgcagggcaacatcacccagaagtttgatgtgtcccctgtgaagatcaaccagatcagcctggatgaaagtggagagcacatgggcgtgtgcagtgaagatggcaaggtgcaggtgtttggcctgtacagcggggaggagttccacgagacctttgactgccccatcaagatcatcgctgtgcacccccactttgtgcgcagcagctgcaagcagtttgtgactggaggcaagaagctgctgctgtttgagaggtcctggatgaaccgctggaagtctgctgtgctgcacgagggggagggcaacatccgctctgtgaagtggaggggccacctgattgcctgggccaacaacatgagcaagaagccagaggcctggagggtggccaagaagatgaagagctacctgaacaactag

SEQ ID NO: 179861 - DNA, 2565 bp, Artificial Sequence
  derived and/or modified sequence
atggccgaggccgaggagcaggagaccggcagcctggaggagagcacagatgaaagtgaggaggaggagagcgaggaggagcccaagctgaagtatgaaaggctgagcaatggagtgacagagatcctgcagaaggatgctgccagctgcatgacagtgcatgacaagttcctggccctgggcacccactacggcaaggtgtacctgctggatgtgcagggcaacatcacccagaagtttgatgtgtcccctgtgaagatcaaccagatcagcctggatgaaagtggagagcacatgggcgtgtgcagtgaagatggcaaggtgcaggtgtttggcctgtacagcggggaggagttccacgagacctttgactgccccatcaagatcatcgctgtgcacccccactttgtgcgcagcagctgcaagcagtttgtgactggaggcaagaagctgctgctgtttgagaggtcctggatgaaccgctggaagtctgctgtgctgcacgagggggagggcaacatccgctctgtgaagtggaggggccacctgattgcctgggccaacaacatgggcgtgaagatctttgacatcatcagcaagcagaggatcaccaacgtgcccagagatgacatcagcctgcggccagacatgtacccctgcagcctgtgctggaaggacaacgtgaccctcatcatcggctggggcacctctgtgaaggtgtgcagcgtgaaggagagacatgccagcgagatgagggacctgcccagccgctacgtggagatcgtgtcccagtttgaaacagagttctacatcagcggcctggcccccctgtgtgaccagctggtggtgctgtcctatgtgaaggagatcagcgagaagacagagcgggagtactgtgcccggccccggctggacatcatccagcccctgtctgagacctgtgaggagatcagcagtgatgccctgactgtgcggggcttccaggagaatgaatgtcgggactaccacctggagtacagcgagggggagagcctcttctacatcgtgagccccagagatgtggtggtggccaaggagcgggaccaggatgaccacatcgactggctgctggagaagaagaagtatgaggaggccctgatggctgctgagatcagccagaagaacatcaagaggcacaagatcctggacatcggcctggcctacatcaaccacctggtggagcggggggactatgacattgctgccaggaagtgccagaagatcctgggcaagaatgctgccctgtgggagtatgaggtgtacaagttcaaggagatcggccagctgaaggccatcagcccctacctgcccaggggggaccctgtgctgaagcccctcatctatgagatgatcctgcacgagttcctggagagtgactatgagggctttgccaccctcatccgggagtggccaggggacctgtacaacaacagcgtgattgtgcaggccgtgcgggaccacctgaagaaggacagccagaacaagaccctgctgaagaccctggccgagctgtacacctatgacaagaactatggaaatgccctggagatctacctgaccctgcggcacaaggatgtgttccagctgatccacaagcacaacctcttcagcagcatcaaggacaagatcgtgctgctgatggactttgacagcgagaaggctgtggacatgctgctggacaatgaagacaagatcagcatcaagaaggtggtggaggagctggaggacaggcctgagctgcagcacgtgtacctgcacaagctgttcaagagggaccaccacaagggccagcgctaccacgagaagcagatcagcctgtatgcagaatatgaccggcccaacctgctgcccttcctgcgggacagcacccactgccccctggagaaggccctggagatctgccagcagaggaactttgtggaggagaccgtgtacctgctgagcaggatgggcaacagccgcagcgccctgaagatgatcatggaggagctgcatgatgtggacaaggccatcgagtttgccaaggagcaggatgatggagagctgtgggaggacctgatcctgtacagcattgacaagccacccttcatcaccggcctgctgaacaacatcggcacccacgtggaccccatcctgctgatccaccgcatcaaggagggcatggagatccccaacctgcgggacagcctggtgaagatcctgcaggactacaacctgcagatcctgctgcgggagggctgcaagaagatcctggtggccgacagcctgagcctgctgaagaagatgcacaggacccagatgaagggcgtgctggtggatgaggagaacatctgtgagagctgcctgagccccatcctgcccagtgatgctgccaagcccttctctgtggtggtgttccactgccgccacatgttccacaaggaatgtctgcccatgcccagcatgaacagcgctgcccagttctgcaacatctgcagcgccaagaacagaggccctggcagcgccatcctggagatgaagaagtag

SEQ ID NO: 179862 - DNA, 630 bp, Artificial Sequence
  derived and/or modified sequence
atggccgaggccgaggagcaggagaccggcagcctggaggagagcaccgatgagtcagaagaagaagagtcagaggaagaacctaagttgaagtatgaacgcctgtctaacggcgttacagagatccttcagaaagatgccgcttcatgcatgactgtgcacgataagtttctggctctgggcacacattatgggaaggtgtatctgctcgacgtccaaggaaacatcacacagaaattcgatgtgagtcctgtcaagattaatcagatctcactggacgagtctggagaacacatgggagtttgctcagaggacggcaaggttcaggtgttcggattgtactccggcgaggagttccacgagacgttcgactgtcctattaagatcatagccgtccatccccatttcgtgcgttcttcttgcaagcagtttgtaaccggaggcaaaaaactgctactgtttgagagaagttggatgaaccggtggaagtcggcggtcctacacgaaggagaagggaatattcgctccgtaaaatggcgaggccacttaatcgcttgggctaataacatgagcaagaaaccggaagcctggcgagtggcgaagaaaatgaaatcctatctgaataattag

SEQ ID NO: 179863 - DNA, 2565 bp, Artificial Sequence
  derived and/or modified sequence
atggccgaggccgaggagcaggagaccggcagcctggaggagagcaccgacgagtcagaagaggaggagagcgaggaggaaccaaaactcaaatatgagcggttgagtaacggcgttactgaaatcttgcagaaggatgcagcctcttgcatgaccgtgcatgacaaattcttggctttggggacccattacgggaaggtatacctgctcgacgtgcaaggaaatatcacccaaaaattcgatgtgagtcccgtgaaaatcaatcaaatttcactggacgaatccggtgagcacatgggcgtgtgtagcgaggacggaaaagttcaggtgtttggcctttatagtggggaagagttccacgagacattcgattgccccattaaaatcattgcagttcacccccacttcgtcaggtcaagctgcaagcagttcgtgacaggtggcaagaaactacttctattcgaaagatcgtggatgaatagatggaaatcggccgtcctgcacgagggagaaggcaatattagatccgtgaagtggcggggccacctaattgcctgggccaacaacatgggcgttaagatcttcgatattatttcaaaacagcgcatcaccaacgtacccagagatgatatttcattgcgccccgacatgtacccctgtagcctgtgctggaaggataatgtaacactcattattggctggggaacctccgtcaaggtttgctcagtgaaagaaaggcacgccagcgagatgcgggacctgccaagcagatacgtggagattgtaagccagttcgagactgagttctacatatccggactggcccctctgtgtgatcagcttgttgtgctgtcttatgttaaggaaatctctgagaaaactgagagggagtattgcgcgcgcccgcggcttgacattatccaacccctatccgagacctgtgaagaaatctccagtgacgccttaacggttcgtgggttccaagagaacgagtgtagggattaccacttggagtactcggaaggcgaaagtttattttacatcgtgtctccccgggatgtggttgttgctaaagagagagaccaggacgatcacattgactggctgcttgaaaagaagaaatacgaagaggccctgatggcagcagagatttcccagaaaaacataaagcggcataaaatcttggacatcgggctggcctacattaaccatctggttgaaaggggagactacgatattgctgctaggaagtgccagaaaatactgggcaagaacgcagcattatgggaatatgaagtgtataaattcaaggaaatcggtcagctgaaggctataagtccctacctcccaagaggagaccccgttctaaagcccctgatatacgaaatgatcctccacgagtttttagagtctgactacgagggcttcgccacgcttattcgagaatggcccggggacctgtataacaattccgtaatcgtacaagctgtcagagatcatctcaaaaaggattcgcagaacaaaactctgctcaaaacccttgctgaattgtatacctacgataaaaattacgggaatgccctggagatttatctcacacttcggcacaaggatgtgttccagctgatccacaagcacaacctattctcgagcataaaggacaaaattgtgctgctgatggacttcgactctgagaaagcagtggacatgctcctcgataatgaagataagataagcatcaaaaaggtggttgaagagctcgaggataggccagaactccagcatgtgtacttacacaagctgttcaagcgggatcatcataagggtcagaggtatcatgagaagcagatcagcctctacgccgaatacgatcgacctaatctgttgccctttctgagagactcaacacactgccccctagaaaaggcactagagatttgtcagcagcggaatttcgtggaggaaaccgtctatcttttatcccgtatgggcaattcaagaagtgcactcaagatgattatggaagagttgcatgacgtagacaaagctattgagtttgcaaaggagcaggacgatggagagctctgggaggatttgatactttatagcatcgacaaacctccctttatcacaggtcttctaaataatatagggacgcacgtcgatcctattctcctgatccaccgcattaaggagggaatggagattcctaacttgagggactccctggttaaaattctgcaggactacaacctgcagatactgctgagggaaggttgtaagaaaatattggtcgcggattccctgtccctgctgaagaagatgcatcgaacacagatgaaaggagtgttggtggatgaggaaaacatctgcgagtcctgcctctcacctattctcccttcagatgcggcaaagcccttttcagtcgtcgtatttcattgtagacacatgttccacaaagagtgtctgccaatgccatcgatgaattccgctgctcagttctgcaatatctgtagtgctaaaaatcgtggacccgggagcgctatcctggaaatgaagaagtag

SEQ ID NO: 179864 - DNA, 630 bp, Artificial Sequence
  derived and/or modified sequence
atggctgaggcagaagaacaggaaaccgggtcattagaagaatccaccgacgagtccgaggaagaggagagcgaggaggagcctaaactgaagtacgagcgcttgtccaatggggtcacggagattctgcagaaggacgctgctagctgtatgactgtgcacgataaattcctcgcgctcggtactcattacggcaaagtatacctgctagatgtccaaggcaatattacacagaagtttgatgtatcgcccgttaaaatcaaccagatttcgcttgacgagtcaggagagcatatgggcgtgtgtagtgaggatgggaaagttcaggtgtttggtctctacagcggagaggagttccacgagacttttgattgccctatcaaaatcattgctgtgcatcctcatttcgtgaggtcatcctgtaagcagttcgtgacaggtgggaaaaagctgttgctgtttgagcggagttggatgaaccggtggaagtccgcggtccttcacgagggcgaaggcaatatcagatccgtgaaatggagagggcatttgatcgcttgggccaacaacatgagtaagaagcccgaagcatggcgagtcgcgaaaaagatgaagtcatacctcaataactag

SEQ ID NO: 179865 - DNA, 2565 bp, Artificial Sequence
  derived and/or modified sequence
atggctgaggcagaagaacaggagacgggtagccttgaagaaagcacagatgaaagtgaggaggaggagtccgaggaggagccaaagctgaaatacgagcgattgtctaacggcgtgaccgagatccttcaaaaagacgctgcctcctgcatgaccgtccatgacaagtttcttgcactcgggactcactacggtaaggtttatcttttggacgtgcaggggaacataactcagaagttcgatgtatctcccgtcaaaatcaaccaaattagcctggacgagtctggagaacatatgggagtgtgctccgaggatggcaaggtgcaggtattcggcttgtactctggcgaagagtttcacgagacatttgactgtcctatcaaaataattgcggtgcaccctcactttgttaggagttcctgcaaacaatttgtgacaggaggtaagaaattgctgctgttcgagaggtcttggatgaataggtggaagagtgccgtgcttcatgaaggtgaaggaaacataagatccgtcaagtggcgcggacacctgattgcttgggccaataacatgggggttaaaatcttcgatattataagcaagcagcgcataacaaacgtgcccagagatgatatcagcctgaggcccgatatgtatccctgttctctgtgctggaaggacaatgtaacactcattatagggtgggggactagcgtcaaggtttgcagcgtgaaggaacgccacgcatctgaaatgagggatttgcccagccgctacgtggaaattgtcagccagtttgagaccgaattctacatatcaggacttgccccattgtgtgatcagctggtcgtgctgagctatgtgaaagagatctctgagaaaactgaaagggagtattgtgcaagacctcgcctcgatatcatccaacctctttctgagacctgcgaggagatttcgtcagacgccttaaccgttcgaggtttccaagaaaatgagtgtagggactaccacctagaatatagtgagggcgagtcactgttttacatagtttcaccacgtgatgtagtagtggcaaaggagagggaccaggatgaccacatcgactggctgcttgagaagaagaaatacgaggaggccctgatggccgctgaaatctcccagaaaaacataaaacgtcacaaaatcctcgatatcgggctggcatatattaatcacctggtcgaacggggtgattacgacatcgcggctcgaaagtgccagaagatattgggcaaaaatgcggctctgtgggaatacgaggtgtacaaatttaaagaaatcgggcagctgaaggcgataagtccgtacctccctcgaggagacccagtcctgaagcctctaatatatgagatgatcctgcacgagtttcttgagtcggactatgaggggttcgcaactctgattagagagtggccaggggatctgtataacaactctgtcattgtccaggcagtgcgagaccatctgaagaaagactcccagaataagacacttttaaagacattagcagaactttacacctatgataagaactatgggaatgccctcgagatttacttgacactccgtcacaaagatgtcttccagctcatacataaacataatctgttcagtagcatcaaggacaagatagtgttattgatggatttcgattctgaaaaggcggttgatatgctgctggacaatgaggataagatttccatcaagaaggtggtggaggaactcgaggatcggcctgaactccaacacgtgtaccttcacaagctctttaaacgtgaccatcataagggtcagaggtatcatgagaaacaaatctctttgtatgccgagtacgaccgtccaaacctgctcccgttcctgagggattccactcactgccccctcgagaaggctttggagatatgccagcagagaaacttcgtggaagagacagtttacctactgagtcggatgggaaatagcagatccgccctaaaaatgatcatggaggaactgcacgacgtagataaagcgatcgaattcgctaaggaacaggatgatggagagctgtgggaggacttaattttgtattcaattgataaacccccttttataaccggtctgctcaacaatatcggcacacatgtggatccgattttgctcatccaccggatcaaagaagggatggaaattcccaacctgagagactccctcgtcaagatcttacaggattataatctacagatcttgcttcgcgagggatgcaagaagattttagtcgctgacagcctttccctactgaagaaaatgcacagaactcagatgaagggcgtgttagtcgatgaagaaaatatttgtgagagttgtctttcccctatcttaccgagcgacgcagccaaacccttttccgtggtggtgttccactgtaggcacatgtttcacaaggaatgcctccctatgcctagtatgaattctgccgcacagttttgtaatatctgctctgccaagaataggggtcccggatcagccatcctcgaaatgaaaaaatag

SEQ ID NO: 179866 - DNA, 769 bp, Artificial Sequence
  derived and/or modified sequence
gactctcccgtggcgccatggcggaagcagaggagcaggaaactgggtcccttgaagaatctacagatgagtctgaggaagaagagagcgaagaggaacccaagctgaagtatgaaaggctttccaatggggtaactgaaatacttcagaaggatgcagctagctgcatgacagtccatgacaagtttttggcattgggcacacattatggcaaggtttatttacttgatgtccaggggaacatcactcagaagtttgatgtaagtcctgtgaagataaatcagattagcttggatgaaagtggagagcacatgggtgtgtgttcagaggatggcaaggtgcaggtatttggactgtattctggagaagaatttcacgagacttttgactgtcccattaaaattattgctgtgcacccacatttcgtgagatccagttgcaagcagtttgtgaccggagggaagaagctgctactgtttgaacggtcttggatgaacagatggaagtctgctgttctgcatgaaggggaagggaacataaggagtgtgaagtggagaggccatctgattgcttgggccaataatatgagtaagaaacctgaggcatggagagtagccaagaaaatgaaaagctatcttaataattgaaggactgcattgggaatgggtcttgaaaatatcatttgcctgttggccaaagggtgtgaagatttttgacatcatctcaaagcaaagaatcaccaatgtgccccgggatgatataagtcttc

SEQ ID NO: 179867 - DNA, 5903 bp, Artificial Sequence
  derived and/or modified sequence
aagtgtgtggtttcctcttatttccgggtctgtcaggtgactctcccgtggcgccatggcggaagcagaggagcaggaaactgggtcccttgaagaatctacagatgagtctgaggaagaagagagcgaagaggaacccaagctgaagtatgaaaggctttccaatggggtaactgaaatacttcagaaggatgcagctagctgcatgacagtccatgacaagtttttggcattgggcacacattatggcaaggtttatttacttgatgtccaggggaacatcactcagaagtttgatgtaagtcctgtgaagataaatcagattagcttggatgaaagtggagagcacatgggtgtgtgttcagaggatggcaaggtgcaggtatttggactgtattctggagaagaatttcacgagacttttgactgtcccattaaaattattgctgtgcacccacatttcgtgagatccagttgcaagcagtttgtgaccggagggaagaagctgctactgtttgaacggtcttggatgaacagatggaagtctgctgttctgcatgaaggggaagggaacataaggagtgtgaagtggagaggccatctgattgcttgggccaataatatgggtgtgaagatttttgacatcatctcaaagcaaagaatcaccaatgtgccccgggatgatataagtcttcgcccagacatgtatccctgcagcctctgctggaaggacaatgtgacactgattattggctgggggacttctgtcaaggtgtgctcagtgaaggaacggcatgccagtgaaatgagggatttgccaagtcgatatgttgaaatagtgtctcagtttgaaactgaattctacatcagtggacttgcacctctctgtgatcagcttgttgtactttcgtatgtaaaggagatttcagaaaaaacggaaagagaatactgtgccaggcctagactggacatcatccagccactttctgagacttgtgaagagatctcttctgatgctttgacagtcagaggctttcaggagaatgaatgtagagattatcatttagaatactctgaaggggaatcacttttttacatcgtgagtccgagagatgttgtagtggccaaggaacgagaccaagatgatcacattgactggctccttgaaaagaagaaatatgaagaagcattgatggcagctgaaattagccaaaaaaatattaaaagacataagattctggatattggcttggcatatataaatcacctggtggagagaggagactatgacatagcagcacgcaaatgccagaaaattcttgggaaaaatgcagcactctgggaatatgaagtttataaatttaaagaaattggacagcttaaggctattagtccttatttgccaagaggtgatccagttctgaaaccactcatctatgaaatgatcttacatgaatttttggagagtgattatgagggttttgccacattgatccgagaatggcctggagatctgtataataattcagtcatagttcaagcagttcgggatcatttgaagaaagatagtcagaacaagactttacttaaaaccctggcagaattgtacacctatgacaagaactatggcaatgctctggaaatatacttaacattaagacataaagacgtttttcagttgatccacaagcataatcttttcagttctatcaaggataaaattgttttattaatggattttgattcagagaaagctgttgacatgcttttggacaatgaagataaaatttcaattaaaaaggtagtggaagaattggaagacagaccagagctacagcatgtgtatttgcataagcttttcaagagagaccaccataaggggcagcgttaccatgaaaaacagatcagtctttatgctgaatatgatcgaccaaacttacttccctttctccgagacagtacccattgcccacttgaaaaggctcttgagatctgtcaacagagaaactttgtagaagagacagtttatcttctgagccgaatgggtaatagccgaagtgccctgaagatgattatggaggaattacatgatgttgataaagcaatcgaatttgccaaggagcaagatgatggagagctgtgggaagatttgattttatattccattgacaaaccaccatttattactggcttgttaaacaacattggcacacatgttgacccaattctactgattcaccgtattaaggaaggaatggagatccccaatttgagagattccttggttaaaattctgcaagactacaatttgcaaattctgcttcgtgaaggctgcaagaagattctcgtagctgactctttgtccttactgaagaaaatgcaccgaactcaaatgaaaggtgttcttgttgatgaggagaacatctgtgagtcgtgcctttcccctattcttccatcagatgcagctaagcccttcagcgtggtggtcttccattgccggcacatgttccacaaggagtgcctgcccatgcccagcatgaactctgctgcacagttctgcaacatctgcagtgctaagaaccgtggaccaggaagtgcaattttggagatgaaaaaatagctcatttctccttgtcagtctccttgtcaccactctttttgagactgtttttgcaacaacaaaagcatttgttgacactcgtgctgttaagagatttgtttatgtttatattatactcaaaaacaatttcttcatctattcctgtactaatggtttctctttgcagttcacagagaatttggggctctcttcatgccttgaaattttggggtccatagtgaatattttgttatttatttgtttggctcattctttatatagtaatggaaacataagtctaggagttagaaatgaattttttagaccttagtaaaaccatttaaccataaaatggacaactgagaattctcccagctgcctgaaagcgtcgccaactgtggttatcctgcaagctgctacctgcaacttggacgttgtttccacgtgctctgctggctacgattcttgcattctgggtttggcttttttctgtgtcatcaactatggttatcctctaaataggcatttaatgaaacattgtacaaattgtcactcatttgatgacacctgggaataacattagcaggctgatgtcctgcaccattatgtttactaatcacatgttctgtgtgctgtgacgactgtcaaagagtatctggccatggcggacactcagcatttgttgattgaataaatgttagctcttctcattgtgaaggactcacttttactgggataaacaaatgcagttaagaattctggcacccttgtaaggaagaaaagagagttcaacaccttcgagtctgagcgcttgtggctagagtttgccaggagggaggaaaccagtgaccctgaaaactgagggtgcctcaggagcagtgggaccacctgatgctgaaggacggactaatgatgtttcctcttgccttctctggtgcctccattgccctcatggaacagagcatatcatagagggagaaaagtcaaacttgtaattgtgtcttacagttactggcttcatcttccttgggatatatggtcatcctctaatgagtgtaaaagtgcgcaaaacacatccttattgttcctgatctcttagtcccataaatgggaacaaatacagctttctgcttctttctttttggggaaaggacagggtgctagtgagtactgacagcatgccagctaccgaagtcacccagccattcccatgagcagcagttcatttaattgtcacagcgtcgccaggaagaagatctgataaacctaggtttacagataaagaaagcaaaatgtagagatgttgttgaggtcacagaggtgactgcctaacttcagagcagggcttctgatccctttaagaaattacagggccagccgggcatggtggctcacgcccgtaatcccagggctttgggaggccttggcaggtggatcacctgagatcgcacgttcgagaccagcctgaccaacatggagaaaccccatctctactaaaaacacaaattagccaggcgtggtggtacatgcctgtaatcccagctactcaggaggctgaggcaggagaatcacttgaccccaggagacgtaggttgtggtgagctgagatcgcgccattgcactccagcctgggcaacaagagcaaaactccgtctcaaaaaagaaaagaaaagaaaagaaatcatagggccaagttcaaaggaaatgcacagaacatatcttcacattagagttaagaattctctagcaaacaacagatttttttgttgttgttagtcacaaatacttagaactggaaggctctttgttattattgaatgtacccctcagccttctcagcatttccttatcccaagactagtgtgctttctgctacactgctagttttcagttttgttcttacccaattgttttttcttttcaacattaccaatttacagattcagtttattacatttacattaatcctcacttatgatttgagcaagctcatttccagaaaagtttactttaagatcatcaataggatttgctaatttcagtgaagtcattttgcttcaggggtaaattatcctagttaccaagtcctatttggacataaagaaaatcctacttatagaaaaggagaaaataattaaacagtcttcatttttaagtaactgatttaaaaggaaaataataaaatatgttcgtttatcatttcagaaattgctgtaacacactggaaaattcctgaacaatatagattttatcgttaataaaaaacactagctttcgttccttagaatgtcttttcttttgaataaacagtattgggtgatttattaaaggatattcaatcctttttacttttcatcaacctataagggcttaaatatggcaaaataatccaagtgttagtcaattatttttcatgtgtgactagcccaatttaaaatataggtaaaaaggaaacccattcccctcgttttggggaagaacatagttgcaaagtacacacttcataagctattctttttttttttttttttttttttttttttgagatggagtctcgttctgttgccttggctggagtgcagtgacatgatcttggctcactgcaacctccgcctcccaggttcaagtgattctcccgtctcagcttccggagtaggtgggagtacaggcacgcaccaccatgcccagctaattttttgtactttggtagagatgaggtttcaccatgttgcccaagctggtctcgaactcctgagctcaggaatccgcccacctcggccttccgaagtgttaggattacaggcgtaagtcaccatgcccagccaagaaagctattcttgaagtgtaaaacagccaggtgcaaaattattttggagtactttagtttgcttttgtttttagccaaagggatttcatactggtttaattatgttcatccttgagaatttttgagaagtttccaacagatttgtagttcattttgctgttgttacaatgtaaagctatatatagttgacccttgaacaacacaggttggaactgcaaggatccacttatacatggattttcttctgcctctgccacccttgagacggcaagaccaggccctccccttcctcctccttctcagcctactcagtatgaagacgacagagatgaaacacttatgatgatccacttctacttaatgagtagtaaatatattttcttttccttatgattttcttactattttctttagcttgctttattataagaatatagcatataatataaataaaatataaaatatgtgttaatggtc

SEQ ID NO: 179868 - protein, 416 aa, Artificial Sequence
  derived and/or modified sequence
MPRQLSAAAALFASLAVILHDGSQMRAKAFPETRDYSQPTAAATVQDIKKPVQQPAKQAPHQTLAARFMDGHITFQTAATVKIPTTTPATTKNTATTSPITYTLVTTQATPNNSHTAPPVTEVTVGPSLAPYSLPPTITPPAHTTGTSSSTVSHTTGNTTQPSNQTTLPATLSIALHKSTTGQKPVQPTHAPGTTAAAHNTTRTAAPASTVPGPTLAPQPSSVKTGIYQVLNGSRLCIKAEMGIQLIVQDKESVFSPRRYFNIDPNATQASGNCGTRKSNLLLNFQGGFVNLTFTKDEESYYISEVGAYLTVSDPETIYQGIKHAVVMFQTAVGHSFKCVSEQSLQLSAHLQVKTTDVQLQAFDFEDDHFGNVDECSSDYTIVLPVIGAIVVGLCLMGMGVYKIRLRCQSSGYQRI

SEQ ID NO: 179869 - protein, 180 aa, Artificial Sequence
  derived and/or modified sequence
MPRQLSAAAALFASLAVILHDGSQMRAKAFPETRDYSQPTAAATVQDIKKPVQQPAKQAPHQTLAARFMDGHITFQTAATVKIPTTTPATTKNTATTSPITYTLVTTQATPNNSHTAPPVTEVTVGPSLAPYSLPPTITPPAHTTGTSSSTVSHTTGNTTQPSNQTTLPATLSIALHKST

SEQ ID NO: 179870 - DNA, 1251 bp, Artificial Sequence
  derived and/or modified sequence
atgcccagacagctgagcgccgccgccgccctgttcgccagcctggccgtgatcctgcacgacggcagccagatgagagccaaggccttccccgagaccagagactacagccagcccaccgccgccgccaccgtgcaggacatcaagaagcccgtgcagcagcccgccaagcaggccccccaccagaccctggccgccagattcatggacggccacatcaccttccagaccgccgccaccgtgaagatccccaccaccacccccgccaccaccaagaacaccgccaccaccagccccatcacctacaccctggtgaccacccaggccacccccaacaacagccacaccgccccccccgtgaccgaggtgaccgtgggccccagcctggccccctacagcctgccccccaccatcaccccccccgcccacaccaccggcaccagcagcagcaccgtgagccacaccaccggcaacaccacccagcccagcaaccagaccaccctgcccgccaccctgagcatcgccctgcacaagagcaccaccggccagaagcccgtgcagcccacccacgcccccggcaccaccgccgccgcccacaacaccaccagaaccgccgcccccgccagcaccgtgcccggccccaccctggccccccagcccagcagcgtgaagaccggcatctaccaggtgctgaacggcagcagactgtgcatcaaggccgagatgggcatccagctgatcgtgcaggacaaggagagcgtgttcagccccagaagatacttcaacatcgaccccaacgccacccaggccagcggcaactgcggcaccagaaagagcaacctgctgctgaacttccagggcggcttcgtgaacctgaccttcaccaaggacgaggagagctactacatcagcgaggtgggcgcctacctgaccgtgagcgaccccgagaccatctaccagggcatcaagcacgccgtggtgatgttccagaccgccgtgggccacagcttcaagtgcgtgagcgagcagagcctgcagctgagcgcccacctgcaggtgaagaccaccgacgtgcagctgcaggccttcgacttcgaggacgaccacttcggcaacgtggacgagtgcagcagcgactacaccatcgtgctgcccgtgatcggcgccatcgtggtgggcctgtgcctgatgggcatgggcgtgtacaagatcagactgagatgccagagcagcggctaccagagaatctag

SEQ ID NO: 179871 - DNA, 1251 bp, Artificial Sequence
  derived and/or modified sequence
atgcccagacagctcagcgccgcagccgcactgtttgcaagtcttgccgtgatcctccacgacggatcacagatgcgtgccaaagcattcccagaaacaagagactatagccaaccaaccgccgctgcaaccgttcaggatatcaagaagcctgtgcagcagccagcgaaacaggcccctcatcagactcttgctgctcgctttatggacggccacatcacttttcaaaccgctgcaaccgtcaaaattcctacaaccactcctgctaccaccaaaaacactgccaccacatcaccgattacctacaccctggttacaacccaggccaccccaaacaatagtcacaccgctccgcctgtgaccgaggtgacagtggggccctctctggccccttatagtctgcccccaaccatcacccccccagcacataccacgggcacctcgtctagtaccgtgtcccatactacaggcaacacaacccagccttcgaatcagaccaccctgcccgctacactgagcatcgcattgcacaaatctactactggacagaaacccgtgcaacctacacacgcaccaggcacaactgcagcagctcacaacacaacacgcactgcagctccagcatccacagtacctggaccaacactggcgcctcagccctcgagtgtgaagactggcatttatcaagtcctgaacggttctagactgtgcatcaaagcggaaatggggatacaactgattgtgcaggacaaggaatccgtttttagcccgcggcggtacttcaatatcgacccaaatgccacacaggctagcggcaattgcggaaccaggaaatctaatttgctgcttaattttcaggggggcttcgtgaatctgactttcaccaaagacgaagagagttattacatatccgaggtgggggcctatctgactgtatctgaccctgaaaccatttatcagggtatcaaacacgctgtggtgatgttccagaccgcagtaggacattcgttcaagtgcgtgagcgaacaaagtctgcaacttagcgctcatctgcaggtcaagacaacggatgtgcaactccaagccttcgatttcgaggatgaccatttcggcaacgtggacgaatgttcaagtgactacaccatcgttctccctgtcattggcgccatcgtagtgggcttgtgcctgatgggaatgggagtgtataaaatccgccttagatgtcagagcagcgggtatcaaagaatctag

SEQ ID NO: 179872 - DNA, 3375 bp, Artificial Sequence
  derived and/or modified sequence
accacgcgcgtgcggtaaacggtcccagaggcccgggccccggcggctgcgccgagtccccgcccctccctgctccgtaggggtaggagggggccggcggagtttccctccccgcccagcggccctgggcgggcttttcggctgcttctcataagcaggtggtttcgtttctccggcacaggtaggtttctctggcaccgattcggggcctgcccggacttcgccgcacgctgcagaacctcgcccagcgcccaccatgccccggcagctcagcgcggcggccgcgctcttcgcgtccctggccgtaattttgcacgatggcagtcaaatgagagcaaaagcatttccagaaaccagagattattctcaacctactgcagcagcaacagtacaggacataaaaaaacctgtccagcaaccagctaagcaagcacctcaccaaactttagcagcaagattcatggatggtcatatcacctttcaaacagcggccacagtaaaaattccaacaactaccccagcgactacaaaaaacactgcaaccaccagcccaattacctacaccctggtcacaacccaggccacacccaacaactcacacacagctcctccagttactgaagttacagtcggccctagcttagccccttattcactgccacccaccatcaccccaccagctcatacaactggaaccagttcatcaaccgtcagccacacaactgggaacaccactcaacccagtaaccagaccacccttccagcaactttatcgatagcactgcacaaaagcacaaccggtcagaagcctgttcaacccacccatgccccaggaacaacggcagctgcccacaataccacccgcacagctgcacctgcctccacggttcctgggcccacccttgcacctcagccatcgtcagtcaagactggaatttatcaggttctaaacggaagcagactctgtataaaagcagagatggggatacagctgattgttcaagacaaggagtcggttttttcacctcggagatacttcaacatcgaccccaacgcaacgcaagcctctgggaactgtggcacccgaaaatccaaccttctgttgaattttcagggcggatttgtgaatctcacatttaccaaggatgaagaatcatattatatcagtgaagtgggagcctatttgaccgtctcagatccagagacaatttaccaaggaatcaaacatgcggtggtgatgttccagacagcagtcgggcattccttcaagtgcgtgagtgaacagagcctccagttgtcagcccacctgcaggtgaaaacaaccgatgtccaacttcaagcctttgattttgaagatgaccactttggaaatgtggatgagtgctcgtctgactacacaattgtgcttcctgtgattggggccatcgtggttggtctctgccttatgggtatgggtgtctataaaatccgcctaaggtgtcaatcatctggataccagagaatctaattgttgcccggggggaatgaaaataatggaatttagagaactctttcatcccttccaggatggatgttgggaaattccctcagagtgtgggtccttcaaacaatgtaaaccaccatcttctattcaaatgaagtgagtcatgtgtgatttaagttcaggcagcacatcaatttctaaatactttttgtttattttatgaaagatatagtgagctgtttattttctagtttcctttagaatattttagccactcaaagtcaacatttgagatatgttgaattaacataatatatgtaaagtagaataagccttcaaattataaaccaagggtcaattgtaactaatactactgtgtgtgcattgaagattttattttacccttgatcttaacaaagcctttgctttgttatcaaatggactttcagtgcttttactatctgtgttttatggtttcatgtaacatacatattcctggtgtagcacttaactccttttccactttaaatttgtttttgttttttgagacggagtttcactcttgtcacccaggctggagtacagtggcacgatctcggcttatggcaacctccgcctcccgggttcaagtgattctcctgcttcagcttcccgagtagctgggattacaggcacacactaccacgcctggctaatttttgtatttttattatagacggggtttcaccatgttggccagactggtcttgaactcttgacctcaggtgatccacccacctcagcctcccaaagtgctgggattacaggcatgagccattgcgcccggccttaaatgttttttttaatcatcaaaaagaacaacatatctcaggttgtctaagtgtttttatgtaaaaccaacaaaaagaacaaatcagcttatattttttatcttgatgactcctgctccagaatcgctagactaagaattaggtggctacagatggtagaactaaacaataagcaagagacaataataatggcccttaattattaacaaagtgccagagtctaggctaagcactttatctatatctcatttcattctcacaacttataggtgaatgagtaaactgagacttaagggaactgaatcacttaaatgtcacctggctaactgatggcagagccagagcttgaattcatgttggtctgacatcaaggtctttggtcttctccctacaccaagttacctacaagaacaatgacaccacactctgcctgaaggctcacacctcataccagcatacgctcaccttacagggaaatgggtttatccaggatcatgagacattagggtagatgaaaggagagctttgcagataacaaaatagcctatccttaataaatcctccactctctggaaggagactgaggggctttgtaaaacattagtcagttgctcatttttatgggattgcttagctgggctgtaaagatgaaggcatcaaataaactcaaagtatttttaaatttttttgataatagagaaacttcgctaaccaactgttctttcttgagtgtatagccccatcttgtggtaacttgctgcttctgcacttcatatccatatttcctattgttcactttattctgtagagcagcctgccaagaattttatttctgctgttttttttgctgctaaagaaaggaactaagtcaggatgttaacagaaaagtccacataaccctagaattcttagtcaaggaataattcaagtcagcctagagaccatgttgactttcctcatgtgtttccttatgactcagtaagttggcaaggtcctgactttagtcttaataaaacattgaattgtagtaaaggtttttgtaataaaaacttactttggaga

SEQ ID NO: 179873 - DNA, 1251 bp, Artificial Sequence
  derived and/or modified sequence
atgccccggcagctgtctgctgctgctgccctgtttgccagcctggccgtcatcctgcatgatggcagccagatgagggccaaggccttccctgagacccgggactacagccagcccacagctgctgccaccgtgcaggacatcaagaagcctgtgcagcagcctgccaagcaggccccccaccagaccctggccgcccgcttcatggatggccacatcaccttccagacagctgccaccgtgaagatccccaccaccaccccagccaccaccaagaacacagccaccaccagccccatcacctacaccctggtgaccacccaggccacccccaacaacagccacacagcccctcctgtgacagaggtgacagtgggccccagcctggccccctacagcctgccccccaccatcaccccaccagcccacaccaccggcaccagcagcagcacagtgagccacaccaccggcaacaccacccagcccagcaaccagaccaccctgcctgccaccctgagcatcgccctgcacaagagcaccaccggccagaagcctgtgcagcccacccacgcccctggcaccacagctgctgcccacaacaccaccaggacagctgccccagccagcacagtgcccggccccaccctggccccccagcccagctctgtgaagacaggcatctaccaggtgctgaatggcagccggctgtgcatcaaggccgagatgggcatccagctgattgtgcaggacaaggagagcgtcttcagcccccggcgctacttcaacatcgaccccaatgccacccaggccagcggcaactgtggcaccaggaagagcaacctgctgctgaacttccagggcggctttgtgaacctgaccttcaccaaggatgaggagagctactacatcagcgaggtgggcgcctacctgactgtgtctgaccctgagaccatctaccagggcatcaagcatgctgtggtgatgttccagacagctgtgggccacagcttcaagtgtgtgtctgagcagagcctgcagctgagcgcccacctgcaggtgaagaccacagatgtgcagctgcaggcctttgattttgaagatgaccactttggaaatgtggatgaatgttccagtgactacaccatcgtgctgcctgtgattggagccatcgtggtgggcctgtgcctgatgggcatgggcgtgtacaagatccggctgcgctgccagagcagcggctaccagaggatctag

SEQ ID NO: 179874 - DNA, 1251 bp, Artificial Sequence
  derived and/or modified sequence
atgccccggcagctgagcgccgccgccgccctgttcgccagcctggccgtcattctgcacgatgggtcccagatgcgcgcaaaggccttccccgaaactagggactatagtcagcccaccgcagctgcaactgttcaggacataaagaagcccgtacagcagcccgccaaacaggcgccacatcaaactctcgcggcacgctttatggacggtcatatcaccttccaaaccgccgccaccgtaaagattcccaccactacccctgcgaccacaaaaaatacagctacaaccagccctatcacatatactctggtcacgacacaggccactcccaacaacagccatacagctccgcctgtcacagaagtgacagtgggcccatcattagcaccttactcgttgccccccaccattactcctcccgcccatacgaccgggacctcttcatccacggtaagtcacacaacgggaaataccacacaacctagcaaccaaactactctgcccgccacgctttcaatcgcactgcacaaatctaccactggacaaaagccggtgcagcccacacacgctccaggtacgaccgcagctgcgcataacacaacccggaccgccgctccagcatctacagttccaggtccaactctggccccacaaccctcatcagtgaagacaggtatttaccaggtcctgaacggttctagattgtgcataaaggctgagatggggattcagctgatcgtgcaagataaggagagtgtgttcagcccccgcagatacttcaacatcgacccaaacgctactcaggcctccggcaactgcggcaccagaaaatcaaatctgctcttgaactttcagggggggttcgtgaatctcacttttaccaaagatgaggagtcatactatatttcagaagtgggggcctatctgactgtgagtgaccccgaaacaatttatcaaggtataaagcatgccgtggttatgttccagacagcagtaggccacagcttcaagtgcgttagtgagcagtcactgcagctgtcagcccatttacaagtgaagacaactgacgtgcagctgcaagccttcgatttcgaagatgatcacttcggcaatgtcgatgaatgtagcagcgattacaccattgtcctacccgtaattggggcgatcgtcgtaggcttgtgcctgatgggaatgggcgtgtacaagataagactgcgatgtcagtcttccggttatcagcggatctag

SEQ ID NO: 179875 - DNA, 1251 bp, Artificial Sequence
  derived and/or modified sequence
atgccccgacagctgagtgcggctgccgctcttttcgcctcactggccgtcatactgcatgacggttcacagatgagggcaaaagccttccccgaaaccagagattacagccagcccactgctgcggctacagttcaggatatcaaaaagcctgtgcaacagcccgcaaagcaggccccacaccaaactctcgctgctaggtttatggacggacacatcaccttccaaacagcagccactgtcaaaattcctacaactacccctgccacgaccaaaaatactgctaccaccagtccaataacctataccttagttactacacaagccacacctaataattcacatacggctcctccagtgaccgaagtgaccgtcggtcctagtctcgcaccttactccctaccgccaaccattaccccccctgcccacaccacaggcacaagctctagtaccgtgagtcacacgacagggaatacgacccagcccagtaaccagacgacgctacctgccactctgtccatcgctctgcacaaatccaccacgggtcagaagcccgtccagccaacccatgcacctggcactacagctgctgcccataataccacaaggaccgccgcacccgcatccactgttcctggacctacattggctccccagccctcttccgtgaaaaccgggatctatcaagtactgaatgggtcccggttgtgcatcaaagcagaaatggggatccagctgatcgtgcaggataaagaatctgttttcagtcctagaaggtattttaacatcgatcctaatgcgacccaggccagcgggaactgtggcactcgaaagagtaatctgttattgaatttccagggaggatttgtgaatttgacttttactaaagacgaggagtcgtattacatctccgaggtcggggcatacctcacagtttccgatcctgagaccatctatcagggaatcaaacacgccgtcgttatgttccaaaccgcagtgggccacagttttaagtgtgtttcagaacagagcttgcaactttccgcccacctgcaggtcaaaacaacagacgtccaattgcaggcctttgatttcgaagacgaccacttcgggaatgtcgacgaatgctcgagcgattacacaattgtgctgcctgtcataggggctatagtggtgggactctgtctgatggggatgggcgtgtataaaataagactgcgatgccaaagcagcggctatcagagaatctag

SEQ ID NO: 179876 - protein, 204 aa, Artificial Sequence
  derived and/or modified sequence
MVCGGFACSKNCLCALNLLYTLVSLLLIGIAAWGIGFGLISSLRVVGVVIAVGIFLFLIALVGLIGAVKHHQVLLFFYMIILLLVFIVQFSVSCACLALNQEQQGQLLEVGWNNTASARNDIQRNLNCCGFRSVNPNDTCLASCVKSDHSCSPCAPIIGEYAGEVLRFVGGIGLFFSFTEILGVWLTYRYRNQKDPRANPSAFL

SEQ ID NO: 179877 - DNA, 615 bp, Artificial Sequence
  derived and/or modified sequence
atggtgtgcggcggcttcgcctgcagcaagaactgcctgtgcgccctgaacctgctgtacaccctggtgagcctgctgctgatcggcatcgccgcctggggcatcggcttcggcctgatcagcagcctgagagtggtgggcgtggtgatcgccgtgggcatcttcctgttcctgatcgccctggtgggcctgatcggcgccgtgaagcaccaccaggtgctgctgttcttctacatgatcatcctgctgctggtgttcatcgtgcagttcagcgtgagctgcgcctgcctggccctgaaccaggagcagcagggccagctgctggaggtgggctggaacaacaccgccagcgccagaaacgacatccagagaaacctgaactgctgcggcttcagaagcgtgaaccccaacgacacctgcctggccagctgcgtgaagagcgaccacagctgcagcccctgcgcccccatcatcggcgagtacgccggcgaggtgctgagattcgtgggcggcatcggcctgttcttcagcttcaccgagatcctgggcgtgtggctgacctacagatacagaaaccagaaggaccccagagccaaccccagcgccttcctgtag

SEQ ID NO: 179878 - DNA, 615 bp, Artificial Sequence
  derived and/or modified sequence
atggtgtgcggtggtttcgcctgcagcaaaaactgcctttgcgcccttaatctattgtatacactggtctctctattactgatcgggatagctgcatggggcattggcttcggcctgatttcatctctgcgcgtcgtgggcgtcgttattgccgttggaatttttctctttttgatagctctagtaggcctgattggtgcagtgaagcaccaccaagttctgctgtttttttatatgatcatactgttgctggtcttcattgtacagttctctgtgtcatgcgcctgccttgccctcaaccaggagcagcaagggcagctgctggaggtggggtggaataataccgcttctgctagaaacgacatacagcgcaacctgaactgctgcggcttccgaagtgtaaatccgaatgatacttgcttggcatcctgtgttaaaagtgatcacagctgcagcccctgcgccccaatcattggtgagtacgcaggggaggtgttgcggttcgttggaggaatcggactgttttttagctttaccgagatcttaggcgtgtggctcacgtatcgttatcgtaatcagaaagatcctagagcgaaccctagcgccttcctttag

SEQ ID NO: 179879 - DNA, 615 bp, Artificial Sequence
  derived and/or modified sequence
atggtgtgtggcggctttgcctgcagcaagaactgcctgtgtgccctgaacctgctgtacaccctggtgtccctgctgctgattggaattgctgcctggggcattggatttggcctcatcagcagcctgcgggtggtgggcgtggtgattgctgtgggcatcttcctgttcctgattgccctggtgggcctgattggagctgtgaagcaccaccaggtgctgctcttcttctacatgatcatcctgctgctggtgttcatcgtgcagttctctgtgtcctgtgcctgcctggccctgaaccaggagcagcagggccagctgctggaggtgggctggaacaacacagccagcgccagaaatgacatccagaggaacctgaactgctgcggcttccgctctgtgaaccccaatgacacctgcctggccagctgtgtgaagagtgaccacagctgcagcccctgtgcccccatcatcggggagtatgctggggaggtgctgcgctttgtgggcggcatcggcctcttcttctccttcacagagatcctgggcgtgtggctgacctaccgctacagaaaccagaaggacccccgggccaaccccagcgccttcctgtag

SEQ ID NO: 179880 - DNA, 615 bp, Artificial Sequence
  derived and/or modified sequence
atggtgtgcggcggcttcgcctgcagcaagaactgcctgtgcgccttaaatctgctatacaccctggtgtcattattgctgatcggtattgcagcctggggaatcggttttgggctgataagctctctaagagttgtgggtgtggtgatcgccgtgggtattttcctgtttctgatcgcgctggtcggcttgattggcgccgtgaagcaccatcaagtgctgttatttttctacatgatcatcctcttactcgttttcatcgtgcaattctcagtttcatgcgcgtgcctggcgctgaaccaggagcagcaagggcagcttcttgaggtgggctggaacaacacagcctcagcccgaaacgatatacagcgcaatttgaactgctgtggattccggagcgtgaaccccaatgatacctgcttagcctcatgtgtgaaatctgatcatagctgctccccctgcgcgcctataataggagaatatgcaggggaagtactccgatttgtcggcgggatcggtttgttcttttccttcacggagattctgggcgtctggttaacctaccgataccgtaaccaaaaggatccccgcgctaacccctccgcgtttctctag

SEQ ID NO: 179881 - DNA, 615 bp, Artificial Sequence
  derived and/or modified sequence
atggtgtgtggtggatttgcctgcagcaaaaattgcctctgtgccctgaacctgctgtacactctggtgtcactgctgttgattggcattgccgcatggggcatcgggtttgggttgatctcgtccctgcgggtggtgggggtagtcatcgctgtcgggatatttctcttcctgatcgcactggtggggctaattggcgctgtcaagcaccatcaagtactcctgtttttttacatgatcatcctgctgctggtgttcatcgtgcagttctccgtgtcttgtgcctgcctggccttaaatcaggagcagcagggccaactgctggaggttggatggaataatactgcttccgcccgtaatgacattcaacgaaacctgaactgctgcgggttccgttccgtgaacccaaacgacacctgcctggcctcttgcgtaaagtctgaccattcctgcagcccatgcgccccaataatcggagaatacgccggagaggtcttgaggttcgtcggtggcattgggctgttcttcagcttcacagagatcctgggggtttggctgacttataggtaccggaaccaaaaggacccacgagccaatccatcagcttttttatag

SEQ ID NO: 179882 - DNA, 2093 bp, Artificial Sequence
  derived and/or modified sequence
acctgctcctggggaaactacaccaaggccgccgctctggcctggggctccctcccacacggccttggccctctccccctcgccccgggaccgctccgcccctcccggatcccggtcggcggagcgcatttatttgcatatttctacctttgttccctgccagcggccaatcagcgcgcggggcgagacgaaggggctgggcggggctcgggctcctgctccggctcagctgcggcggccgcaggttccaaagcgggtccgagccgccgccgcgcgcgcgccgcgcactgcagccccaggccccggccccccacccacgtctgcgttgctgccccgcctgggccaggccccaaaggcaaggacaaagcagctgtcagggaacctccgccggagtcgaatttacgtgcagctgccggcaaccacaggttccaagatggtttgcgggggcttcgcgtgttccaagaactgcctgtgcgccctcaacctgctttacaccttggttagtctgctgctaattggaattgctgcgtggggcattggcttcgggctgatttccagtctccgagtggtcggcgtggtcattgcagtgggcatcttcttgttcctgattgctttagtgggtctgattggagctgtaaaacatcatcaggtgttgctatttttttatatgattattctgttacttgtatttattgttcagttttctgtatcttgcgcttgtttagccctgaaccaggagcaacagggtcagcttctggaggttggttggaacaatacggcaagtgctcgaaatgacatccagagaaatctaaactgctgtgggttccgaagtgttaacccaaatgacacctgtctggctagctgtgttaaaagtgaccactcgtgctcgccatgtgctccaatcataggagaatatgctggagaggttttgagatttgttggtggcattggcctgttcttcagttttacagagatcctgggtgtttggctgacctacagatacaggaaccagaaagacccccgcgcgaatcctagtgcattcctttgatgagaaaacaaggaagatttcctttcgtattatgatcttgttcactttctgtaattttctgttaagctccatttgccagtttaaggaaggaaacactatctggaaaagtaccttattgatagtggaattatatatttttactctatgtttctctacatgtttttttctttccgttgctgaaaaatatttgaaacttgtggtctctgaagctcggtggcacctggaatttactgtattcattgtcgggcactgtccactgtggcctttcttagcatttttacctgcagaaaaactttgtatggtaccactgtgttggttatatggtgaatctgaacgtacatctcactggtataattatatgtagcactgtgctgtgtagatagttcctactggaaaaagagtggaaatttattaaaatcagaaagtatgagatcctgttatgttaagggaaatccaaattcccaattttttttggtctttttaggaaagattgttgtggtaaaaagtgttagtataaaaatgataatttacttgtagtcttttatgattacaccaatgtattctagaaatagttatgtcttaggaaattgtggtttaatttttgacttttacaggtaagtgcaaaggagaagtggtttcatgaaatgttctaatgtataataacatttaccttcagcctccatcagaatggaacgagttttgagtaatcaggaagtatatctatatgatcttgatattgttttataataatttgaagtctaaaagactgcatttttaaacaagttagtattaatgcgttggcccacgtagcaaaaagatatttgattatcttaaaaattgttaaataccgttttcatgaaatttctcagtattgtaacagcaacttgtcaaacctaagcatatttgaatatgatctcccataatttgaaattgaaatcgtattgtgtggctctgtatattctgttaaaaaattaaaggacagaaacctttctttgtgtatgcatgtttgaattaaaagaaagtaatggaagaattgatcgatgaa

SEQ ID NO: 179883 - protein, 346 aa, Artificial Sequence [sequence omitted]

SEQ ID NO: 179884 - protein, 294 aa, Artificial Sequence
  derived and/or modified sequence
MDPARKAGAQAMIWTAGWLLLLLLRGGAQALECYSCVQKADDGCSPNKMKTVKCAPGVDVCTEAVGAVETIHGQFSLAVRGCGSGLPGKNDRGLDLHGLLAFIQLQQCAQDRCNAKLNLTSRALDPAAAANVTVSLPVRGCVQDEFCTRDGVTGPGFTLSGSCCQGSRCNSDLRNKTYFSPRIPPLVRLPPPEPTTVASTTSVTTSTSAPVRPTSTTKPMPAPTSQTPRQGVEHEASRDEEPRLTGGAAGHQDRSNSGQYPAKGGPQQPHNKGCVAPTAGLAALLLAVAAGVLL

SEQ ID NO: 179885 - DNA, 1041 bp, Artificial Sequence
  derived and/or modified sequence
atggatcccgcccggaaagccggcgcccaggctatgatatggaccgcgggctggctgttgcttctgctgcttagaggcggcgcccaggctttggagtgttactcctgcgtgcagaaggctgacgacggttgctcacccaacaagatgaagacagtaaaatgtgcccctggggttgatgtgtgtacagaagccgtgggcgccgtggaaacaatacacgggcaatttagccttgccgtcagaggctgtgggtccggcctgccagggaaaaatgatcggggcctggacttacacggccttcttgcttttattcagctgcagcagtgtgcacaggatagatgcaacgccaagctgaatctgacatccagggccctggatccagctggcaatgagtccgcctacccacctaacggggttgaatgctatagctgcgttgggttatctagagaagcctgccaaggaaccagccctcctgtagtgagctgttacaacgcgtcagaccacgtatataaaggctgcttcgacggtaacgtaaccttgaccgcagcgaacgtgacagtttcgttgcctgtgcgtggctgtgtccaggatgagttttgtactagagatggggtgaccggtcctggtttcacactgtctgggagctgctgtcagggctcccgctgtaacagtgatctgcggaacaaaacatatttctctcctagaatcccgcccctggtgagactccctcctcccgaaccgaccacagttgcatcaacaacatcagtgactaccagtacttccgcgcccgtgaggccgacaagtaccaccaagcccatgcccgcacctacctcacagactccaagacagggagtcgagcacgaagccagccgggatgaggagccccgattgaccggcggagctgccgggcaccaggatagaagcaactccggccaatatcctgccaaggggggacctcagcagccccataataagggatgtgtcgcgcctacggccgggctggcggcgcttttgctcgcagtggctgccggcgtgctgctttag

SEQ ID NO: 179886 - DNA, 885 bp, Artificial Sequence
  derived and/or modified sequence
atggaccctgccagaaaagcaggggctcaggcaatgatctggacggctggctggctgctgttactgctgctcagagggggcgctcaggccctcgaatgttatagttgtgtccaaaaggcagatgacggatgtagcccaaacaaaatgaagacggtcaagtgcgctcctggtgtagatgtctgtactgaggccgtaggggcagtggaaaccattcacggacagttctctcttgccgtgcgcggatgtggatctgggcttccaggcaaaaatgacagaggacttgaccttcacggactcctggcgttcatccagttgcagcagtgtgcccaggaccgctgtaatgcaaagttaaatctgacgtctcgagcgttggaccctgccgcagccgctaacgtaacagtcagtctcccagtgagaggctgtgtgcaagatgagttctgcacaagagacggggtcacagggcccgggttcacccttagcggcagctgctgtcagggaagtcggtgcaattctgacttacggaataaaacttatttctcaccaaggatccctccgcttgtacggctgcctccgcccgaaccaaccacggtggcgtccacaacatcggtgacaacatccaccagcgcccccgtcagacctacctcaacgaccaaacccatgcccgctccaacctcacaaactcccaggcagggcgtggaacacgaagctagtcgggatgaggaaccccgactcaccgggggagccgctgggcatcaggatcggagtaacagcgggcagtaccctgcaaagggcggccctcagcaaccccacaacaaaggatgtgtcgcccccacggctggcctggcagccctgctactcgctgtggcagcaggcgtgctgttgtag

SEQ ID NO: 179887 - DNA, 1041 bp, Artificial Sequence
  derived and/or modified sequence
atggaccctgccaggaaggccggggcccaggccatgatctggacagctggctggctgctgctgctgctgctgcggggcggggcccaggccctggagtgctacagctgtgtgcagaaggcagatgatggctgcagccccaacaagatgaagacagtgaagtgtgcccctggggtggatgtgtgcacagaggccgtgggcgctgtggagaccatccacggccagttcagcctggccgtgcggggctgcggcagcggcctgcccgggaagaatgaccggggcctggacctgcacggcctgctggccttcatccagctgcagcagtgtgcccaggaccgctgcaatgccaagctgaacctgaccagccgggccctggaccctgctggaaatgaaagtgcctacccacccaacggggtggagtgctacagctgtgtgggcctgagccgggaggcctgccagggcaccagcccccctgtggtgtcctgctacaatgccagtgaccacgtgtacaagggctgctttgatggaaatgtgaccctgacagctgccaacgtgacagtgtccctgcctgtgcggggctgtgtgcaggatgagttctgcaccagagatggagtgactggacctggcttcaccctgagcggcagctgctgccagggcagccgctgcaacagcgacctgaggaacaagacctacttcagcccccgcatcccccccctggtgcggctgcccccacctgagcccaccaccgtggccagcaccacctctgtgaccaccagcaccagcgcccctgtgcggcccaccagcaccaccaagcccatgcctgcccccaccagccagaccccccggcagggcgtggagcacgaggccagcagagatgaggagccccggctgactggaggagctgctggccaccaggacaggagcaacagcggccagtacccagccaagggcggcccccagcagccccacaacaagggctgtgtggcccccacagctggcctggccgccctgctgctggccgtggccgccggcgtgctgctgtag

SEQ ID NO: 179888 - DNA, 885 bp, Artificial Sequence
  derived and/or modified sequence
atggaccctgccaggaaggccggggcccaggccatgatctggacagctggctggctgctgctgctgctgctgcggggcggggcccaggccctggagtgctacagctgtgtgcagaaggcagatgatggctgcagccccaacaagatgaagacagtgaagtgtgcccctggggtggatgtgtgcacagaggccgtgggcgctgtggagaccatccacggccagttcagcctggccgtgcggggctgcggcagcggcctgcccgggaagaatgaccggggcctggacctgcacggcctgctggccttcatccagctgcagcagtgtgcccaggaccgctgcaatgccaagctgaacctgaccagccgggccctggaccctgctgctgctgccaacgtgacagtgtccctgcctgtgcggggctgtgtgcaggatgagttctgcaccagagatggagtgactggacctggcttcaccctgagcggcagctgctgccagggcagccgctgcaacagcgacctgaggaacaagacctacttcagcccccgcatcccccccctggtgcggctgcccccacctgagcccaccaccgtggccagcaccacctctgtgaccaccagcaccagcgcccctgtgcggcccaccagcaccaccaagcccatgcctgcccccaccagccagaccccccggcagggcgtggagcacgaggccagcagagatgaggagccccggctgactggaggagctgctggccaccaggacaggagcaacagcggccagtacccagccaagggcggcccccagcagccccacaacaagggctgtgtggcccccacagctggcctggccgccctgctgctggccgtggccgccggcgtgctgctgtag

SEQ ID NO: 179889 - DNA, 1706 bp, Artificial Sequence
  derived and/or modified sequence
aaggctggggttgcctggggcgaggttactcatcctgggctcaggtaagagggcccgagctcggaggcggcacatccaggggggacgccaagggagcaggacggagccatggaccccgccaggaaagcaggtgcccaggccatgatctggactgcaggctggctgctgctgctgctgcttcgcggaggagcgcaggccctggagtgctacagctgcgtgcagaaagcagatgacggatgctccccgaacaagatgaagacagtgaagtgcgcgccgggcgtggacgtctgcaccgaggccgtgggggcggtggagaccatccacggacaattctcgctggcagtgcggggttgcggttcgggactccccggcaagaatgaccgcggcctggatcttcacgggcttctggcgttcatccagctgcagcaatgcgctcaggatcgctgcaacgccaagctcaacctcacctcgcgggcgctcgacccggcaggtaatgagagtgcatacccgcccaacggcgtggagtgctacagctgtgtgggcctgagccgggaggcgtgccagggtacatcgccgccggtcgtgagctgctacaacgccagcgatcatgtctacaagggctgcttcgacggcaacgtcaccttgacggcagctaatgtgactgtgtccttgcctgtccggggctgtgtccaggatgaattctgcactcgggatggagtaacaggcccagggttcacgctcagtggctcctgttgccaggggtcccgctgtaactctgacctccgcaacaagacctacttctcccctcgaatcccaccccttgtccggctgccccctccagagcccacgactgtggcctcaaccacatctgtcaccacttctacctcggccccagtgagacccacatccaccaccaaacccatgccagcgccaaccagtcagactccgagacagggagtagaacacgaggcctcccgggatgaggagcccaggttgactggaggcgccgctggccaccaggaccgcagcaattcagggcagtatcctgcaaaaggggggccccagcagccccataataaaggctgtgtggctcccacagctggattggcagcccttctgttggccgtggctgctggtgtcctactgtgagcttctccacctggaaatttccctctcacctacttctctggccctgggtacccctcttctcatcacttcctgttcccaccactggactgggctggcccagcccctgtttttccaacattccccagtatccccagcttctgctgcgctggtttgcggctttgggaaataaaataccgttgtatatattctgccaggggtgttctagctttttgaggacagctcctgtatccttctcatccttgtctctccgcttgtcctcttgtgatgttaggacagagtgagagaagtcagctgtcacggggaaggtgagagagaggatgctaagcttcctactcactttctcctagccagcctggactttggagcgtggggtgggtgggacaatggctccccactctaagcactgcctcccctactccccgcatctttggggaatcggttccccatatgtcttccttactagactgtgagctcctcgagggcagggaccgtgccttatgtctgtgtgtgatcagtttctggcacataaatgcctcaataaagatttaattactttg

SEQ ID NO: 179890 - DNA, 907 bp, Artificial Sequence
  derived and/or modified sequence
gccaagggagcaggacggagccatggaccccgccaggaaagcaggtgcccaggccatgatctggactgcaggctggctgctgctgctgctgcttcgcggaggagcgcaggccctggagtgctacagctgcgtgcagaaagcagatgacggatgctccccgaacaagatgaagacagtgaagtgcgcgccgggcgtggacgtctgcaccgaggccgtgggggcggtggagaccatccacggacaattctcgctggcagtgcggggttgcggttcgggactccccggcaagaatgaccgcggcctggatcttcacgggcttctggcgttcatccagctgcagcaatgcgctcaggatcgctgcaacgccaagctcaacctcacctcgcgggcgctcgacccggcagctgcagctaatgtgactgtgtccttgcctgtccggggctgtgtccaggatgaattctgcactcgggatggagtaacaggcccagggttcacgctcagtggctcctgttgccaggggtcccgctgtaactctgacctccgcaacaagacctacttctcccctcgaatcccaccccttgtccggctgccccctccagagcccacgactgtggcctcaaccacatctgtcaccacttctacctcggccccagtgagacccacatccaccaccaaacccatgccagcgccaaccagtcagactccgagacagggagtagaacacgaggcctcccgggatgaggagcccaggttgactggaggcgccgctggccaccaggaccgcagcaattcagggcagtatcctgcaaaaggggggccccagcagccccataataaaggctgtgtggctcccacagctggattggcagcccttctgttggccgtggctgctggtgtcctactgtga

SEQ ID NO: 179891 - DNA, 1041 bp, Artificial Sequence
  derived and/or modified sequence
atggaccccgcccggaaggccggcgcccaggccatgatctggaccgccggctggctgctgctgctcctcttgcggggcggcgctcaggcactggagtgttacagctgtgtgcagaaagccgatgacggctgctccccaaacaagatgaagactgttaagtgcgccccaggggtggatgtgtgtactgaggctgttggggcagtggagactatccatgggcagtttagcctggccgtgagaggttgcgggagtggactgcctgggaagaacgatcggggtctggacttgcatgggctgttggctttcattcagttgcaacaatgcgcccaggaccgctgcaacgctaaattgaatctgacatcccgagccttggacccagctggcaacgaaagcgcttacccgccgaacggcgtggaatgctatagctgcgtgggcttgagccgcgaggcctgtcagggtacctctcctcccgtagtttcatgttacaacgccagcgaccatgtgtacaagggttgttttgatgggaatgtgaccctaacagccgcgaatgtgacagtgtccctccccgtgagagggtgcgtgcaggatgagttctgcaccagggatggagttaccggtcccggctttacactgagcggcagttgttgccagggatcacgttgtaactccgaccttagaaataagacgtacttcagccctcggattccaccgctggtacgcctccccccacccgagccaacgaccgtggcaagtacaactagcgttacaactagcaccagcgctccagttcggcccacttcaacaaccaagcctatgcccgctcccacaagtcagacaccccgccagggggttgagcatgaggcctccagagacgaggaaccacgcttaacaggcggggccgccggccaccaggataggtctaacagtggccagtatcctgcaaaaggcggtccacagcaacctcacaataaaggctgtgtagcgcccaccgccggactggccgcccttctgctggccgtcgccgctggggttctcctgtag

SEQ ID NO: 179892 - DNA, 885 bp, Artificial Sequence
  derived and/or modified sequence
atggaccccgcccggaaggccggcgcccaggccatgatctggaccgccggttggctgttactgctgctcctccgggggggcgcccaagcgctcgagtgctattcttgtgtgcagaaggcggatgatggctgtagtcctaataagatgaagaccgtcaagtgcgctcctggggttgatgtgtgcaccgaggctgtcggagccgtggaaactatccacggacaatttagcctcgctgtaagaggatgcggttccggactgcctggtaagaatgataggggtttggacctgcacggattattagcctttatccagctgcagcagtgcgctcaggatcggtgtaatgctaagcttaatctcacctcacgagccctggaccccgccgcagccgcaaacgttaccgtttctctacccgtgagaggctgtgtgcaggacgaattctgtactcgggatggagtcaccggccctggtttcactttgtctggatcctgttgtcagggcagtcggtgcaattctgatctacgcaacaaaacctacttctcgcccaggatccccccactcgtacgactgcccccaccagagcccaccaccgtagccagcactacctccgtcaccacctctacaagcgcgcccgtccggcctacatccaccactaagccgatgcccgctcccacgagccaaactcccagacagggcgtcgaacacgaagcatctcgggacgaagagccccgtctcaccggcggtgccgccggccaccaggatcgatcaaacagtggacagtacccagcaaaaggcgggccccagcaacctcacaataagggttgcgtcgctcccacagccggcctagcagctcttctgctggccgtcgcggcaggggtgttgctgtag

SEQ ID NO: 179893 - DNA, 1041 bp, Artificial Sequence
  derived and/or modified sequence
atggaccctgcccgtaaggcgggagctcaagccatgatttggacggctggttggctcctgctgttgcttctccggggaggcgcacaggccttggagtgctacagttgcgtgcaaaaagcggacgatggatgctctcccaataagatgaaaacagtgaagtgtgcccctggggtggatgtatgtaccgaagcagtcggagctgtggagactatacatgggcagttctctctagccgtccgcggatgcggttcagggctgcccggaaaaaacgatcgaggcctggatctccacgggctgctcgcttttattcagctccagcagtgcgcccaggacaggtgtaacgctaaattgaatctcacttcccgggctctggaccccgctggtaacgagtccgcctacccccctaacggcgtcgagtgttacagctgtgtgggcctttcacgggaagcttgccagggaacatcaccgccagtggtttcctgctacaatgcttctgaccacgtatacaagggctgcttcgacggcaacgtcactctaaccgcagccaacgtcaccgtgtcccttccagtgaggggctgcgtccaagatgaattttgtacacgggacggcgtgaccggccctggctttaccctctcgggcagctgttgccagggcagccggtgtaattccgacttgcggaacaaaacgtatttttctccacgaattccaccactggtaaggctgcctcccccagagccgacaaccgtggcctcaaccacaagtgtgaccacatctacgtcagctccagtgaggcctaccagcaccacaaaacccatgccagctccaacgtctcaaactccgagacagggcgtagagcatgaagcgtcccgtgatgaagagccccgattgaccgggggtgccgctgggcaccaagataggtctaattccggtcagtaccccgcaaagggcggacctcaacagccccacaataaaggctgtgtcgcaccgacagccggtctggccgcactgctgctcgccgtcgccgcaggcgtgctcctctag

SEQ ID NO: 179894 - DNA, 885 bp, Artificial Sequence
  derived and/or modified sequence
atggaccccgcaaggaaggcgggtgcgcaggctatgatctggaccgctgggtggctgctactgctgttgctcagaggtggcgcacaagccctggagtgctattcttgtgtccagaaagctgacgatggctgctctcctaataagatgaagactgtcaagtgcgcacctggtgttgacgtctgcacagaggcagtcggggcagttgagaccattcatggacagttttccctagcagttcgtggctgcgggtccggattgcccggaaaaaatgaccgcggtctcgacctccacggccttctcgcgttcatacagcttcaacagtgtgctcaggaccgctgcaacgctaaactaaacttgacttcaagagctctcgaccctgcagccgcagccaatgtgacagtgagcctgcctgtcagaggatgtgttcaggatgaattctgtacacgggacggagtcactggacctggcttcacgttgtctgggtcttgttgccagggaagcaggtgcaactcagacttgagaaataagacatatttcagtccacgaatccctcctctggtcaggttgccgcctccagagccaaccactgtggccagcactacctctgtaacgacctccactagcgccccagttcgcccaaccagtaccactaagcccatgccagccccaacatcccaaaccccccgacagggggtcgagcacgaagcttccagggacgaagagccccgactgacaggaggcgcagcaggtcaccaggataggagcaattccggacagtaccccgctaagggtggaccccaacaacctcacaataaggggtgcgtggcaccgacagctggactggccgcactcttgttggctgtggccgcaggcgtgctactatag

SEQ ID NO: 179895 - DNA, 1041 bp, Artificial Sequence
  derived and/or modified sequence
atggaccccgccagaaaggccggcgcccaggccatgatctggaccgccggctggctgctgctgctgctgctgagaggcggcgcccaggccctggagtgctacagctgcgtgcagaaggccgacgacggctgcagccccaacaagatgaagaccgtgaagtgcgcccccggcgtggacgtgtgcaccgaggccgtgggcgccgtggagaccatccacggccagttcagcctggccgtgagaggctgcggcagcggcctgcccggcaagaacgacagaggcctggacctgcacggcctgctggccttcatccagctgcagcagtgcgcccaggacagatgcaacgccaagctgaacctgaccagcagagccctggaccccgccggcaacgagagcgcctacccccccaacggcgtggagtgctacagctgcgtgggcctgagcagagaggcctgccagggcaccagcccccccgtggtgagctgctacaacgccagcgaccacgtgtacaagggctgcttcgacggcaacgtgaccctgaccgccgccaacgtgaccgtgagcctgcccgtgagaggctgcgtgcaggacgagttctgcaccagagacggcgtgaccggccccggcttcaccctgagcggcagctgctgccagggcagcagatgcaacagcgacctgagaaacaagacctacttcagccccagaatcccccccctggtgagactgcccccccccgagcccaccaccgtggccagcaccaccagcgtgaccaccagcaccagcgcccccgtgagacccaccagcaccaccaagcccatgcccgcccccaccagccagacccccagacagggcgtggagcacgaggccagcagagacgaggagcccagactgaccggcggcgccgccggccaccaggacagaagcaacagcggccagtaccccgccaagggcggcccccagcagccccacaacaagggctgcgtggcccccaccgccggcctggccgccctgctgctggccgtggccgccggcgtgctgctgtag

SEQ ID NO: 179896 - DNA, 885 bp, Artificial Sequence
  derived and/or modified sequence
atggaccccgccagaaaggccggcgcccaggccatgatctggaccgccggctggctgctgctgctgctgctgagaggcggcgcccaggccctggagtgctacagctgcgtgcagaaggccgacgacggctgcagccccaacaagatgaagaccgtgaagtgcgcccccggcgtggacgtgtgcaccgaggccgtgggcgccgtggagaccatccacggccagttcagcctggccgtgagaggctgcggcagcggcctgcccggcaagaacgacagaggcctggacctgcacggcctgctggccttcatccagctgcagcagtgcgcccaggacagatgcaacgccaagctgaacctgaccagcagagccctggaccccgccgccgccgccaacgtgaccgtgagcctgcccgtgagaggctgcgtgcaggacgagttctgcaccagagacggcgtgaccggccccggcttcaccctgagcggcagctgctgccagggcagcagatgcaacagcgacctgagaaacaagacctacttcagccccagaatcccccccctggtgagactgcccccccccgagcccaccaccgtggccagcaccaccagcgtgaccaccagcaccagcgcccccgtgagacccaccagcaccaccaagcccatgcccgcccccaccagccagacccccagacagggcgtggagcacgaggccagcagagacgaggagcccagactgaccggcggcgccgccggccaccaggacagaagcaacagcggccagtaccccgccaagggcggcccccagcagccccacaacaagggctgcgtggcccccaccgccggcctggccgccctgctgctggccgtggccgccggcgtgctgctgtag

SEQ ID NO: 179897 - protein, 82 aa, Artificial Sequence
  derived and/or modified sequence
MGREFGNLTRMRHVISYSLSPFEQRAYPHVFTKGIPNVLRRIRESFFRVVPQFVVFYLIYTWGTEEFERSKRKNPAAYENDK

SEQ ID NO: 179898 - DNA, 249 bp, Artificial Sequence
  derived and/or modified sequence
atgggcagagagttcggcaacctgaccagaatgagacacgtgatcagctacagcctgagccccttcgagcagagagcctacccccacgtgttcaccaagggcatccccaacgtgctgagaagaatcagagagagcttcttcagagtggtgccccagttcgtggtgttctacctgatctacacctggggcaccgaggagttcgagagaagcaagagaaagaaccccgccgcctacgagaacgacaagtag

SEQ ID NO: 179899 - DNA, 249 bp, Artificial Sequence
  derived and/or modified sequence
atgggtagggagtttggaaatttgacaagaatgcgacatgtgataagttactcactcagccctttcgaacagcgtgcatacccacacgtgtttacaaaggggatcccgaacgttctgaggcgaataagagagtccttcttccgcgttgtgccacaattcgtcgtattctaccttatctacacatggggcacagaggaatttgaacgatctaagcgcaagaatcccgccgcatatgaaaacgataaatag

SEQ ID NO: 179900 - DNA, 249 bp, Artificial Sequence
  derived and/or modified sequence
atggggagggagtttggcaacctgacccggatgaggcacgtgatctcatacagtctttcacctttcgagcagcgtgcttatccgcatgtttttaccaagggcatcccgaatgttctgcgccgcatccgggagtctttctttcgggtagtgccacagtttgtggtgttctacctgatttacacgtggggcacagaagagtttgaacggtctaaaaggaaaaatccagccgcctatgagaatgacaagtag

SEQ ID NO: 179901 - DNA, 249 bp, Artificial Sequence
  derived and/or modified sequence
atgggaagggagtttggcaacttgacccggatgcgccacgtgatatcgtactccctgtccccttttgagcagcgggcttatccccacgtcttcactaagggcatccccaatgtcctgcgaaggattcgggaatcctttttccgggtggtcccccagttcgtggtgttctatctcatctacacctggggaactgaggaatttgagcgttccaagcgaaagaatccagcggcgtatgagaatgacaagtag

SEQ ID NO: 179902 - DNA, 249 bp, Artificial Sequence
  derived and/or modified sequence
atgggccgggagtttggaaacctgaccaggatgagacatgtgatctcctacagcctgagcccctttgagcagagggcctacccccacgtgttcaccaagggcatccccaacgtgctgcggcgcatccgggagagcttcttccgggtggtgccccagtttgtggtgttctacctgatctacacctggggcacagaggagtttgagaggagcaagaggaagaacccagctgcctatgaaaatgacaagtag

SEQ ID NO: 179903 - DNA, 249 bp, Artificial Sequence
  derived and/or modified sequence
atgggccgggagttcggcaacctgacccggatgcggcacgtgatcagctactccctttccccattcgagcaacgggcctacccgcacgtgttcaccaagggtatcccaaacgtcttacgcaggattagagagagcttcttcagagtggtgcctcagttcgtagtattttaccttatctacacttggggcaccgaggagttcgaacggtccaagcgcaagaaccctgctgcctatgaaaacgacaagtag

SEQ ID NO: 179904 - DNA, 249 bp, Artificial Sequence
  derived and/or modified sequence
atgggccgggagttcggcaacctgacccggatgcggcacgtgatctcgtattctctctcacctttcgagcagagagcctaccctcacgtgttcaccaaaggaattcctaatgtgctaagacgtatccgggagagcttcttcagggtcgtgccccagtttgtggtcttttacctgatttacacctggggcactgaagagttcgaacgcagcaagcgaaaaaatccggcagcctacgaaaatgataagtag

SEQ ID NO: 179905 - DNA, 249 bp, Artificial Sequence
  derived and/or modified sequence
atgggccgggagttcggcaacctgacccggatgcggcacgtgatctcatacagcctttccccttttgaacagagagcatacccacatgtgtttaccaaagggatacccaatgtgctaaggcgcattcgcgaaagtttttttcgcgttgttccacagttcgtggtcttctatctcatctatacttggggaactgaggagttcgagcggagcaaacggaaaaatcccgctgcctatgaaaacgacaagtag

SEQ ID NO: 179906 - DNA, 249 bp, Artificial Sequence
  derived and/or modified sequence
atgggacgcgagttcggcaatttgacccggatgaggcacgtaatcagctacagtttaagccccttcgaacagcgggcatatccacacgtgttcaccaaggggattcccaatgtactgcggagaattcgggaatccttcttccgggtagttccccagtttgtggtgttttatctcatttatacttggggaacggaggagttcgagcgctctaagagaaaaaaccctgctgcttatgagaacgataagtag

SEQ ID NO: 179907 - DNA, 249 bp, Artificial Sequence
  derived and/or modified sequence
atggggagagaatttggaaaccttacaaggatgcggcatgtgatctcatactccctcagccccttcgagcagagggcgtatccacatgtgtttaccaagggcatacctaatgttttgcgcaggatcagggagtccttcttcagggtggttccacagttcgtcgtgttctacctgatttatacatgggggacagaggaatttgaacgttccaaaagaaaaaacccggcagcctacgaaaacgataagtag

SEQ ID NO: 179908 - DNA, 249 bp, Artificial Sequence
  derived and/or modified sequence
atgggtagggagttcggaaaccttaccaggatgagacacgtcattagctactccctatctccttttgaacaacgtgcttacccacacgtgtttaccaagggcattccaaacgttctcaggcgcatcagagagtcatttttcagagtcgtaccccagttcgtcgtgttctatttgatttacacgtggggcaccgaggagttcgaacgtagcaagcggaagaatcctgcagcctatgagaacgacaagtag

SEQ ID NO: 179909 - DNA, 586 bp, Artificial Sequence
  derived and/or modified sequence
gagtcaaccggatcggtgactgtggagggcgagctgagccctgtgcgtgagtggggtctggttgtgcagtgttcgtggaccctgggaggctaggggcgccccgctgggctgggaaaggataaggagtgcaggggcaggagtctggggttggggatggacccccgcggggactgcggcgcttcgcgaaagcgagccaagcgcctgtccaccctcggtcctgcagggccgccgccacaatgggccgcgagtttgggaatctgacgcggatgcggcatgtgatcagctacagcttgtcaccgttcgagcagcgcgcctatccgcacgtcttcactaaaggaatccccaatgttctgcgccgcattcgggagtctttctttcgcgtggtgccgcagtttgtagtgttttatcttatctacacatgggggactgaagagttcgagagatccaagaggaagaatccagctgcctatgaaaatgacaaatgagcaacgcatccggatgacggttccctgtctctgaaagacctttctctggaagaggagtctgcattgtagtgtctcaaagacacaataaacttcctatggtc

SEQ ID NO: 179910 - DNA, 429 bp, Artificial Sequence
  derived and/or modified sequence
gccggaaatgacgaacgagtcaaccggatcggtgactgtggagggcgagctgagccctgtgcggccgccgccacaatgggccgcgagtttgggaatctgacgcggatgcggcatgtgatcagctacagcttgtcaccgttcgagcagcgcgcctatccgcacgtcttcactaaaggaatccccaatgttctgcgccgcattcgggagtctttctttcgcgtggtgccgcagtttgtagtgttttatcttatctacacatgggggactgaagagttcgagagatccaagaggaagaatccagctgcctatgaaaatgacaaatgagcaacgcatccggatgacggttccctgtctctgaaagacctttctctggaagaggagtctgcattgtagtgtctcaaagacacaataaacttcctatggtctgca

SEQ ID NO: 179911 - DNA, 839 bp, Artificial Sequence
  derived and/or modified sequence
cttagagacagtaggaaaatggtatctcccggaagttacctcacgacctccaagagcggcttccaaccttgccggaaatgacgaacgagtcaaccggatcggtgactgtggagggcgagctgagccctggccgccgccacaatgggccgcgagtttgggaatctgacgcggatgcggcatgtgatcagctacagcttgtcaccgttcgagcagcgcgcctatccgcacgtcttcactaaaggaatccccaatgttctgcgccgcattcgggagtctttctttcgcgtggtgccgcagtttgtagtgttttatcttatctacacatgggggactgaagagttcgagagatccaagaggaagaatccagctgcctatgaaaatgacaaatgagcaacgcatccggatgacggttccctgtctctgaaagacctttctctggaagaggagtctgcattgtagtgtctcaaagacacaataaacttcctatggtctgcactgttgtgatattacatttttgtgagtagaatcctgtgtgaccactaatattcaagttcatgaagcgcccctcctcagcatgagtcttgaagttttgcctggtctcgggttttggtgaaagagcagggctccccctttgttccattatctacaagaaagtagctgcaggtactcctgcatctaaccatttgtgggtgacatgggctatggcgagtgctggttcttggccctctgctcccatagcaacaataaagtctactaactatattgtaattagtatgtgtcagggacgcttttattttttattttttgagatggagtcttgctctctcacccaggctgga

SEQ ID NO: 179912 - protein, 327 aa, Artificial Sequence
  derived and/or modified sequence
MVRCDRGLQMLLTTAGAFAAFSLMAIAIGTDYWLYSSAHICNGTNLTMDDGPPPRRARGDLTHSGLWRVCCIEGIYKGHCFRINHFPEDNDYDHDSSEYLLRIVRASSVFPILSTILLLLGGLCIGAGRIYSRKNNIVLSAGILFVAAGLSNIIGIIVYISSNTGDPSDKRDEDKKNHYNYGWSFYFGALSFIVAETVGVLAVNIYIEKNKELRFKTKREFLKASSSSPYARMPSYRYRRRRSRSSSRSTEASPSRDVSPMGLKITGAIPMGELSMYTLSREPLKVTTAASYSPDQEASFLQVHDFFQQDLKEGFHVSMLNRRTTPV

SEQ ID NO: 179913 - DNA, 984 bp, Artificial Sequence
  derived and/or modified sequence
atggtgagatgcgacagaggcctgcagatgctgctgaccaccgccggcgccttcgccgccttcagcctgatggccatcgccatcggcaccgactactggctgtacagcagcgcccacatctgcaacggcaccaacctgaccatggacgacggccccccccccagaagagccagaggcgacctgacccacagcggcctgtggagagtgtgctgcatcgagggcatctacaagggccactgcttcagaatcaaccacttccccgaggacaacgactacgaccacgacagcagcgagtacctgctgagaatcgtgagagccagcagcgtgttccccatcctgagcaccatcctgctgctgctgggcggcctgtgcatcggcgccggcagaatctacagcagaaagaacaacatcgtgctgagcgccggcatcctgttcgtggccgccggcctgagcaacatcatcggcatcatcgtgtacatcagcagcaacaccggcgaccccagcgacaagagagacgaggacaagaagaaccactacaactacggctggagcttctacttcggcgccctgagcttcatcgtggccgagaccgtgggcgtgctggccgtgaacatctacatcgagaagaacaaggagctgagattcaagaccaagagagagttcctgaaggccagcagcagcagcccctacgccagaatgcccagctacagatacagaagaagaagaagcagaagcagcagcagaagcaccgaggccagccccagcagagacgtgagccccatgggcctgaagatcaccggcgccatccccatgggcgagctgagcatgtacaccctgagcagagagcccctgaaggtgaccaccgccgccagctacagccccgaccaggaggccagcttcctgcaggtgcacgacttcttccagcaggacctgaaggagggcttccacgtgagcatgctgaacagaagaaccacccccgtgtag

SEQ ID NO: 179914 - DNA, 984 bp, Artificial Sequence
  derived and/or modified sequence
atggtccggtgtgaccggggccttcaaatgttgcttacgactgccggagccttcgccgccttctccctcatggctatcgccatcggcaccgattactggctgtattcgagtgctcacatatgtaacggcaccaatctgaccatggatgatggaccccccccacggagagctaggggggatctgacccatagcggattgtggcgtgtgtgttgcatcgaggggatctataagggtcactgtttcaggatcaaccactttcctgaggacaacgactacgaccacgactcctcagaatacctgcttaggatcgtacgggccagtagcgtttttccgatcctctcaaccatccttctcctgctgggcggcttatgcattggcgcggggcgaatttactccagaaagaataacattgtgctgtctgccggaattctgtttgtggcagctgggctttccaacattatcggcatcatcgtatacataagcagtaacaccggtgatccaagtgataagcgagacgaggacaagaaaaaccattacaactacggatggtccttctactttggagctctgtctttcatcgttgcagagacggttggcgtgttagccgtgaatatctacatcgagaagaacaaagagcttcggtttaaaactaaacgggagttcttaaaggcttcctcctccagcccgtacgcacgcatgcccagctacaggtacaggcggcggcgctcccgctcgtcctccagatctacagaagcgtctccttccagagacgtctctccaatgggtctgaagatcacaggagctatccctatgggcgagctttcgatgtatacgctttcgagagaaccactcaaggtaactacagcagctagctattcacccgaccaagaagccagtttcctccaagtacatgacttctttcagcaagacctgaaggaagggttccacgtttctatgctcaatcggaggactactccagtttag

SEQ ID NO: 179915 - DNA, 984 bp, Artificial Sequence
  derived and/or modified sequence
atggtgcgctgtgaccggggcctgcagatgctgctgaccacagctggggcctttgctgccttcagcctgatggccatcgccatcggcacagactactggctgtacagcagcgcccacatctgcaatggcaccaacctgaccatggatgatggccccccaccaagaagagcccggggggacctgacccacagcggcctgtggagggtgtgctgcatcgagggcatctacaagggccactgcttccgcatcaaccacttccctgaggacaatgactatgaccatgacagcagcgagtacctgctgagaattgtgcgggccagcagcgtcttccccatcctgagcaccatcctgctgctgctgggcggcctgtgcattggagctggccgcatctacagcaggaagaacaacatcgtgctgtctgctggcatcctgtttgtggccgccggcctgagcaacatcatcggcatcatcgtgtacatcagcagcaacacaggagaccccagcgacaagagagatgaggacaagaagaaccactacaactacggctggagcttctactttggagccctgtccttcatcgtggccgagaccgtgggcgtgctggccgtgaacatctacatcgagaagaacaaggagctgcgcttcaagaccaagcgggagttcctgaaggccagcagcagcagcccctatgccaggatgcccagctaccgctacagaagaagaagaagccgcagcagcagccgcagcacagaggccagccccagcagagatgtgagccccatgggcctgaagatcaccggggccatccccatgggagagctgtccatgtacaccctgagccgggagcccctgaaggtgaccacagctgccagctacagcccagaccaggaggccagcttcctgcaggtgcatgacttcttccagcaggacctgaaggagggcttccacgtgtccatgctgaacagaaggaccacccctgtgtag

SEQ ID NO: 179916 - DNA, 984 bp, Artificial Sequence
  derived and/or modified sequence
atggtgcggtgcgaccggggcctgcagatgctgctgaccaccgccggcgccttcgccgccttttcactcatggccatcgcgatcggaaccgattactggctttacagttctgcccatatatgtaatggcacaaatctgacaatggacgacggccctccgccccgtcgggctcgcggagatttgacacatagcgggctgtggagagtctgttgcattgaaggaatatataagggtcactgttttaggatcaaccacttcccggaggacaatgattacgatcacgattctagcgaatacctcctgcgaatcgtgagggcctcttctgtctttcccatcctctctaccatccttctactgctggggggactatgcattggggctggaagaatttatagcaggaagaacaatatcgtcctatccgccgggattctctttgtggccgcggggttgtctaatatcattggaataatcgtgtatataagttctaataccggagatccgagtgataagagggatgaggataagaaaaatcattacaattatggttggtccttctattttggggcgttgtccttcatagtcgccgaaactgtgggcgtcctggccgtgaacatatatatcgagaaaaacaaagagctgcgcttcaaaaccaaacgcgaatttttaaaggcctctagttcttcaccctacgctcggatgccttcctataggtaccgcagacgacggtcccgttccagctctcggtcaactgaagcatccccctcacgagacgtgtcgcccatgggactgaagatcaccggggccatcccgatgggcgagctgtccatgtataccctgagtcgcgagccgcttaaggtaactactgcagctagctacagtccagatcaagaagcaagtttcctgcaggtccacgacttttttcagcaagatctgaaggagggtttccacgtgagcatgctgaacaggcgaaccacacctgtgtag

SEQ ID NO: 179917 - DNA, 984 bp, Artificial Sequence
  derived and/or modified sequence
atggtcaggtgtgatagaggccttcagatgctgctgactaccgccggtgcttttgccgctttcagtttgatggcaattgctatcggaaccgactattggctgtattccagtgctcatatttgtaacggaaccaatctaaccatggacgatggccctccccctcgtagggctagaggagacttgacccattccggcctgtggcgagtgtgttgtatagaaggaatttacaaaggacactgcttccgtattaatcactttcctgaggacaatgattatgaccacgattcatctgaatacctcttgcggattgtgcgagcttcatccgtgtttcccattttgagcacaattcttctccttcttggtgggctgtgtatcggagccggaagaatctactcgcggaagaataatatcgtcctgtcagccggtatcttgttcgtggccgcagggctgtctaatatcattggcattatagtctatattagctccaatacaggagacccctccgataaacgtgatgaggataagaagaaccattataactacggatggagtttctactttggagccctaagttttatagttgcagaaacagttggagtcttggcggtgaacatttacattgagaaaaacaaagaacttaggttcaagaccaagcgtgagtttctgaaagcctcatccagtagcccatatgcaagaatgccttcctaccggtatcgccgaagaaggagtagaagtagcagccgaagtactgaggcatctcccagccgggacgtgagccctatggggctcaaaatcacaggtgccatccccatgggcgagctgtcaatgtataccctgagcagggaacctctgaaggtgactacagcggcatcatactctcccgaccaagaggcgagctttctacaggttcacgacttctttcagcaagacctgaaagagggatttcacgtctcaatgctgaaccgacgaacgacccccgtatag

SEQ ID NO: 179918 - DNA, 3397 bp, Artificial Sequence
  derived and/or modified sequence
tatgaggcgcccaccatggtgcgatgcgaccgcgggctgcagatgctgctgaccacggccggagccttcgccgccttctcgctcatggccatcgccatcggcaccgactactggctgtactccagcgcgcacatctgcaacggcaccaacctgaccatggacgacgggcccccgccccgccgcgcccgcggcgacctcacccactctggtctgtggcgggtgtgctgcatcgaagggatctataaagggcactgcttccggatcaatcacttcccagaggacaatgactacgaccacgacagctcggagtacctcctccgcatcgtgcgagcctccagcgtcttccccatcctcagcaccatcctgctcctgctgggtggcctgtgcatcggtgctggcaggatctacagccgcaagaacaacatcgtcctcagtgccggcatcctcttcgtggctgcaggcctcagtaacatcatcggtatcatcgtctacatttccagcaacacaggtgacccgagtgacaagcgggacgaagacaaaaagaaccattacaactacggctggtctttttactttggagctctgtctttcattgtggctgagaccgtgggcgtcctggctgtaaacatttacattgagaaaaataaagagttgaggtttaagaccaaacgggaattccttaaggcgtcttcctcttctccttatgccaggatgccgagctacaggtaccggcgacggcgctcgaggtccagctcaaggtccaccgaggcctcgccctccagggacgtgtcgcccatgggcctgaagatcacaggggccatccccatgggggagctgtccatgtacacgctgtccagggagcccctcaaggtgaccaccgcagccagctacagccccgaccaggaggccagcttcctgcaggtgcatgactttttccagcaggacctgaaggaaggtttccacgtcagcatgctgaaccgacggacgacccctgtgtgagccgcctgccctttctctccgctccagcctctccccagaacggctctttttgtcacacaggatggcatgtgatcctcaagacgacgaacaatgaactaaagccaaatgcagccctccctggcctccagaggtggcgtgggctggctttgcacgaaggttgtgctgggagaccggacccggggctgcagaagaagctgaaggctgactttgtcccctccccgaaaaagggtgttttgatgcctcagggtctctgaaatctcccgggaagccccagagctttcctgaggctgcctggccttgatcaacttgggaagacaaaattgagccattatctcctcttggaaacgaatcttgccagaaaaacgggatttcagggccttccctccctgcctgggtgtcgggccaccagaaggctctgccggacgccaagaagacggtctctgggctcttgtcagctgcttttgaacctgaggttcctgcgtcgttgagccagaaatcagaccaccgaagctcactcccttcctctccatctctccctctctccaagactctggcagtggcctatgatcctgaagacagctctgcagccaactggtgctttggcctttgcgctgtcccggggccagcttccctcgacctggggaggccgtggcctgtggaggaggcccaggtaaaggctgggggctgttgctggctatcctctttgcttctggaagtttctgcctcactcagaatgggcaggacagacccactgactggacttcagagtctggagggttccatcggtcaggggaatggcggccacgtgacctcttgccgtgccccttgtcatagacccaaggagcaactctgtcccctgagcgttgggggtcccgggggagaggtggacagacacctccctccaactggcatttggcaacaggagcctggacttctgtgcaagaaagggagacctaagggtgaacagtggccaataaaaaccctagagaacaaacatccatttcctaggtggttacaaatcataacttcctgcaaatcaacgccaggagagcaacttaccttcatttctttgtcttaaaaagtagcagcaactggccccacaactcctgtcattgtaagttattctgccaccacctaacaggacggagtggagtgagtttggataaacggaccgagctgggcttctcttcctccctacagaggggagatctcagcactttgtccggagctgaggaagtggtttctgtgttttacagtttttccagccattcttttcttccccctcctgaagcaagcaaagagcgtggaggcgtgtgcaggcttggaagaagaactctccagaacatggaacttaaccctcttttgtataaaacatgtgctttctaaagaaaaattgtttcttattttttgagactccttgatccaccctggaacagtcgcctgtagtcctggtagctgttgtgcttggaaataacgagcgcatccttgcctcagctacctgctcacagcccatgggtggactcggccccctggggttcagacccaggtccgttcggcctagtgatgatgtcatcgtccatcccatcttcctttgcccccaggaaaggacgcatccaccggtagcggccccagctgactgtcgccgtgtgctggggatctgaaatgaggcctgccagggcccctgtgtgctgtgctccagagccttcgctcccatcagggttggcatcatctgatggcatgtccaagtgtgcccagcagcggatgctgaagcaccagagctcaaggccttcacctgctctaggccagccctgtcaccacctccactgccatgaccaggccgaaggcagggaacgccctccccagtcccgctgtccagcaaggccccgagacttttcttctgtgatttccaaaagcaaggcagccgtgctgttctagttcctctccatccgccacctcccctcccgctgccccagaagtttctatcattccatggagaaagctgtgttccaatgaatcctacctcttgcccagtcccaggcagagtaagcagggcccacctagggaccaagaaagagtaggaagaaggggacgagccgggagcaaaaccacctcagacacccgggccttctcagccttctccccgcggccagctgggtctccggggaccctgggccctgggccgcccattcctggccctcccgctgcatctcagacctgacacccaacggggggatgtggtggcctgtgcccaccttctctccctcctcccgacccgccccctcgcccccacccctgtgtgtttcgccagttaagcacctgtgactccagtacctactactggttttgggttggttgttctgtcttttttttaattaaataaaaacatttttaaaatgtt

SEQ ID NO: 179919 - protein, 279 aa, Artificial Sequence
  derived and/or modified sequence
MDFSPSSELGFHFVAFILLTRHRTAFPASGKKRETDYSDGDPLDVHKRLPSSAGEDRAVMLGFAMMGFSVLMFFLLGTTILKPFMLSIQREESTCTAIHTDIMDDWLDCAFTCGVHCHGQGKYPCLQVFVNLSHPGQKALLHYNEEAVQINPKCFYTPKCHQDRNDLLNSALDIKEFFDHKNGTPFSCFYSPASQSEDVILIKKYDQMAIFHCLFWPSLTLLGGALIVGMVRLTQHLSLLCEKYSTVVRDEVGGKVPYIEQHQFKLCIMRRSKGRAEKS

SEQ ID NO: 179920 - DNA, 840 bp, Artificial Sequence
  derived and/or modified sequence
atggacttcagcccatccagtgaactcggcttccacttcgtggctttcatattgctcacccggcaccgcaccgcctttccagccagtgggaagaagcgcgaaactgattactcagatggcgacccacttgatgtgcacaaacggcttcctagctccgcaggtgaggatagagccgtcatgctggggttcgctatgatgggattttcggttctgatgttttttcttctcggcactaccatattgaagccattcatgctctcaattcagagagaagaatcaacctgcactgctattcatacagatataatggacgattggcttgactgcgcattcacctgcggcgttcactgccatgggcagggtaagtatccttgtctgcaagtattcgttaaccttagtcatcctggacagaaagctctgctgcattacaatgaagaggccgtgcagattaaccccaagtgtttctatacccccaagtgccatcaggatcgaaacgacctgcttaactccgccctagacataaaggagtttttcgaccacaaaaacggaacaccgttctcttgcttctattctcccgcctcacagtccgaagatgtgattctcatcaagaagtacgatcagatggcaatctttcattgcctcttctggccatccctgacgctgctcgggggtgccctgattgtggggatggtgaggctcacccaacacttgtccctcctttgtgagaagtatagtacagtcgtacgagatgaagttggtggaaaagttccatatatagaacagcatcagtttaaactttgcataatgcggcgaagcaaaggcagagctgagaaatcctag

SEQ ID NO: 179921 - DNA, 840 bp, Artificial Sequence
  derived and/or modified sequence
atggacttcagccccagcagcgagctgggcttccactttgtggccttcatcctgctgaccaggcacaggacagccttccctgccagcggcaagaagcgggagacagactacagtgatggagaccccctggatgtgcacaagaggctgcccagcagcgctggagaagatagagctgtgatgctgggctttgccatgatgggcttctctgtgctgatgttcttcctgctgggcaccaccatcctgaagcccttcatgctgagcatccagcgggaggagagcacctgcacagccatccacacagacatcatggatgactggctggactgtgccttcacctgtggggtgcactgccacggccagggcaagtacccctgcctgcaggtgtttgtgaacctgagccaccctggccagaaggccctgctgcactacaatgaggaggccgtgcagatcaaccccaagtgcttctacacccccaagtgccaccaggacagaaatgacctgctgaacagcgccctggacatcaaggagttctttgaccacaagaatggcacccccttcagctgcttctacagccctgccagccagagtgaagatgtgatcctgatcaagaagtatgaccagatggccatcttccactgcctcttctggcccagcctgaccctgctgggcggggccctgattgtgggcatggtgcggctgacccagcacctgagcctgctgtgtgagaagtacagcacagtggtgagagatgaggtgggcggcaaggtgccctacatcgagcagcaccagttcaagctgtgcatcatgaggaggagcaagggccgggcagagaagagctag

SEQ ID NO: 179922 - DNA, 840 bp, Artificial Sequence
  derived and/or modified sequence
atggacttcagccccagcagcgagctgggcttccacttcgtggccttcatcttgctgactcggcaccggacagccttccctgcctcagggaagaaacgcgaaacggattactcagatggtgaccccctggacgtgcacaaacgtttacctagttcagctggggaagacagagccgttatgctcggatttgctatgatgggattttcagttctcatgttctttctgcttggcaccactattcttaagcccttcatgctgtctattcagcgcgaggagagtacttgcacagcaatccacacagacatcatggacgattggctcgattgcgctttcacatgcggcgtccactgccatggccagggcaaatacccctgtctgcaggtattcgtcaatctatctcatcccggccaaaaggctttgttgcattataatgaagaagctgtgcagatcaatccaaagtgcttctatacaccaaagtgccaccaggatcggaacgacctgttaaactcagccctggatattaaggaattctttgaccacaaaaatggaacgccatttagctgcttctattcccctgcatctcagtctgaggacgtgatcttgattaaaaaatacgatcagatggcgatttttcattgtctgttttggccaagcctgaccctgttaggtggagctcttatcgtcggcatggtgcgtctcacacagcatctttcactcttatgtgaaaaatactccaccgtcgtgagagacgaagtggggggtaaggtgccttacatagagcaacaccagttcaagctctgtataatgaggcgtagcaaaggcagggctgaaaaaagttag

SEQ ID NO: 179923 - DNA, 1485 bp, Artificial Sequence
  derived and/or modified sequence
tgccctgcgagaatgtatctcatcctttgctggagcaggtttgcaggcacagtggagagaggagagaagaaatgaagggacacttatgcagaaccatgagtggccagagaggaggagaaggagggtgagaggagcaaagaagccatgacaacttcataattctgagtggactgggcagtggccagaaattctggtggtggatatgctgcctttccaacaggtgaatatgaaagaataagtcaaaccctgttcaggacgctgttaattccaaatgtgaactttttgagtcattctttccatgtggaattcaaaggagaatgtaaacaaattttcaggagggacgtgcaatatccctgaaagataacaaagttcgtaacacttatttacatacaacattctctagttattgattaaacagatctctacagacttgcatgaggcaacatttcttaggcttgtttgctacaatatctttaaaaatacttgattacacatcactttagcttatttagatggacttttcaccaagctctgaactgggatttcattttgttgcattcatcctgctcacgagacacaggacagcctttcctgcctcagggaagaagagagagacagactacagtgatggagacccactagatgtgcacaagaggctgccatccagtgctggagaggaccgagccgtgatgctggggtttgccatgatgggcttctcagtcctaatgttcttcttgctcggaacaaccattctaaagccttttatgctcagcattcagagagaagaatcgacctgcactgccatccacacagatatcatggacgactggctggactgtgccttcacctgtggtgtgcactgccacggtcaggggaagtacccgtgtcttcaggtgtttgtgaacctcagccatccaggtcagaaagctctcctacattataatgaagaggctgtccagataaatcccaagtgcttttacacacctaagtgccaccaagatagaaatgatttgctcaacagtgctctggacataaaagaattcttcgatcacaaaaatggaacccccttttcatgcttctacagtccagccagccaatctgaagatgtcattcttataaaaaagtatgaccaaatggctatcttccactgtttattttggccttcactgactctgctaggtggtgccctgattgttggcatggtgagattaacacaacacctgtccttactgtgtgaaaaatatagcactgtagtcagagatgaggtaggtggaaaagtaccttatatagaacagcatcagttcaaactgtgcattatgaggaggagcaaaggaagagcagagaaatcttaagacggtggccaaattaaagtgctggccttcagatgtctgtgatttctgcaactgaggacctaattatgcctgtctgcaaactaataatgtaaaaggtaataattaaagtatcatattttcatgtgggaaaaaa

SEQ ID NO: 179924 - DNA, 840 bp, Artificial Sequence
  derived and/or modified sequence
atggatttctcacccagctcagaattagggtttcatttcgttgcttttattctgttgacgaggcatcgcactgcctttccagctagcgggaagaaaagagagaccgactattcagacggagatcctctggacgtccataagagattgccttcatccgctggggaagatagggctgttatgctgggcttcgctatgatgggcttttctgtgctgatgttctttttgctgggtacgacaattctgaaacccttcatgttgtctatccaacgcgaggaatcaacatgtactgctattcacactgatatcatggacgactggctcgattgcgcgtttacatgcggagtccactgccacggccagggaaagtatccatgcctacaggttttcgtgaatctcagtcatcctgggcagaaggcgctgctgcactacaacgaagaagccgttcagatcaaccccaaatgcttttacacccctaaatgccatcaggaccgcaacgatctgttgaacagcgcgttggacattaaggagttcttcgatcataagaacggaacccccttctcttgcttctactcaccagcatcccagagcgaggacgtgattctgataaaaaaatacgaccagatggctatttttcactgtctgttttggccctccctgactttgctgggcggtgccctcattgttggcatggtacgccttacccagcacctgtcactcctgtgcgaaaagtattccaccgtggtgcgggatgaagtgggcggtaaggtgccttacattgaacagcatcaatttaagctgtgcattatgaggaggtctaaaggcagagcagaaaagtcatag

SEQ ID NO: 179925 - DNA, 840 bp, Artificial Sequence
  derived and/or modified sequence
atggacttcagccccagcagcgagctgggcttccacttcgtggccttcatcctgctgaccagacacagaaccgccttccccgccagcggcaagaagagagagaccgactacagcgacggcgaccccctggacgtgcacaagagactgcccagcagcgccggcgaggacagagccgtgatgctgggcttcgccatgatgggcttcagcgtgctgatgttcttcctgctgggcaccaccatcctgaagcccttcatgctgagcatccagagagaggagagcacctgcaccgccatccacaccgacatcatggacgactggctggactgcgccttcacctgcggcgtgcactgccacggccagggcaagtacccctgcctgcaggtgttcgtgaacctgagccaccccggccagaaggccctgctgcactacaacgaggaggccgtgcagatcaaccccaagtgcttctacacccccaagtgccaccaggacagaaacgacctgctgaacagcgccctggacatcaaggagttcttcgaccacaagaacggcacccccttcagctgcttctacagccccgccagccagagcgaggacgtgatcctgatcaagaagtacgaccagatggccatcttccactgcctgttctggcccagcctgaccctgctgggcggcgccctgatcgtgggcatggtgagactgacccagcacctgagcctgctgtgcgagaagtacagcaccgtggtgagagacgaggtgggcggcaaggtgccctacatcgagcagcaccagttcaagctgtgcatcatgagaagaagcaagggcagagccgagaagagctag

SEQ ID NO: 179926 - protein, 589 aa, Artificial Sequence
  derived and/or modified sequence
MKRVRTEQIQMAVSCYLKRRQYVDSDGPLKQGLRLSQTAEEMAANLTVQSESGCANIVSAAPCQAEPQQYEVQFGRLRNFLTDSDSQHSHEVMPLLYPLFVYLHLNLVQNSPKSTVESFYSRFHGMFLQNASQKDVIEQLQTTQTIQDILSNFKLRAFLDNKYVVRLQEDSYNYLIRYLQSDNNTALCKVLTLHIHLDVQPAKRTDYQLYASGSSSRSENNGLEPPDMPSPILQNEAALEVLQESIKRVKDGPPSLTTICFYAFYNTEQLLNTAEISPDSKLLAAGFDNSCIKLWSLRSKKLKSEPHQVDVSRIHLACDILEEEDDEDDNAGTEMKILRGHCGPVYSTRFLADSSGLLSCSEDMSIRYWDLGSFTNTVLYQGHAYPVWDLDISPYSLYFASGSHDRTARLWSFDRTYPLRIYAGHLADVDCVKFHPNSNYLATGSTDKTVRLWSAQQGNSVRLFTGHRGPVLSLAFSPNGKYLASAGEDQRLKLWDLASGTLYKELRGHTDNITSLTFSPDSGLIASASMDNSVRVWDIRNTYCSAPADGSSSELVGVYTGQMSNVLSVQFMACNLLLVTGITQENQEH

SEQ ID NO: 179927 - DNA, 1770 bp, Artificial Sequence
  derived and/or modified sequence
atgaagagagttcggaccgaacaaatccaaatggccgtctcctgctacttgaaacgccggcaatacgtcgatagtgacgggcctttaaagcaggggctccggctctcccagaccgcagaagagatggccgctaacctgaccgttcagagcgagagcggttgtgccaatatagtgagcgccgctccgtgtcaagctgaaccacagcagtatgaagtccaattcgggagattgcgaaacttccttactgactcagacagccaacacagccatgaggtgatgccgctcctgtatcctctttttgtgtatctgcacctcaatctggtgcaaaactctccaaagtctaccgtcgaatctttctactcaagattccatgggatgttcctgcagaacgcctcgcagaaagacgtaatagaacagctgcaaacaacacagacaatccaagacatcctgagcaattttaaactcagggcctttctggataataagtatgtcgttaggctccaggaagactcatataactacctgattagatatctccagagcgataataatactgccctttgcaaggtgttaactttgcatattcacctcgatgtgcagccagcaaaaaggacggattatcagctctacgctagcggctcttcatccaggtcagaaaataatgggctcgaacctcctgacatgcctagcccgatcctgcagaatgaggccgctctggaggttcttcaggagtccatcaaaagggtgaaagacggtccgccatccctcacgacgatatgcttttatgcgttttataataccgagcaacttctgaacaccgccgaaatcagccccgattcaaaattgctggcagctgggttcgacaattcctgtattaagttatggtctctccggagcaaaaaacttaaatcggagcctcaccaggttgacgtctcccggatccacctcgcctgcgacattttggaggaagaggacgacgaggacgacaatgctggaactgaaatgaaaatcctgaggggtcactgtggcccagtttatagcaccagattcctggcagattcttctggactcctcagctgcagcgaggatatgtctattcggtactgggacctcgggtcctttaccaacacggtcctgtatcagggacacgcttatccggtgtgggaccttgatatttccccatactccttgtattttgcctctgggtcacacgatcggacagctcgactgtggtccttcgatcgcacctatcctctgaggatttatgcggggcatctggccgatgtagactgcgtcaagtttcaccccaactctaattatttggcgaccgggagcacggacaaaacggtacgactgtggagtgcgcaacagggaaacagtgttcgattattcacagggcatcgagggcccgttctcagcctcgctttcagccccaacggtaagtacctggcctcagccggagaagaccagaggctcaaactctgggacttagcctctggaaccctgtataaggagctgagaggccatacagataatattacaagcttgactttttccccggattcaggcttaatcgctagcgccagcatggacaatagcgtgcgtgtgtgggacatccgcaatacatattgttctgccccggcagatgggtctagctcggaactcgtcggcgtctataccggccaaatgagtaatgtcctgagtgtacagtttatggcgtgcaatctcctgttagtaacaggtataacccaggagaaccaggagcattag

SEQ ID NO: 179928 - DNA, 1770 bp, Artificial Sequence
  derived and/or modified sequence
atgaaaagagtgagaacggagcagattcagatggccgtgtcatgctatttaaagcggcgccagtatgttgatagtgacggtcctctgaagcaggggctgcgcttatcacagaccgccgaagaaatggcggctaacctcacggtgcaatcggaaagcggttgcgccaatatcgtctctgcagcaccatgtcaagccgagccacagcagtatgaagtgcagttcggtcgactacggaattttctgaccgactccgattcccaacattcgcacgaagtaatgcctcttctgtaccctctgttcgtgtatctgcacctgaacctggtccagaattcccccaaatctacggtggaaagtttttatagcaggtttcacggcatgttcctccaaaatgctagccaaaaagatgtgattgaacaattacagacaacacagactatccaggatattttatcgaatttcaagttgagagcttttttagacaacaaatacgtggtacgactgcaggaggattcatataattacctcatcagatatttgcagtccgataacaatacggcattgtgtaaagtgttgactctgcatatccacctggacgtccagccagccaagagaacggactatcagttgtatgcctccggcagcagttccaggtccgagaataatgggttagaacctccggacatgccttctcctatcttacagaatgaggccgcgttggaggtactccaggaatctatcaagcgggtaaaagatggacctccgtctttgactaccatttgtttttatgcattttacaatactgagcagctacttaacactgcagagatctcccccgactctaagctgctcgccgccggtttcgataacagctgtattaagctatggagtctgagatctaagaagctgaagagcgaaccacatcaggtggacgtaagcagaattcatttggcgtgtgacatactggaggaggaggatgatgaggacgacaatgcaggcacagagatgaagattctccgtggccattgtggcccagtgtacagcacaagattcctcgccgattccagcggcctgttgagctgttcagaggatatgagcattcggtactgggatctcggctctttcaccaatacagttctatatcagggccatgcctatcccgtgtgggacctcgatatttcaccgtattcactctattttgcctcaggatctcacgataggactgcacggctgtggtctttcgataggacataccctctgagaatttatgcgggacaccttgctgatgtggattgcgtgaaattccacccgaatagcaactatttggcgactgggtctactgacaagaccgttaggctctggtcagcccaacagggcaacagcgtccggttatttactggccatcggggaccggtgttgagtcttgcttttagtcctaatggtaagtacttggcttctgcaggtgaggatcagagactcaaattatgggatctggctagtgggaccttgtataaggaactgcggggccacacagacaacatcaccagcctgacattctcaccagactcaggactgatcgcctccgcgtcaatggacaacagcgtgcgtgtctgggacatccggaacacatactgctctgccccagccgacggaagctcctccgagcttgtaggagtgtacaccggtcagatgagcaacgtgctgtctgtgcagttcatggcatgcaaccttctcctggtgactggcatcacccaggagaatcaagaacactag

SEQ ID NO: 179929 - DNA, 1770 bp, Artificial Sequence
  derived and/or modified sequence
atgaagagggtgaggacagagcagatccagatggctgtgtcctgctacctgaagaggcggcagtatgtggacagtgatggccccctgaagcagggcctgcggctgagccagacagctgaggagatggccgccaacctgactgtgcagagcgagagcggctgtgccaacatcgtgtctgctgccccctgccaggccgagccccagcagtatgaggtgcagtttggccgcctgaggaacttcctgacagacagcgacagccagcacagccatgaggtgatgcccctgctgtaccccctgtttgtgtacctgcacctgaacctggtgcagaacagccccaagagcacagtggagagcttctacagccgcttccacggcatgttcctgcagaatgccagccagaaggatgtgattgagcagctgcagaccacccagaccatccaggacatcctgagcaacttcaagctgcgggccttcctggacaacaagtatgtggtgcggctgcaggaggacagctacaactacctgatccgctacctgcagagcgacaacaacacagccctgtgcaaggtgctgaccctgcacatccacctggatgtgcagcctgccaagaggacagactaccagctgtatgccagcggcagcagcagccgctcagaaaataatggcctggagcccccagacatgcccagccccatcctgcagaatgaagctgccctggaggtgctgcaggagagcatcaagagggtgaaggatggcccccccagcctgaccaccatctgcttctacgccttctacaacacagagcagctgctgaacacagctgagatcagcccagacagcaagctgctggccgccggctttgacaacagctgcatcaagctgtggagcctgcggagcaagaagctgaagtctgagccccaccaggtggatgtgagccgcatccacctggcctgtgacatcctggaggaggaggatgatgaagatgacaatgccggcacagagatgaagatcctgcggggccactgcggccctgtgtacagcacccgcttcctggccgacagcagcggcctgctgagctgcagcgaggacatgagcatccgctactgggacctgggcagcttcaccaacacagtgctgtaccagggccacgcctaccctgtgtgggacctggacatcagcccctacagcctgtactttgccagcggcagccatgacagaacagcccggctgtggagctttgacaggacctaccccctgcgcatctatgccggccacctggctgatgtggactgtgtgaagttccaccccaacagcaactacctggccaccggcagcacagacaagacagtgcggctgtggagcgcccagcagggcaacagcgtgcggctcttcaccggccaccggggccctgtgctgagcctggccttcagccccaacgggaagtacctggccagcgctggggaggaccagaggctgaagctgtgggacctggccagcggcaccctgtacaaggagctgcggggccacacagacaacatcaccagcctgaccttctccccagacagcggcctgattgccagcgcctccatggacaacagcgtgcgggtgtgggacatccggaacacctactgcagcgccccagcagatggcagcagcagcgagctggtgggcgtgtacacaggccagatgagcaatgtgctgtctgtgcagttcatggcctgcaacctgctgctggtgacaggcatcacccaggagaaccaggagcactag

SEQ ID NO: 179930 - DNA, 1770 bp, Artificial Sequence
  derived and/or modified sequence
atgaagcgggtgcggaccgagcagatccagatggccgtgagctgctacctcaagcgacgtcaatatgtggattccgatgggcccctgaagcagggtttgagattgtctcagaccgctgaagagatggccgccaatctcactgttcagagcgaaagcggctgtgcaaacatcgtttctgcggcgccttgccaggctgagccccaacagtacgaggttcaatttggccgcctgagaaatttcctgacggatagcgactcgcagcactcccatgaggtaatgcccttgctgtatccattatttgtgtacctccatctgaatctcgtgcagaatagccctaaatcaacagtcgaatctttttattcacgatttcacgggatgttcttacagaatgcgtcccagaaggacgtgatcgagcagcttcaaaccacacaaactattcaagatattttaagcaattttaaattacgagcctttcttgataacaaatacgtggtcagactgcaggaagactcctataactaccttattcggtatttacaaagcgacaacaacactgccctgtgcaaagtgctgacactgcatatccacctggacgtgcagcccgcaaagaggactgactaccagctctatgcatcaggaagcagctccaggtctgaaaataatgggttagagccacccgacatgcccagccctattctgcagaatgaggcggccctggaagtcttacaggagagtataaaaagggtaaaagacggacctccgagtttaactacaatctgtttctacgctttttataacaccgagcagttgctgaatacagccgaaatctctcctgactccaagttgctcgccgcaggattcgataattcctgtattaaactttggtctctgagatcaaaaaaacttaagtcagaaccacaccaggtcgacgtgagccgcatccaccttgcctgtgatatactagaagaggaggacgatgaagacgacaacgccggaacagaaatgaagatactgcgaggccattgcgggcccgtgtattccacaagatttctcgcagactcatctgggctgctgagttgctcagaggacatgagcatccgctactgggatctgggttctttcaccaacactgtgctttatcaggggcatgcctatcctgtttgggacctggacataagtccctatagcctgtactttgcaagtggctctcacgaccggaccgctcgactgtggtcctttgaccggacgtatccactacggatctacgccgggcaccttgcggacgtggactgtgtgaagttccaccctaactctaattacctcgcgaccggctctacggacaaaactgtgcgcttatggagtgctcagcagggcaactcagtgaggctctttaccggccatcggggacccgttcttagtctcgcattctcacccaacgggaagtatctcgcttctgctggtgaagaccaaaggctgaaactgtgggacctggcctctgggactctgtataaggaactgcgaggccacaccgacaatattacatctttaaccttctccccagactccgggcttatcgcttcagcctctatggacaacagtgttagagtgtgggacattagaaacacttactgtagcgccccggccgatggcagtagttccgagctggtcggcgtgtacacaggtcagatgtccaatgtgttgtctgtccagtttatggcctgtaatcttcttctggtgaccggaattacccaggaaaatcaagaacactag

SEQ ID NO: 179931 - DNA, 1770 bp, Artificial Sequence
  derived and/or modified sequence
atgaagcgggtgcggaccgagcagatccagatggccgtgagctgctaccttaaacgcagacagtacgtggactctgatggccctttaaagcaggggcttcgactctcacagacagccgaagagatggctgctaacctaaccgttcagagcgagagcggctgcgccaatatcgtcagcgcagctccctgtcaagccgaaccccagcagtacgaagtgcagtttggcagactacgaaacttcctgaccgactcagactctcagcactcccatgaagttatgcccttgttgtatccattattcgtgtatctccatctcaatcttgtgcagaattccccaaagtcaactgtggaaagcttctactcgcggttccatgggatgttcttgcagaacgcctcgcagaaagacgtgatcgagcagctccagactactcaaacaatccaggacatcttaagcaacttcaagctccgcgcttttctggacaacaaatatgttgttcggttgcaggaggacagctacaattatcttatcaggtacttgcaatcagataataatacagccctttgcaaggtcctaactttgcacattcacctggacgtgcaaccagcaaaaagaaccgactaccagctctacgctagcggcagctcttctcggagcgaaaacaatgggctagagcctcccgacatgcccagtccaatcctgcaaaatgaggcagccctagaagtgttgcaggagtcaatcaaaagagttaaggatggtcccccctccctcaccacgatttgcttttatgctttttataacaccgagcagctattgaacacggctgagatttcaccagattccaagctgctcgcagcaggattcgacaattcctgcatcaagctctggtccctgcggagcaagaagctcaagtctgaaccccatcaagtggacgtgagtcggattcatctagcttgcgatattctggaggaggaggatgacgaggacgataacgcgggcacagagatgaagattctgagggggcactgtggtccagtctacagcacaaggttcctcgccgactcatccggcctcctctcatgttcagaggatatgtcaatccgctactgggacctcggatccttcacaaacaccgtgctatatcagggccacgcctaccctgtgtgggacctcgacatctcaccatacagcctgtactttgcgtccggctctcacgaccggacagcacgcctctggtcctttgataggacttacccgttacgcatatatgcggggcatttggccgacgtcgattgcgtgaagttccacccgaatagcaattaccttgctaccggctctacggataagacagtcagactttggtccgcccagcaagggaattctgtgagactgtttaccggccatcggggaccggtattaagtcttgctttctcaccaaatggcaaatacttagccagcgccggagaagatcagcgcctgaagctgtgggatctggcctcaggaactctttacaaggagcttcggggacacactgataatatcaccagtctgaccttctccccggactctggcctaatcgcctccgcgtcgatggataacagcgtccgcgtctgggacattaggaacacttactgttctgcccctgccgacgggtcctccagtgagttggtgggtgtctacaccggccagatgagcaacgtcctgtctgtgcaattcatggcttgtaatttgttgttggtgactggtatcacccaagagaaccaggaacattag

SEQ ID NO: 179932 - DNA, 3112 bp, Artificial Sequence
  derived and/or modified sequence
gcggccgcccagagcggcggcgggggcggcggggcgcggggcgcgggggcccagctgagccggccgtcggagtgagaccctgcggcagagacgacggaggcggaagcaacccgatcccggaggcggcggcggcggggggagccggagccgcctgggatgttcagtcatgaaacgagtgcgtaccgagcagattcagatggcagtgtcctgctacctcaaacgccggcagtacgtggactcagatggtcccctgaagcaaggactgcggctgtcacagactgctgaagagatggcggccaatctaacagtgcaatcagaatctggttgtgccaacatagtgtctgcagccccttgccaggcagaaccccagcaatatgaagtacagtttggacgactgcggaattttctcactgattctgattcccagcatagccacgaagtgatgcctctcctctatcctctctttgtctacctccatctcaacctggtccaaaacagtccgaagagcacagtggaaagtttttacagccgcttccatggaatgtttctgcagaatgctagccagaaggatgtcattgagcagctacagaccactcaaaccatccaggacatcctatctaacttcaagcttcgagcattcctagataacaagtacgtggtccgtctccaagaagacagctacaactaccttatccgctacctccaaagtgacaacaatactgccctgtgcaaagtcctcaccttacatattcatcttgacgtgcagcctgccaagagaacagactatcagctgtatgccagtggcagctcctcccgcagtgagaacaacggtttggagccccccgacatgcccagccctattctgcagaacgaggctgccctagaggtcttacaggagagcattaagcgagtcaaggatgggcctccctccctcactaccatctgcttctatgccttctataacacagagcagctgttgaacactgcagaaatctcccccgatagcaagctgcttgctgctgggtttgacaactcctgtataaaactttggagtttacgatccaagaagttaaaatcagagccccaccaagtagacgtgtcccgcatccatttggcttgtgatattctggaggaggaggatgatgaggatgataatgcaggcacggagatgaagatactgcggggccactgcggaccagtgtacagcacgaggttcctcgcggacagctcagggttgctctcttgttctgaagacatgtccatcagatactgggatctggggagtttcaccaacactgtgttgtaccaaggacatgcctatcctgtgtgggatctggacatcagtccatatagcctgtacttcgccagcgggtcccacgaccgcaccgccaggctgtggtcatttgatcggacgtacccgctgaggatatatgcaggacacctggcagatgtggactgtgtcaaattccaccctaattcaaactacttggccacgggctcaaccgacaagaccgtccggctgtggagcgctcagcaggggaactcggtgaggcttttcacaggccaccgtggccccgtgctttctctcgccttttctcccaacggtaagtacttggcgtctgctggcgaggaccagcggttgaagctgtgggacttggcctctgggaccctttataaagagttgagaggccacacagacaatatcaccagcctcaccttcagtccagacagcggcttgattgcctctgcctccatggacaactcggtgcgcgtctgggacatcaggaacacttactgcagtgcacctgccgacggctcctccagcgagctcgtgggcgtgtacaccgggcagatgagcaacgtcctgagcgtgcagttcatggcctgtaaccttcttctggtgactggaattacacaagaaaatcaggaacattaattttttaactttgttggaacggactggggtaacagtggaaagcctccagttgcaatccttcaatgagctgagattgaatcattgactgtgaaagagccccctcctcccctctctcctgggccctcattccgggcaggtcccccttcactcagccccccagtgtcgaaggccaaggttggggaggggaacaggagagaggcaatgatgagtgatcaagaattagagtgccctggaggtcactcacaagtcctcatggagactctgccgtgacctcgcgcatgcgagcaccttcctgtctctcattttcaccatctgactggggctaggtttggttagagggcggctgtagagcaccctcaggagaagtggcgccgcaggggtcacgcatggtccagccctcaggtgggagggaagtccttgttggcagagggatgtggggcgggaatgaggaaaggggagggcatgatcctggcaaatagtctttccttttccgtaattacagagaaccaggattttttttaattattgttattataattataattattattattattgacatgaggaaacctagcactggcagagggcaccttctctgcttttaatctttcaggtttgactcctggcactggttttgatacttggaattttgaggttcagggaattcagagaatttggtagcacagtgtattgggagaaagggaaatttcgggtgacagattgatcaccctggctgacatgtttctggaagtgggtgggtgggtttgattgagaacactttgggctcctgcagtgatggtgggaaagaaaaattctttccaaagctgcacttctcttaataattctctcccctcaaaagaaagattatgataaagaataatttggagtaataagtaacaagatagaattagaaaaatgttgaatttctgaatgaccattcagaggtgtggctttttccacgtctttttctcctgcaatgaactgctcccacgtcctgcactgcaataccagtctaatgaacactttgtgaaacaaatcgtaagtatgtacgcacgcatatcaaactatgctctgaggataaagcaagttctaatttgtggaaaaaggattaaatatttctgttttctgaaaagagttattttgtattttgttttctattaaaatgtatttagtttc

SEQ ID NO: 179933 - DNA, 2956 bp, Artificial Sequence
  derived and/or modified sequence
atgaaacgagtgcgtaccgagcagattcagatggcagtgtcctgctacctcaaacgccggcagtacgtggactcagatggtcccctgaagcaaggactgcggctgtcacagactgctgaagagatggcggccaatctaacagtgcaatcagaatctggttgtgccaacatagtgtctgcagccccttgccaggcagaaccccagcaatatgaagtacagtttggacgactgcggaattttctcactgattctgattcccagcatagccacgaagtgatgcctctcctctatcctctctttgtctacctccatctcaacctggtccaaaacagtccgaagagcacagtggaaagtttttacagccgcttccatggaatgtttctgcagaatgctagccagaaggatgtcattgagcagctacagaccactcaaaccatccaggacatcctatctaacttcaagcttcgagcattcctagataacaagtacgtggtccgtctccaagaagacagctacaactaccttatccgctacctccaaagtgacaacaatactgccctgtgcaaagtcctcaccttacatattcatcttgacgtgcagcctgccaagagaacagactatcagctgtatgccagtggcagctcctcccgcagtgagaacaacggtttggagccccccgacatgcccagccctattctgcagaacgaggctgccctagaggtcttacaggagagcattaagcgagtcaaggatgggcctccctccctcactaccatctgcttctatgccttctataacacagagcagctgttgaacactgcagaaatctcccccgatagcaagctgcttgctgctgggtttgacaactcctgtataaaactttggagtttacgatccaagaagttaaaatcagagccccaccaagtagacgtgtcccgcatccatttggcttgtgatattctggaggaggaggatgatgaggatgataatgcaggcacggagatgaagatactgcggggccactgcggaccagtgtacagcacgaggttcctcgcggacagctcagggttgctctcttgttctgaagacatgtccatcagatactgggatctggggagtttcaccaacactgtgttgtaccaaggacatgcctatcctgtgtgggatctggacatcagtccatatagcctgtacttcgccagcgggtcccacgaccgcaccgccaggctgtggtcatttgatcggacgtacccgctgaggatatatgcaggacacctggcagatgtggactgtgtcaaattccaccctaattcaaactacttggccacgggctcaaccgacaagaccgtccggctgtggagcgctcagcaggggaactcggtgaggcttttcacaggccaccgtggccccgtgctttctctcgccttttctcccaacggtaagtacttggcgtctgctggcgaggaccagcggttgaagctgtgggacttggcctctgggaccctttataaagagttgagaggccacacagacaatatcaccagcctcaccttcagtccagacagcggcttgattgcctctgcctccatggacaactcggtgcgcgtctgggacatcaggaacacttactgcagtgcacctgccgacggctcctccagcgagctcgtgggcgtgtacaccgggcagatgagcaacgtcctgagcgtgcagttcatggcctgtaaccttcttctggtgactggaattacacaagaaaatcaggaacattaattttttaactttgttggaacggactggggtaacagtggaaagcctccagttgcaatccttcaatgagctgagattgaatcattgactgtgaaagagccccctcctcccctctctcctgggccctcattccgggcaggtcccccttcactcagccccccagtgtcgaaggccaaggttggggaggggaacaggagagaggcaatgatgagtgatcaagaattagagtgccctggaggtcactcacaagtcctcatggagactctgccgtgacctcgcgcatgcgagcaccttcctgtctctcattttcaccatctgactggggctaggtttggttagagggcggctgtagagcaccctcaggagaagtggcgccgcaggggtcacgcatggtccagccctcaggtgggagggaagtccttgttggcagagggatgtggggcgggaatgaggaaaggggagggcatgatcctggcaaatagtctttccttttccgtaattacagagaaccaggattttttttaattattgttattataattataattattattattattgacatgaggaaacctagcactggcagagggcaccttctctgcttttaatctttcaggtttgactcctggcactggttttgatacttggaattttgaggttcagggaattcagagaatttggtagcacagtgtattgggagaaagggaaatttcgggtgacagattgatcaccctggctgacatgtttctggaagtgggtgggtgggtttgattgagaacactttgggctcctgcagtgatggtgggaaagaaaaattctttccaaagctgcacttctcttaataattctctcccctcaaaagaaagattatgataaagaataatttggagtaataagtaacaagatagaattagaaaaatgttgaatttctgaatgaccattcagaggtgtggctttttccacgtctttttctcctgcaatgaactgctcccacgtcctgcactgcaataccagtctaatgaacactttgtgaaacaaatcgtaagtatgtacgcacgcatatcaaactatgctctgaggataaagcaagttctaatttgtggaaaaaggattaaatatttctgttttctgaaaagagttattttgtattttgttttctattaaaatgtatttagtttcaaaaaaaaaa

SEQ ID NO: 179934 - DNA, 1770 bp, Artificial Sequence
  derived and/or modified sequence
atgaaacgagtccgcacggaacagatccagatggccgttagttgctatcttaaaagacgtcagtatgtggactctgatggaccactaaagcaggggctgcgccttagtcagaccgccgaggagatggcggcaaatctcacagtgcagtccgaatcgggctgtgcgaatatcgtgagtgccgcaccttgtcaggccgaaccccagcagtatgaagtccaatttggtcggctgcgcaactttttaacagattctgactcccagcattcccatgaggtgatgccccttctttatcccctttttgtgtatttgcacctgaacctcgtgcagaattcccccaaatcaaccgtggaatccttttattcccggttccacggaatgtttctgcagaacgcctcacagaaggacgtaatcgaacagctccaaactacacaaaccatacaagacatcctctccaatttcaagctgcgggctttcttggataataaatatgtggttaggttgcaggaggattcatataattatcttataaggtacttgcaatcagacaataatactgcactatgtaaggtgcttactttgcacattcacttagacgtccaacccgcaaagcgcactgactatcagctgtacgcatcagggtcttctagtcgctctgagaacaatggcctcgagccacctgacatgccttcccctatactgcagaacgaagcagcactcgaggtgctacaagagtcaataaaaagagttaaggatgggccaccctctctgacaaccatttgcttctacgccttctacaataccgaacagctcctcaatactgccgagattagccctgattctaaactcctcgcagcaggttttgataactcctgcattaagctatggtcgctccggagcaaaaagctgaagtccgaacctcaccaagtcgacgtgagtcgaattcatctcgcctgcgacatcctggaggaggaagacgacgaagatgataacgccggtaccgagatgaaaatcctcagaggccactgtggtcccgtttattccactagatttctggccgactccagtggtcttttatcttgctccgaagacatgagcataagatactgggatctaggtagcttcactaacactgttttatatcaaggacatgcctaccctgtgtgggacttggatatcagcccttactcactttacttcgcatctgggtctcatgacagaacagctaggttgtggagtttcgatcgcacctacccgctgcggatctacgcgggtcacttagccgacgtggactgtgtgaagtttcacccgaactcgaactacctcgcaacgggctccaccgacaaaacggttagactctggtccgctcagcagggtaactctgtgagactcttcaccgggcacagggggcctgtgctctcactcgcctttagtcccaatggtaagtaccttgcctcggctggagaggaccaaagattaaaattgtgggatctcgccagcgggactctttataaggagctcagggggcacaccgacaatatcacttctttgacgttcagtccggacagcgggcttattgcgtctgcgtcgatggataactccgtgcgcgtgtgggacattcggaacacatactgctcagccccagccgatggcagttcttcagaactggtgggagtgtatacagggcagatgtcaaatgtattgtcagtacaattcatggcctgtaacctgctgctggtgaccggcataacccaggaaaatcaggaacactag

SEQ ID NO: 179935 - DNA, 1770 bp, Artificial Sequence
  derived and/or modified sequence
atgaaaagagtgcgtactgagcagatccaaatggcggtgagctgctacttgaagcgtagacagtacgttgacagcgacggccctctgaaacagggcctgcgtctgtcccagaccgccgaggaaatggccgctaacctgacggtacagtccgaaagtggttgcgccaacatagtgagtgccgcaccttgtcaggctgagccccaacagtacgaggtgcagtttggccgactgcggaactttctcaccgattcagattctcagcacagccatgaagtgatgcctttattatatccgttgtttgtgtatttacaccttaatttggtccagaattctccgaagagcacagtggagtcgttctatagcagatttcacgggatgtttttacagaacgctagccagaaggacgtgatcgagcagctccagaccacccagaccatccaggatattctctccaattttaagttaagagcatttctggataacaagtatgtcgtacggctgcaagaggactcgtataactatctcatccgatatctccagtccgataacaacactgctctgtgcaaggtgctaacccttcacattcacctggacgtccagccagctaagaggacagattaccaactatacgcttccggatccagcagtcgaagcgagaataacggactcgaaccgccagatatgcccagccccatcttgcagaatgaggccgctctggaggtgctgcaggagtccattaagagagtgaaggacgggccaccatccttaactacgatatgcttttacgccttttacaacactgaacagcttttgaatactgccgaaatttcaccagactccaagttgctcgctgctggctttgacaatagctgtatcaaactctggagccttcggtcaaagaagctcaaaagtgagccacaccaggtggacgtgtctcggatacacctggcatgtgacatcctggaggaggaagacgatgaagatgataatgcaggtacagagatgaagattctgaggggacactgcggtccggtgtactcaacaaggttcctggcagactcctcaggcctgttaagctgctcagaggatatgtctataaggtactgggatttgggcagtttcaccaacaccgtgctgtatcagggacacgcttacccagtttgggatctcgacataagtccttattccctttacttcgctagtggctctcacgatcggacagctcggctgtggtcgtttgataggacgtatcctttaaggatatacgccggacacctcgccgacgtggattgcgtaaaattccaccctaacagtaattacctcgctaccggatcaacagacaagacagtgaggctgtggagcgcccagcagggcaatagcgtcaggctctttaccggacaccgcggtcccgtgctcagtttagctttcagcccgaatggaaagtacctcgcgagcgcaggggaggaccagcggctgaaattgtgggacttggcatccggaactttgtacaaggaactgcggggtcacaccgataacattaccagcttaacgtttagccctgacagtggactgatcgcatccgctagcatggataatagcgtaagagtttgggatatccgaaacacttattgtagcgcccctgctgacgggtctagtagcgagcttgtaggagtgtacacagggcaaatgtccaacgttctgtccgtgcagttcatggcatgcaatttactcctggtcacaggcatcacccaagagaaccaggaacactag

SEQ ID NO: 179936 - DNA, 1770 bp, Artificial Sequence
  derived and/or modified sequence
atgaagagagtgagaaccgagcagatccagatggccgtgagctgctacctgaagagaagacagtacgtggacagcgacggccccctgaagcagggcctgagactgagccagaccgccgaggagatggccgccaacctgaccgtgcagagcgagagcggctgcgccaacatcgtgagcgccgccccctgccaggccgagccccagcagtacgaggtgcagttcggcagactgagaaacttcctgaccgacagcgacagccagcacagccacgaggtgatgcccctgctgtaccccctgttcgtgtacctgcacctgaacctggtgcagaacagccccaagagcaccgtggagagcttctacagcagattccacggcatgttcctgcagaacgccagccagaaggacgtgatcgagcagctgcagaccacccagaccatccaggacatcctgagcaacttcaagctgagagccttcctggacaacaagtacgtggtgagactgcaggaggacagctacaactacctgatcagatacctgcagagcgacaacaacaccgccctgtgcaaggtgctgaccctgcacatccacctggacgtgcagcccgccaagagaaccgactaccagctgtacgccagcggcagcagcagcagaagcgagaacaacggcctggagccccccgacatgcccagccccatcctgcagaacgaggccgccctggaggtgctgcaggagagcatcaagagagtgaaggacggcccccccagcctgaccaccatctgcttctacgccttctacaacaccgagcagctgctgaacaccgccgagatcagccccgacagcaagctgctggccgccggcttcgacaacagctgcatcaagctgtggagcctgagaagcaagaagctgaagagcgagccccaccaggtggacgtgagcagaatccacctggcctgcgacatcctggaggaggaggacgacgaggacgacaacgccggcaccgagatgaagatcctgagaggccactgcggccccgtgtacagcaccagattcctggccgacagcagcggcctgctgagctgcagcgaggacatgagcatcagatactgggacctgggcagcttcaccaacaccgtgctgtaccagggccacgcctaccccgtgtgggacctggacatcagcccctacagcctgtacttcgccagcggcagccacgacagaaccgccagactgtggagcttcgacagaacctaccccctgagaatctacgccggccacctggccgacgtggactgcgtgaagttccaccccaacagcaactacctggccaccggcagcaccgacaagaccgtgagactgtggagcgcccagcagggcaacagcgtgagactgttcaccggccacagaggccccgtgctgagcctggccttcagccccaacggcaagtacctggccagcgccggcgaggaccagagactgaagctgtgggacctggccagcggcaccctgtacaaggagctgagaggccacaccgacaacatcaccagcctgaccttcagccccgacagcggcctgatcgccagcgccagcatggacaacagcgtgagagtgtgggacatcagaaacacctactgcagcgcccccgccgacggcagcagcagcgagctggtgggcgtgtacaccggccagatgagcaacgtgctgagcgtgcagttcatggcctgcaacctgctgctggtgaccggcatcacccaggagaaccaggagcactag

SEQ ID NO: 179937 - protein, 466 aa, Artificial Sequence
  derived and/or modified sequence
MKPPLLVFIVCLLWLKDSHCAPTWKDKTAISENLKSFSEVGEIDADEEVKKALTGIKQMKIMMERKEKEHTNLMSTLKKCREEKQEALKLLNEVQEHLEEEERLCRESLADSWGECRSCLENNCMRIYTTCQPSWSSVKNKIERFFRKIYQFLFPFHEDNEKDLPISEKLIEEDAQLTQMEDVFSQLTVDVNSLFNRSFNVFRQMQQEFDQTFQSHFISDTDLTEPYFFPAFSKEPMTKADLEQCWDIPNFFQLFCNFSVSIYESVSETITKMLKAIEDLPKQDKAPDHGGLISKMLPGQDRGLCGELDQNLSRCFKFHEKCQKCQAHLSEDCPDVPALHTELDEAIRLVNVSNQQYGQILQMTRKHLEDTAYLVEKMRGQFGWVSELANQAPETEIIFNSIQVVPRIHEGNISKQDETMMTDLSILPSSNFTLKIPLEESAESSNFIGYVVAKALQHFKEHFKTW

SEQ ID NO: 179938 - protein, 228 aa, Artificial Sequence
  derived and/or modified sequence
MASEELQKDLEEVKVLLEKATRKRVRDALTAEKSKIETEIKNKMQQKSQKKAELLDNEKPAAVVAPITTGYTVKISNYGWDQSDKFVKIYITLTGVHQVPTENVQVHFTERSFDLLVKNLNGKSYSMIVNNLLKPISVEGSSKKVKTDTVLILCRKKVENTRWDYLTQVEKECKEKEKPSYDTETDPSEGLMNVLKKIYEDGDDDMKRTINKAWVESREKQAKGDTEF

SEQ ID NO: 179939 - protein, 185 aa, Artificial Sequence
  derived and/or modified sequence
MQQKSQKKAELLDNEKPAAVVAPITTGYTVKISNYGWDQSDKFVKIYITLTGVHQVPTENVQVHFTERSFDLLVKNLNGKSYSMIVNNLLKPISVEGSSKKVKTDTVLILCRKKVENTRWDYLTQVEKECKEKEKPSYDTETDPSEGLMNVLKKIYEDGDDDMKRTINKAWVESREKQAKGDTEF

SEQ ID NO: 179940 - protein, 80 aa, Artificial Sequence
  derived and/or modified sequence
MASEELQKDLEEVKVLLEKATRKRVRDALTAEKSKIETEIKNKMQQKSQKKAELLDNEKPAAVVAPITTGYTDGISQISL

SEQ ID NO: 179941 - protein, 50 aa, Artificial Sequence
  derived and/or modified sequence
MASEELQKDLEEVKVLLEKATRKRVRDALTAEKSKIETEIKNKMQQKSQK

SEQ ID NO: 179942 - protein, 201 aa, Artificial Sequence
  derived and/or modified sequence
MPLQLKNPRLRQKSRTRCNKSQKKAELLDNEKPAAVVAPITTGYTVKISNYGWDQSDKFVKIYITLTGVHQVPTENVQVHFTERSFDLLVKNLNGKSYSMIVNNLLKPISVEGSSKKVKTDTVLILCRKKVENTRWDYLTQVEKECKEKEKPSYDTETDPSEGLMNVLKKIYEDGDDDMKRTINKAWVESREKQAKGDTEF

SEQ ID NO: 179943 - DNA, 687 bp, Artificial Sequence
  derived and/or modified sequence
atggccagcgaggagctgcagaaggacctggaggaggtgaaggtgctgctggagaaggccaccagaaagagagtgagagacgccctgaccgccgagaagagcaagatcgagaccgagatcaagaacaagatgcagcagaagagccagaagaaggccgagctgctggacaacgagaagcccgccgccgtggtggcccccatcaccaccggctacaccgtgaagatcagcaactacggctgggaccagagcgacaagttcgtgaagatctacatcaccctgaccggcgtgcaccaggtgcccaccgagaacgtgcaggtgcacttcaccgagagaagcttcgacctgctggtgaagaacctgaacggcaagagctacagcatgatcgtgaacaacctgctgaagcccatcagcgtggagggcagcagcaagaaggtgaagaccgacaccgtgctgatcctgtgcagaaagaaggtggagaacaccagatgggactacctgacccaggtggagaaggagtgcaaggagaaggagaagcccagctacgacaccgagaccgaccccagcgagggcctgatgaacgtgctgaagaagatctacgaggacggcgacgacgacatgaagagaaccatcaacaaggcctgggtggagagcagagagaagcaggccaagggcgacaccgagttctag

SEQ ID NO: 179944 - DNA, 243 bp, Artificial Sequence
  derived and/or modified sequence
atggccagcgaggagctgcagaaggacctggaggaggtgaaggtgctgctggagaaggccaccagaaagagagtgagagacgccctgaccgccgagaagagcaagatcgagaccgagatcaagaacaagatgcagcagaagagccagaagaaggccgagctgctggacaacgagaagcccgccgccgtggtggcccccatcaccaccggctacaccgacggcatcagccagatcagcctgtag

SEQ ID NO: 179945 - DNA, 153 bp, Artificial Sequence
  derived and/or modified sequence
atggccagcgaggagctgcagaaggacctggaggaggtgaaggtgctgctggagaaggccaccagaaagagagtgagagacgccctgaccgccgagaagagcaagatcgagaccgagatcaagaacaagatgcagcagaagagccagaagtag

SEQ ID NO: 179946 - DNA, 687 bp, Artificial Sequence
  derived and/or modified sequence
atggccagcgaagaacttcagaaagacttggaagaagtgaaggttctcttagagaaggccaccaggaagcgagttcgcgacgccctaacagccgaaaagagtaaaatcgaaaccgaaattaagaataaaatgcaacagaagagtcaaaagaaggccgaactgttggataatgagaagcccgcagccgtcgtggcacctattaccaccggttatacggtcaagatttccaattatggttgggaccagtcagacaaattcgttaagatatacattacactgaccggggtgcaccaggttcccaccgagaacgtgcaggtgcactttacagaaaggagttttgacttgctggttaagaatctgaatggaaagagttattcaatgatcgtcaacaatctgttaaagccaattagcgtggaaggcagctccaaaaaggtgaaaaccgacacagtgctgattctctgtcgcaagaaggtcgaaaacacacgctgggattatctgactcaggtggaaaaagagtgtaaggaaaaagagaaacccagctacgatacggagacagacccctcagaaggattgatgaatgtcctgaaaaagatctacgaggatggggacgacgatatgaagaggaccatcaacaaagcctgggtagaatcacgggaaaagcaggctaagggcgacaccgagttttag

SEQ ID NO: 179947 - DNA, 2766 bp, Artificial Sequence
  derived and/or modified sequence
gcgactgcgcagcgtggcccagcgcggtcaaattataatacataaaagttgtcagggcggagagcaagacattactcttctcggattgccggttcgctcgcgagacttgagcgttgctaggagattcggcaggcgggcggagccagactcggcggggcggggaggggtggggctaggctcggcgaggcgaggaagggtgggtggagccaggcttggcgggctgtgcgtgctcgcggtgggcggtggcggcggctgcctcgcgaaggttcgagatccgtcgcgtgcgggaggcgggccgcgatcttgcgcagggtcggtgtgggcgcaggctgcagcgccgcgactcgtgcgggtaggcgtctgcgctcggtttgagggctcggcgcggggtttcctgttcctccttctgcgcggctgcagctcgggacttcggcctgacccagcccccatggcttcagaagagctacagaaagatctagaagaggtaaaggtgttgctggaaaaggctactaggaaaagagtacgtgatgcccttacagctgaaaaatccaagattgagacagaaatcaagaacaagatgcaacagaaatcacagaagaaagcagaacttcttgataatgaaaaaccagctgctgtggttgctcccattacaacgggctatacggtgaaaatcagtaattatggatgggatcagtcagataagtttgtgaaaatctacattaccttaactggagttcatcaagttcccactgagaatgtgcaggtgcatttcacagagaggtcatttgatcttttggtaaagaatctaaatgggaagagttactccatgattgtgaacaatctcttgaaacccatctctgtggaaggcagttcaaaaaaagtcaagactgatacagttcttatattgtgtagaaagaaagtggaaaacacaaggtgggattacctgacccaggttgaaaaggagtgcaaagaaaaagagaagccctcctatgacactgaaacagatcctagtgagggattgatgaatgttctaaagaaaatttatgaagatggagacgatgatatgaagcgaaccattaataaagcctgggtggaatcaagagagaagcaagccaaaggagacacggaattttgagactttaaagtcgttttgggaactgtgatgtgatgtggaaatactgatgtttccagtaagggaatattggtgagctgcatatataaatttgacagatagctatttacatagccttctaagtaaaggcaatgaattctccatttcctactggaggatttatttaaataaaatatgcttattaaacactcctgcaaagatggttttattagtaccctggtcattttgttcaaggaagggttatattgcattctcacgtgaaatataaaaagcaagtcttgcccaataaaaacgctacattgtgtgtattttttgttcagctaagaattggaaaagtatttgcttgccttttaagttactgacatcagcttccaccagtgtaaaaattgagtaaaacctgaagttttgcataaaatgcaaatcggtgcctgtgcttgaaggttgctgtagagcatctgaccccttattaccaccttaagcaatgtatatgccatgcattaccatgcactaattcaatcacaggtgtttctatctagatttaaatatatttgtcaatgaatgtggaatagaaaatctaaacatgacaataatagacatatctttgtatggtaccagttagttttgccgtggatcagatggtttataaaagtaataaccataaagcaaaaaataatttgaaagcccgtctattcctatgctcaataaagttaagtttttcttcattagaacagttttatgatttatttgtctaggagtatgtcagaaaaatcaggcttttagtaggaattactcctattccccctgaagtcaggaccagtgcctgtgatctccattactttattttcctggaggtattagccaacacagttagatcagagaaagcaattgaagccaggcatgaaggctggcgcccgtaatcccagctactaaggctggaggatcacttcagcccaggagtttaaggctgcagtgagctatgatgatgccactgtactgcagcttgggtaacagattgagaacctgtctcattaaaaaaaaaaaaaaaaaaaaagccgttagacacacaggaaaaatccagaagggtaaactaaactaaagctacaattaatatgggaatttggaagaagtggtaggatttaaaatacagaaacagtttatgtataggatagctataagtaaatactgaaacacattatgcctctgtaattggggttgacacatgaacagaatagcagacacaatgcatatgaaagttacagaatatggtaaaagtggggtaaagatgggtttttaatgatactaagataactgaaaataggcatatagatatattccaagccgcctgacgatctaattgtaaaaagtaaagcatacaaatactagaagaaaatggaggaaaacgacattatatgtgacttaaaacctagaagaaataaataaaactattgatcaattttaactacataaaaatgtttataggacaagaaaaaccccaccataacccaaggcaaacaatgtattgacaggattccaataattaagaatacttcatacaaaaagaaatgtaaatgacctttaacatgtaaagatgctcaccttgttcagaagagaataaaccagtgtttttacctttc

SEQ ID NO: 179948 - DNA, 2834 bp, Artificial Sequence
  derived and/or modified sequence
cattttctttgatggtaaacaggctcacttataccgaatccaaacccaggcgagaactacggactcttgaaatggtcggtgaaaggggcgaaagcaccaggaaatcgtgcttcaacagtccatgactgaaaggagggcctgaaactgtggccataggcgggcccttttgttagggccttgacctgggcttccgctacagggcccggtcacgaggccaacgtagctccacctctacggcggccagtgatgacgccaccacgtcggaactgttagaccgcggtgacgtctccaccgcgccaaactcactgaaaatcaaaccgctaccattaggagccctccacgcttaacatatccgttctttctcgtttgaaagtaaccaggctgctcctccccatttttcgccttcttctcgcggaggctgagagactaaccttacacaacatggcggcctggtgtgtctggtgtcctagagcggacgaaagcaggtgactctctagtcaacttccgacttggactccgaagatcgctacagaaagatctagaagaggtaaaggtgttgctggaaaaggctactaggaaaagagtacgtgatgcccttacagctgaaaaatccaagattgagacagaaatcaagaacaagatgcaacagaaatcacagaagaaagcagaacttcttgataatgaaaaaccagctgctgtggttgctcccattacaacgggctatacggtgaaaatcagtaattatggatgggatcagtcagataagtttgtgaaaatctacattaccttaactggagttcatcaagttcccactgagaatgtgcaggtgcatttcacagagaggtcatttgatcttttggtaaagaatctaaatgggaagagttactccatgattgtgaacaatctcttgaaacccatctctgtggaaggcagttcaaaaaaagtcaagactgatacagttcttatattgtgtagaaagaaagtggaaaacacaaggtgggattacctgacccaggttgaaaaggagtgcaaagaaaaagagaagccctcctatgacactgaaacagatcctagtgagggattgatgaatgttctaaagaaaatttatgaagatggagacgatgatatgaagcgaaccattaataaagcctgggtggaatcaagagagaagcaagccaaaggagacacggaattttgagactttaaagtcgttttgggaactgtgatgtgatgtggaaatactgatgtttccagtaagggaatattggtgagctgcatatataaatttgacagatagctatttacatagccttctaagtaaaggcaatgaattctccatttcctactggaggatttatttaaataaaatatgcttattaaacactcctgcaaagatggttttattagtaccctggtcattttgttcaaggaagggttatattgcattctcacgtgaaatataaaaagcaagtcttgcccaataaaaacgctacattgtgtgtattttttgttcagctaagaattggaaaagtatttgcttgccttttaagttactgacatcagcttccaccagtgtaaaaattgagtaaaacctgaagttttgcataaaatgcaaatcggtgcctgtgcttgaaggttgctgtagagcatctgaccccttattaccaccttaagcaatgtatatgccatgcattaccatgcactaattcaatcacaggtgtttctatctagatttaaatatatttgtcaatgaatgtggaatagaaaatctaaacatgacaataatagacatatctttgtatggtaccagttagttttgccgtggatcagatggtttataaaagtaataaccataaagcaaaaaataatttgaaagcccgtctattcctatgctcaataaagttaagtttttcttcattagaacagttttatgatttatttgtctaggagtatgtcagaaaaatcaggcttttagtaggaattactcctattccccctgaagtcaggaccagtgcctgtgatctccattactttattttcctggaggtattagccaacacagttagatcagagaaagcaattgaagccaggcatgaaggctggcgcccgtaatcccagctactaaggctggaggatcacttcagcccaggagtttaaggctgcagtgagctatgatgatgccactgtactgcagcttgggtaacagattgagaacctgtctcattaaaaaaaaaaaaaaaaaaaaagccgttagacacacaggaaaaatccagaagggtaaactaaactaaagctacaattaatatgggaatttggaagaagtggtaggatttaaaatacagaaacagtttatgtataggatagctataagtaaatactgaaacacattatgcctctgtaattggggttgacacatgaacagaatagcagacacaatgcatatgaaagttacagaatatggtaaaagtggggtaaagatgggtttttaatgatactaagataactgaaaataggcatatagatatattccaagccgcctgacgatctaattgtaaaaagtaaagcatacaaatactagaagaaaatggaggaaaacgacattatatgtgacttaaaacctagaagaaataaataaaactattgatcaattttaactacataaaaatgtttataggacaagaaaaaccccaccataacccaaggcaaacaatgtattgacaggattccaataattaagaatacttcatacaaaaagaaatgtaaatgacctttaacatgtaaagatgctcaccttgttcagaagagaataaaccagtgtttttacctttcacttg

SEQ ID NO: 179949 - DNA, 243 bp, Artificial Sequence
  derived and/or modified sequence
atggccagcgaagagctgcagaaggacctggaggaagttaaagtcctgctggagaaggccacgcgtaagcgagtacgggatgctctcacggccgagaaatccaaaatcgagaccgagatcaaaaacaaaatgcaacagaagtcccagaaaaaagctgagctgctggataatgaaaagcccgctgctgtcgtagccccaataactacagggtacaccgacgggatttcacagatcagtctatag

SEQ ID NO: 179950 - DNA, 153 bp, Artificial Sequence
  derived and/or modified sequence
atggccagcgaggaattgcagaaagacctggaggaggttaaggtgcttctcgagaaagcaacacggaagcgtgttagggacgcattaacggccgagaaaagcaaaatcgagaccgaaattaagaataaaatgcagcagaaatctcagaaatag

SEQ ID NO: 179951 - DNA, 687 bp, Artificial Sequence
  derived and/or modified sequence
atggccagcgaggagctgcagaaggacctggaggaggtgaaggtgctgctggagaaggccaccaggaagagggtgagagatgccctgacagctgagaagagcaagattgaaacagagatcaagaacaagatgcagcagaagagccagaagaaggccgagctgctggacaatgagaagccagctgctgtggtggcccccatcaccaccggctacacagtgaagatcagcaactacggctgggaccagagcgacaagtttgtgaagatctacatcaccctgactggagtgcaccaggtgcccacagaaaatgtgcaggtgcacttcacagagaggagctttgacctgctggtgaagaacctgaatggcaagagctacagcatgattgtgaacaacctgctgaagcccatctctgtggagggcagcagcaagaaggtgaagacagacacagtgctgatcctgtgcaggaagaaggtggagaacacccgctgggactacctgacccaggtggagaaggagtgcaaggagaaggagaagcccagctatgacacagaaacagaccccagcgagggcctgatgaatgtgctgaagaagatctatgaagatggagatgatgacatgaagaggaccatcaacaaggcctgggtggagagccgggagaagcaggccaagggggacacagagttctag

SEQ ID NO: 179952 - DNA, 243 bp, Artificial Sequence
  derived and/or modified sequence
atggccagcgaggagctgcagaaggacctggaggaggtgaaggtgctgctggagaaggccaccaggaagagggtgagagatgccctgacagctgagaagagcaagattgaaacagagatcaagaacaagatgcagcagaagagccagaagaaggccgagctgctggacaatgagaagccagctgctgtggtggcccccatcaccaccggctacacagatggcatcagccagatcagcctgtag

SEQ ID NO: 179953 - DNA, 153 bp, Artificial Sequence
  derived and/or modified sequence
atggccagcgaggagctgcagaaggacctggaggaggtgaaggtgctgctggagaaggccaccaggaagagggtgagagatgccctgacagctgagaagagcaagattgaaacagagatcaagaacaagatgcagcagaagagccagaagtag

SEQ ID NO: 179954 - DNA, 687 bp, Artificial Sequence
  derived and/or modified sequence
atggccagcgaggagctgcagaaggacctggaggaggtgaaggtgctgctggaaaaagccacccggaagcgggtgcgagatgcactgactgctgaaaagtcaaaaatcgaaaccgagatcaagaataaaatgcagcaaaaatctcagaaaaaagctgagctattggataacgaaaaaccggccgctgttgttgcaccaatcactactggctatacagtcaaaataagtaattacggctgggaccaaagtgacaagttcgtgaagatttacattaccttgactggcgtgcatcaggtgccaacagagaatgtccaggtacactttactgaacgatcctttgatcttctcgtgaaaaacctgaatggcaagtcctattcaatgatcgtcaacaacctgctgaaacctatttcagtcgagggctcttcgaaaaaggtgaagacagatactgttctcattctctgccgcaagaaagtagaaaatacaagatgggattacttaacccaggtggaaaaagaatgtaaggaaaaggagaagccctcctacgatactgagactgacccgtcagagggtctgatgaatgtcctgaagaagatctacgaggatggcgacgatgatatgaaacggaccatcaataaggcatgggttgagtctcgggaaaagcaagccaagggggatacagagttctag

SEQ ID NO: 179955 - DNA, 243 bp, Artificial Sequence
  derived and/or modified sequence
atggccagcgaggagctgcagaaggacctggaggaggtgaaggtgctattggagaaggcaaccaggaagcgggtccgagatgctctgactgccgaaaagagcaagattgaaactgagatcaaaaacaagatgcagcagaaaagtcagaagaaggccgagctgttagacaacgaaaagcccgctgcagttgttgcgcctatcacgaccggatatacggacggaatatcccagatatccttgtag

SEQ ID NO: 179956 - DNA, 153 bp, Artificial Sequence
  derived and/or modified sequence
atggccagcgaggagctgcagaaggacctggaggaggtgaaggtgctcctggagaaggcgacgagaaaacgtgtgagagatgccctgactgcagaaaaatctaagatcgaaactgagattaagaataagatgcaacagaaatctcagaaatag

SEQ ID NO: 179957 - DNA, 1059 bp, Artificial Sequence
  derived and/or modified sequence
atattccttatgccccccggctggagctgcagcgccagcctcccgccctaccgccgtttccgtgggctgagccgccctgcggccacccggtcccgcgccagtcagtgcgccgccttcccgggggacacctcactcgccccttgctgcgccgtcggctccccagcgcttccactcgacctcgcaccccactcgcctgctgggctcgagcgggggtgtgcggcgattatccgtgcaggcggtgcggggagtgggtctgggagagcggccctttgcgcgtgttcctcaggccctttctgccctggtttcccagccagtggacaggaagcttcattcaagcaaagctgggtgcaaacatgagtgtcgttcttggtagagggcggttggaagctacagaaagatctagaagaggtaaaggtgttgctggaaaaggctactaggaaaagagtacgtgatgcccttacagctgaaaaatccaagattgagacagaaatcaagaacaagatgcaacagaaatcacagaagaaagcagaacttcttgataatgaaaaaccagctgctgtggttgctcccattacaacgggctatacggtgaaaatcagtaattatggatgggatcagtcagataagtttgtgaaaatctacattaccttaactggagttcatcaagttcccactgagaatgtgcaggtgcatttcacagagaggtcatttgatcttttggtaaagaatctaaatgggaagagttactccatgattgtgaacaatctcttgaaacccatctctgtggaaggcagttcaaaaaaagtcaagactgatacagttcttatattgtgtagaaagaaagtggaaaacacaaggtgggattacctgacccaggttgaaaaggagtgcaaagaaaaagagaagccctcctatgacactgaaacagatcctagtgagggattgatgaatgttctaaagaaaatttatgaagatggagacgatgatatgaagcgaaccattaataaagcctgggtggaatcaagagagaagcaagccaaaggagacacggaattttga

SEQ ID NO: 179958 - DNA, 243 bp, Artificial Sequence
  derived and/or modified sequence
atggcttcagaagagctacagaaagatctagaagaggtaaaggtgttgctggaaaaggctactaggaaaagagtacgtgatgcccttacagctgaaaaatccaagattgagacagaaatcaagaacaagatgcaacagaaatcacagaagaaagcagaacttcttgataatgaaaaaccagctgctgtggttgctcccattacaacgggctatacggatgggatcagtcagataagtttgtga

SEQ ID NO: 179959 - DNA, 687 bp, Artificial Sequence
  derived and/or modified sequence
atggcaagtgaggaattgcagaaagatctcgaagaagttaaggtgctcctggagaaggctacccggaaacgagtgcgggatgccttgacagcggagaaaagtaagatcgaaaccgaaatcaagaacaagatgcagcagaaatcccagaagaaggcagagctgctcgacaacgaaaaacctgcagctgtggtggccccaattaccactggctacacagttaagatttctaactatggctgggaccagagtgataaattcgttaaaatatacatcaccctgacaggcgttcaccaggttccgactgagaatgttcaggtgcatttcactgagaggtcctttgatttgctggtgaaaaacctgaatggtaagtcctactccatgatcgttaataacctgctgaaaccaatctcagtggaaggttcgagcaagaaggtgaaaactgacactgtgctgatactttgtcgcaaaaaagtggaaaacactcggtgggactatctgactcaggtggaaaaagagtgtaaggagaaggagaagccttcttatgataccgaaacagatccttcagagggtctgatgaatgtgctgaaaaagatctatgaggatggtgatgatgatatgaagagaaccatcaataaagcctgggtagaatcaagagagaagcaggccaagggcgacactgagttctag

SEQ ID NO: 179960 - DNA, 243 bp, Artificial Sequence
  derived and/or modified sequence
atggctagcgaagaactgcagaaagacctggaggaggtgaaagtgctgctggagaaagcgaccaggaagcgtgtgagagacgcactgacggcagaaaaatctaagattgaaaccgaaatcaagaacaaaatgcagcaaaagtctcaaaagaaggctgagctactcgataatgagaaacccgctgccgtagtcgctccaattacaaccgggtacacggatggcatcagccagataagcctctag

SEQ ID NO: 179961 - DNA, 153 bp, Artificial Sequence
  derived and/or modified sequence
atggcgtccgaggaactccagaaggacttagaagaagtgaaagtacttctcgagaaggcaacacggaagagagtgagggatgcgctgacagccgaaaagtctaaaatcgagaccgagattaaaaataagatgcagcagaagagccagaaatag

SEQ ID NO: 179962 - DNA, 499 bp, Artificial Sequence
  derived and/or modified sequence
agaccgcggtgacgtctccaccgcgccaaactcactgaaaatcaaaccgctaccattaggagccctccacgcttaacatatccgttctttctcgtttgaaagtaaccaggctgctcctccccatttttcgccttcttctcgcggaggctgagagactaaccttacacaacatggcggcctggtgtgtctggtgtcctagagcggacgaaagcaggtgactctctagtcaacttccgacttggactccgaagatcggcgtctgcgctcggtttgagggctcggcgcggggtttcctgttcctccttctgcgcggctgcagctcgggacttcggcctgacccagcccccatggcttcagaagagctacagaaagatctagaagaggtaaaggtgttgctggaaaaggctactaggaaaagagtacgtgatgcccttacagctgaaaaatccaagattgagacagaaatcaagaacaagatgcaacagaaatcacagaagaa

SEQ ID NO: 179963 - protein, 630 aa, Artificial Sequence
  derived and/or modified sequence
MQGGNSGVRKREEEGDGAGAVAAPPAIDFPAEGPDPEYDESDVPAEIQVLKEPLQQPTFPFAVANQLLLVSLLEHLSHVHEPNPLRSRQVFKLLCQTFIKMGLLSSFTCSDEFSSLRLHHNRAITHLMRSAKERVRQDPCEDISRIQKIRSREVALEAQTSRYLNEFEELAILGKGGYGRVYKVRNKLDGQYYAIKKILIKGATKTVCMKVLREVKVLAGLQHPNIVGYHTAWIEHVHVIQPRADRAAIELPSLEVLSDQEEDREQCGVKNDESSSSSIIFAEPTPEKEKRFGESDTENQNNKSVKYTTNLVIRESGELESTLELQENGLAGLSASSIVEQQLPLRRNSHLEESFTSTEESSEENVNFLGQTEAQYHLMLHIQMQLCELSLWDWIVERNKRGREYVDESACPYVMANVATKIFQELVEGVFYIHNMGIVHRDLKPRNIFLHGPDQQVKIGDFGLACTDILQKNTDWTNRNGKRTPTHTSRVGTCLYASPEQLEGSEYDAKSDMYSLGVVLLELFQPFGTEMERAEVLTGLRTGQLPESLRKRCPVQAKYIQHLTRRNSSQRPSAIQLLQSELFQNSGNVNLTLQMKIIEQEKEIAELKKQLNLLSQDKGVRDDGKDGGVG

SEQ ID NO: 179964 - protein, 577 aa, Artificial Sequence
  derived and/or modified sequence
MNQTHFVQDRCLSDPCEDISRIQKIRSREVALEAQTSRYLNEFEELAILGKGGYGRVYKVRNKLDGQYYAIKKILIKGATKTVCMKVLREVKVLAGLQHPNIVGYHTAWIEHVHVIQPRADRAAIELPSLEVLSDQEEDREQCGVKNDESSSSSIIFAEPTPEKEKRFGESDTENQNNKSVKYTTNLVIRESGELESTLELQENGLAGLSASSIVEQQLPLRRNSHLEESFTSTEESSEENVNFLGQTEAQYHLMLHIQMQLCELSLWDWIVERNKRGREYVDESACPYVMANVATKIFQELVEGVFYIHNMGIVHRDLKPRNIFLHGPDQQVKIGDFGLACTDILQKNTDWTNRNGKRTPTHTSRVGTCLYASPEQLEGSEYDAKSDMYSLGVVLLELFQPFGTEMERAEVLTGLRTGQLPESLRKRCPVQAKYIQHLTRRNSSQRPSAIQLLQSELFQNSGNVNLTLQMKIIEQEKEIAELKKQLNLLSQDKGFSVIPKPHPCKALYSAPQMISRQLRSLSCLCPALFPGTSSFIVALSSPANLYIPQRQRSDELVFESQKGSAMELAVITVDGV

SEQ ID NO: 179965 - DNA, 4463 bp, Artificial Sequence
  derived and/or modified sequence
cccccagtgaaggtgcgcgcgtggcggaggctggttttccgtctggtgaggggttacttccgggtcggacggcgctagctgcagcatcggagtgtggcagtgctgggctggccggcgggctgggctgcggcccgcgcgcggccggcgatgcaggggggcaactccggggtccgcaagcgcgaagaggagggcgacggggctggggctgtggctgcgccgccggccatcgactttcccgccgagggcccggaccccgaatatgacgaatctgatgttccagcagaaatccaggtgttaaaagaacccctacaacagccaaccttcccttttgcagttgcaaaccaactcttgctggtttctttgctggagcacttgagccacgtgcatgaaccaaacccacttcgttcaagacaggtgtttaagctactttgccagacgtttatcaaaatggggctgctgtcttctttcacttgtagtgacgagtttagctcattgagactacatcacaacagagctattactcacttaatgaggtctgctaaagagagagttcgtcaggatccttgtgaggatatttctcgtatccagaaaatcagatcaagggaagtagccttggaagcacaaacttcacgttacttaaatgaatttgaagaacttgccatcttaggaaaaggtggatacggaagagtatacaaggtcaggaataaattagatggtcagtattatgcaataaaaaaaatcctgattaagggtgcaactaaaacagtttgcatgaaggtcctacgggaagtgaaggtgctggcaggtcttcagcaccccaatattgttggctatcacaccgcgtggatagaacatgttcatgtgattcagccacgagcagacagagctgccattgagttgccatctctggaagtgctctccgaccaggaagaggacagagagcaatgtggtgttaaaaatgatgaaagtagcagctcatccattatctttgctgagcccaccccagaaaaagaaaaacgctttggagaatctgacactgaaaatcagaataacaagtcggtgaagtacaccaccaatttagtcataagagaatctggtgaacttgagtcgaccctggagctccaggaaaatggcttggctggtttgtctgccagttcaattgtggaacagcagctgccactcaggcgtaattcccacctagaggagagtttcacatccaccgaagaatcttccgaagaaaatgtcaactttttgggtcagacagaggcacagtaccacctgatgctgcacatccagatgcagctgtgtgagctctcgctgtgggattggatagtcgagagaaacaagcggggccgggagtatgtggacgagtctgcctgtccttatgttatggccaatgttgcaacaaaaatttttcaagaattggtagaaggtgtgttttacatacataacatgggaattgtgcaccgagatctgaagccaagaaatatttttcttcatggccctgatcagcaagtaaaaataggagactttggtctggcctgcacagacatcctacagaagaacacagactggaccaacagaaacgggaagagaacaccaacacatacgtccagagtgggtacttgtctgtacgcttcacccgaacagttggaaggatctgagtatgatgccaagtcagatatgtacagcttgggtgtggtcctgctagagctctttcagccgtttggaacagaaatggagcgagcagaagttctaacaggtttaagaactggtcagttgccggaatccctccgtaaaaggtgtccagtgcaagccaagtatatccagcacttaacgagaaggaactcatcgcagagaccatctgccattcagctgctgcagagtgaacttttccaaaattctggaaatgttaacctcaccctacagatgaagataatagagcaagaaaaagaaattgcagaactaaagaagcagctaaacctcctttctcaagacaaaggggtgagggatgacggaaaggatgggggcgtgggatgaaagtggacttaacttttaaggtagttaactggaatgtaaatttttaatctttattagggtatagttggtacaatgcttcgttgtatttagtaagcctttacaagacttgttaaagatgtcagagtgccccaagctgccgttccttcccttcctgccccacaagctccttttcctgaatttcctacctaaatattaaccatatgcctagtctctgaaactaaaaacttggacctcatcctcaattattttctcctttcaactctgttgaccctctgtctggtcttcctctagaaggtaccgcagaaattgatgtgtgctccctgccctcgtcactgcccaagcccgggcctgcacatactcactggactgttccagttttgacagctgccagtcttcctgcccctttcacactgcagctgaagttcattacctgaaggacgcctcatcatttcattccttggctccaaaccttctgctgcctctaagataaaagctcaacttcttaacagtgtacagtgtgcaacttccaacctttttatctgttctctccaccttcagtttagcgtcattccaaaaccacacccttgcaaagctttgtactccgcaccccagatgatctccaggcagctcagatctctttcctgcctttgccctgcactgttccccggtacttcctcctttattgtagcactcagctccccagccaatctgtacatccctcagaggcagcgatctgatgaattggtttttgaatcccagaaagggtctgccatggagttggcagtcatcacggtagatggcgtatgattttgctgaattttaaataaaatgaaaaccataaattacatgatgcttttattgacacttgacaactggcctaaataaaaagactctgactctaatacaagtccccttactgataataggcatgaaagagcaccattcttaaaatctaaaccctttaaaatcagttacggcaattcacttaaggagcttgagggccgtgttaaaaggagccaggttttcacaagacctcatccacctctgcacattggctggcactgtcacactgcagcctccgatctgctggagtacagaccacagcaccacgtctgctacggtgagttcattcccagcgagccaagggctcttcccaagagcagagttcatggagcggaaaacagcggctttttctttactgcttccctcttttaactgaaaaatcgcaatatctacccagctatctataagggttgcgttgacagcattatgcttctggccaaacagagagaacaagaaacgtgcaatgttcccttcgccttcgatggggcacatcgtctggatgctgaatttcatctgcgtcttcggcactgaaaagaaaaaacacgccaggtagcatcaccagagcagccctgagggaagtactcgcacagtggggaaggggacagtcaccaaacaccacagactgatgacatgggaaagggtgttttcaagaagaacatcacattttcagtctgtctctaagatgcttactactgaaaagggtttaagtgcaaactatgttaaaaaagtaaccaaagagtcattcctggtatttgattatgacacttctgaagctagaagggacctcagaccacctgctccaatccctgctgcctaaggttttgggggctgagggctggaaacccaggagctgcatctcccaggctcttggcctcataatcgccttctgtgagactgagggcaattaagatatgaatgacatgaactcgcttatctccatatcaacataaaccagaagaggcatacatctgtgggatagtcaatacataacatcctatctttatatggccatatgagaagataacttcagtgtccctatgatggtaagttcttgaatgtgagggcaagatggctgtgatagccatgactccccgctttgcctggttggacagaacccccttccccaaatgctcacagtcccccccttgagctgtgtctcactcagagaccctaaattttgcagacgaacaagggcatctttgcgttgcttcatctctgctcctcctctagaactatcccacaggctttctagacttagaatatctgacctgatgcaaatcgctatgtggccagtatgccacagaatgtcctaaacccttgctgcctcttatcaaaaccatgttgcacatctcatcatatagtacagctaacccttgaacagtgggggggttagggacactgacccccgactgctgtgcagtcgaaaatccacataaaacttctgactccttcaaaacttaagcactaatagcctactattcatgggaagccttacccatcacagttgattaacacgttttgtatggtctgtatattatatgctatattcttacaataaacttgagaaaatgttaagaaaa

SEQ ID NO: 179966 - DNA, 2294 bp, Artificial Sequence
  derived and/or modified sequence
ggacggcgctagctgcagcatcggagtgtggcagtgctgggctggccggcgggctgggctgcggcccgcgcgcggccggcgatgcaggggggcaactccggggtccgcaagcgcgaagaggagggcgacggggctggggctgtggctgcgccgccggccatcgactttcccgccgagggcccggaccccgaatatgacgaatctgatgttccagcagaaatccaggtgttaaaagaacccctacaacagccaaccttcccttttgcagttgcaaaccaactcttgctggtttctttgctggagcacttgagccacgtgcatgaaccaaacccacttcgttcaagacaggtgtttaagcgatccttgtgaggatatttctcgtatccagaaaatcagatcaagggaagtagccttggaagcacaaacttcacgttacttaaatgaatttgaagaacttgccatcttaggaaaaggtggatacggaagagtatacaaggtcaggaataaattagatggtcagtattatgcaataaaaaaaatcctgattaagggtgcaactaaaacagtttgcatgaaggtcctacgggaagtgaaggtgctggcaggtcttcagcaccccaatattgttggctatcacaccgcgtggatagaacatgttcatgtgattcagccacgagcagacagagctgccattgagttgccatctctggaagtgctctccgaccaggaagaggacagagagcaatgtggtgttaaaaatgatgaaagtagcagctcatccattatctttgctgagcccaccccagaaaaagaaaaacgctttggagaatctgacactgaaaatcagaataacaagtcggtgaagtacaccaccaatttagtcataagagaatctggtgaacttgagtcgaccctggagctccaggaaaatggcttggctggtttgtctgccagttcaattgtggaacagcagctgccactcaggcgtaattcccacctagaggagagtttcacatccaccgaagaatcttccgaagaaaatgtcaactttttgggtcagacagaggcacagtaccacctgatgctgcacatccagatgcagctgtgtgagctctcgctgtgggattggatagtcgagagaaacaagcggggccgggagtatgtggacgagtctgcctgtccttatgttatggccaatgttgcaacaaaaatttttcaagaattggtagaaggtgtgttttacatacataacatgggaattgtgcaccgagatctgaagccaagaaatatttttcttcatggccctgatcagcaagtaaaaataggagactttggtctggcctgcacagacatcctacagaagaacacagactggaccaacagaaacgggaagagaacaccaacacatacgtccagagtgggtacttgtctgtacgcttcacccgaacagttggaaggatctgagtatgatgccaagtcagatatgtacagcttgggtgtggtcctgctagagctctttcagccgtttggaacagaaatggagcgagcagaagttctaacaggtttaagaactggtcagttgccggaatccctccgtaaaaggtgtccagtgcaagccaagtatatccagcacttaacgagaaggaactcatcgcagagaccatctgccattcagctgctgcagagtgaacttttccaaaattctggaaatgttaacctcaccctacagatgaagataatagagcaagaaaaagaaattgcagaactaaagaagcagctaaacctcctttctcaagacaaagggtttagcgtcattccaaaaccacacccttgcaaagctttgtactccgcaccccagatgatctccaggcagctcagatctctttcctgcctttgccctgcactgttccccggtacttcctcctttattgtagcactcagctccccagccaatctgtacatccctcagaggcagcgatctgatgaattggtttttgaatcccagaaagggtctgccatggagttggcagtcatcacggtagatggcgtatgattttgctgaattttaaataaaatgaaaaccataaattacatgatgcttttattgacacttgacaactggcctaaataaaaagactctgactctaatacaagtccccttactgataataggcatgaaagagcaccattcttaaaatctaaaccctttaaaatcagttacggcaattcacttaaggagcttgagggccgtgttaaaaggagccaggttttcacaagacctcatccacctctgc

SEQ ID NO: 179967 - DNA, 1893 bp, Artificial Sequence
  derived and/or modified sequence
atgcagggcggcaacagcggggtgcgaaaaagagaagaagagggagatggcgccggcgccgtggctgctcctccagctatcgactttcctgcagaaggtcctgatccagaatacgacgaaagtgacgtacctgcggaaattcaggtgctcaaagagccgctgcaacagcctacattcccctttgcagtcgcaaaccaactgctgctggtgtccctgctggagcatctgagtcacgttcacgaacccaacccgcttaggtcacgccaggtgttcaagctgctgtgtcagacatttattaagatgggtctactgtcttcgtttacgtgttctgacgaattctcctcgcttcggctgcaccacaatcgtgctatcactcatttgatgcgaagcgccaaggagagagtgcgtcaggatccatgtgaggatatttcacggattcagaagatacggagccgagaagtggctctggaagcacaaacatccagatacctgaacgaatttgaagagctcgcgatcctggggaaaggaggatacggtagagtgtataaggtgagaaataagttggatggacagtattacgcgatcaagaaaattctcatcaaaggggccactaagaccgtgtgtatgaaggtcctcagggaagtaaaggtccttgccggcttacagcatcccaatatcgtgggctaccacactgcttggatcgagcacgtacacgtgattcagccccgcgccgatagagctgctatcgaacttccgtccctggaagtcctgagcgatcaagaagaggacagagagcagtgtggggtgaagaatgatgagtcttcatcttcctcgatcatatttgctgagcccacacccgagaaagagaagaggttcggagaatctgacaccgaaaaccagaacaacaaaagcgtgaagtacacgaccaacctcgtaatcagggaatcgggggaactggagagtacgctagaactccaggaaaatgggctcgcaggattaagtgcatcctctatcgtggagcagcaactgccgctcaggaggaattcccaccttgaggagtccttcactagtacagaggagtctagtgaggagaacgtgaactttctcgggcagacagaggctcagtaccacttaatgctccatattcagatgcagctatgcgagctctccctgtgggattggattgttgagcggaataaacgcggacgcgaatatgtcgacgaaagtgcttgtccctacgtgatggccaatgtggctactaagattttccaggaactggtggagggagtgttctatatccacaatatgggcatcgtccaccgggatctcaaacctcggaacatcttcttgcatgggcctgatcagcaggtcaaaattggggactttggcctcgcctgtaccgacatccttcagaaaaacaccgattggaccaatcggaacggaaaacggacacctacccacacctctagggtggggacgtgcctttatgcctctcccgagcaactggagggctccgaatacgatgcgaagtctgatatgtactcgctgggtgtggtgctgctggaactcttccagccgtttggtacagaaatggaacgcgccgaagttttgaccggcctgaggaccggtcagctacctgaatctctaaggaagcgctgccccgtgcaggccaagtacattcagcacttgactagacggaactcaagtcagcgaccctccgctattcagctgctgcagagcgaactttttcagaattccggaaacgtgaacttgactctgcagatgaagattattgagcaggaaaaggaaatcgccgagctcaaaaagcaactgaacctgttgtctcaagataaaggagtccgagacgatggcaaggatggcggtgtgggctag

SEQ ID NO: 179968 - DNA, 1734 bp, Artificial Sequence
  derived and/or modified sequence
atgaatcagacccacttcgtgcaagataggtgtctcagcgatccatgcgaggacatctctcgtatccagaagatccgcagccgtgaggttgcacttgaagcacagacaagcagatacctcaacgagttcgaggagctggccatcttgggtaaggggggatacggtcgagtttacaaggtacggaataagttggatgggcaatactacgccatcaagaaaatactcattaaaggagccacaaaaactgtgtgcatgaaggtgctccgggaggtgaaggtcctggctgggttacaacatcccaacatcgtcgggtaccacaccgcctggattgagcatgtccacgttatccagccaagggcagatcgggccgcaatcgaactaccaagcctcgaagtactgtccgatcaagaagaggacagggagcagtgcggggtgaagaacgacgagtccagctcttcttccatcatttttgccgagcccacaccagagaaagaaaagagattcggtgagagcgacacagagaaccagaacaacaagtctgtgaagtacacaactaatctcgtgatccgcgagtccggggagctggagagcactttggagcttcaggagaatggcttagctgggctgtctgcgtcttcaattgttgagcagcagctgcccctgcggcgcaatagtcacctggaggagagcttcacgagcacagaagagagcagtgaggaaaacgtgaatttccttggccagaccgaggcgcagtaccacctgatgcttcacattcagatgcaattgtgcgaactatcgctatgggactggatcgtggagaggaacaaacggggtagagaatatgttgacgagagtgcttgcccatatgtgatggctaatgtggccacaaagattttccaggagctggtggagggagttttctacatccataatatgggtatagtgcaccgggatctgaaacccaggaatatctttcttcacggtcctgatcagcaagtaaagattggcgactttggccttgcatgcactgatatactgcagaagaataccgactggaccaatcgaaacggtaaaagaacacctacacatacttctcgcgtgggaacttgtttgtatgctagtccagaacagctagagggttccgaatatgatgctaagagcgacatgtatagtctgggcgtcgtactgcttgagttgtttcagccattcggaacggaaatggagcgggctgaagtgctgacaggcttacgcaccgggcagcttccagaaagtctgcggaaaaggtgccctgtgcaagctaagtacattcagcatctgaccaggaggaactccagccagcgccccagcgcaattcaattgttgcagagtgagctgtttcagaacagtggaaacgtgaatctgaccctccagatgaagatcatcgagcaggaaaaggagatcgctgaactgaagaagcagcttaatctgctcagtcaggataaaggcttttccgtgatccccaagcctcatccttgtaaagccctgtacagcgctccgcagatgatatcccggcagttacgttccttgagctgtctctgtccagcactctttcctgggacctcgagctttattgtggccttatcatcaccggccaacctgtacataccacagagacagcggtcagatgaactcgtctttgaaagccagaagggctctgccatggagttagccgttattaccgtcgacggtgtatag

SEQ ID NO: 179969 - DNA, 1893 bp, Artificial Sequence
  derived and/or modified sequence
atgcagggcggcaacagcggcgtgaggaagcgggaggaggagggagatggagctggagctgtggccgcccccccagccatcgacttccctgctgagggccctgaccctgaatatgatgaaagtgatgtgcctgctgagatccaggtgctgaaggagcccctgcagcagcccaccttcccctttgctgtggccaaccagctgctgctggtgtccctgctggagcacctgagccacgtgcatgagcccaaccccctgcggagccggcaggtgttcaagctgctgtgccagaccttcatcaagatgggcctgctgagcagcttcacctgcagtgatgagttcagcagcctgcggctgcaccacaacagagccatcacccacctgatgaggtctgccaaggagcgggtgcggcaggacccctgtgaggacatcagccgcatccagaagatccgcagccgggaggtggccctggaggcccagaccagccgctacctgaatgaatttgaggagctggccatcctgggcaaaggaggctacggccgggtgtacaaggtgaggaacaagctggatggccagtactatgccatcaagaagatcctgatcaagggggccaccaagacagtgtgcatgaaggtgctgcgggaggtgaaggtgctggccggcctgcagcaccccaacatcgtgggctaccacacagcctggattgagcacgtgcacgtgatccagcccagggctgacagagctgccatcgagctgcccagcctggaggtgctgagtgaccaggaggaggaccgggagcagtgtggggtgaagaatgatgagagcagcagcagcagcatcatctttgctgagcccaccccagagaaggagaagagatttggagagagtgacacagagaaccagaacaacaagtctgtgaagtacaccaccaacctggtgatccgggagagcggggagctggagagcaccctggagctgcaggagaatggcctggccggcctgagcgccagcagcatcgtggagcagcagctgcccctgcggaggaacagccacctggaggagagcttcaccagcacagaggagagcagcgaggagaatgtgaacttcctgggccagacagaggcccagtaccacctgatgctgcacatccagatgcagctgtgtgagctgagcctgtgggactggatcgtggagaggaacaagaggggccgggagtatgtggatgaaagtgcctgcccctacgtgatggccaacgtggccaccaagatcttccaggagctggtggagggcgtcttctacatccacaacatgggcatcgtgcaccgggacctgaagcccaggaacatcttcctgcacggccctgaccagcaggtgaagattggagactttggcctggcctgcacagacatcctgcagaagaacacagactggaccaacagaaatggcaagaggacccccacccacaccagccgggtgggcacctgcctgtatgccagccctgagcagctggagggctctgaatatgatgccaagagtgacatgtacagcctgggcgtggtgctgctggagctgttccagccctttggaacagagatggagcgggcagaggtgctgaccggcctgaggacaggccagctgcctgagagcctgaggaagcgctgccctgtgcaggccaagtacatccagcacctgaccaggaggaacagcagccagaggccttctgccatccagctgctgcagagcgagctgttccagaacagcggaaatgtgaacctgaccctgcagatgaagatcatcgagcaggagaaggagattgctgagctgaagaagcagctgaacctgctgagccaggacaagggcgtgagagatgatggcaaggatggcggcgtgggctag

SEQ ID NO: 179970 - DNA, 1734 bp, Artificial Sequence
  derived and/or modified sequence
atgaaccagacccactttgtgcaggaccgctgcctgagtgacccctgtgaggacatcagccgcatccagaagatccgcagccgggaggtggccctggaggcccagaccagccgctacctgaatgaatttgaggagctggccatcctgggcaaaggaggctacggccgggtgtacaaggtgaggaacaagctggatggccagtactatgccatcaagaagatcctgatcaagggggccaccaagacagtgtgcatgaaggtgctgcgggaggtgaaggtgctggccggcctgcagcaccccaacatcgtgggctaccacacagcctggattgagcacgtgcacgtgatccagcccagggctgacagagctgccatcgagctgcccagcctggaggtgctgagtgaccaggaggaggaccgggagcagtgtggggtgaagaatgatgagagcagcagcagcagcatcatctttgctgagcccaccccagagaaggagaagagatttggagagagtgacacagagaaccagaacaacaagtctgtgaagtacaccaccaacctggtgatccgggagagcggggagctggagagcaccctggagctgcaggagaatggcctggccggcctgagcgccagcagcatcgtggagcagcagctgcccctgcggaggaacagccacctggaggagagcttcaccagcacagaggagagcagcgaggagaatgtgaacttcctgggccagacagaggcccagtaccacctgatgctgcacatccagatgcagctgtgtgagctgagcctgtgggactggatcgtggagaggaacaagaggggccgggagtatgtggatgaaagtgcctgcccctacgtgatggccaacgtggccaccaagatcttccaggagctggtggagggcgtcttctacatccacaacatgggcatcgtgcaccgggacctgaagcccaggaacatcttcctgcacggccctgaccagcaggtgaagattggagactttggcctggcctgcacagacatcctgcagaagaacacagactggaccaacagaaatggcaagaggacccccacccacaccagccgggtgggcacctgcctgtatgccagccctgagcagctggagggctctgaatatgatgccaagagtgacatgtacagcctgggcgtggtgctgctggagctgttccagccctttggaacagagatggagcgggcagaggtgctgaccggcctgaggacaggccagctgcctgagagcctgaggaagcgctgccctgtgcaggccaagtacatccagcacctgaccaggaggaacagcagccagaggccttctgccatccagctgctgcagagcgagctgttccagaacagcggaaatgtgaacctgaccctgcagatgaagatcatcgagcaggagaaggagattgctgagctgaagaagcagctgaacctgctgagccaggacaagggcttcagcgtcatccccaagccccacccctgcaaggccctgtacagcgccccccagatgatcagccggcagctgcggagcctgagctgcctgtgcccagccctcttccctggcaccagcagcttcatcgtggccctgagcagccctgccaacctgtacatcccccagaggcagaggagtgatgagctggtgtttgagagccagaagggcagcgccatggagctggccgtcatcaccgtggatggagtgtag

SEQ ID NO: 179971 - DNA, 1893 bp, Artificial Sequence
  derived and/or modified sequence
atgcagggcggcaacagcggcgtgcggaagcgggaggaggagggcgatggcgccggcgcagtcgcagccccccctgcaattgatttccctgccgagggcccggacccggagtacgatgagagcgacgtgccagctgagatacaggtgctcaaggaaccactgcagcagcccaccttccccttcgcggtggcaaaccagctactgcttgtttctcttttggagcacctgtctcatgtgcacgagcccaatcccttaaggtctaggcaggttttcaaattactctgtcagacattcatcaagatgggcctgctgagctctttcacttgctctgacgaattttcctccctcaggctccaccacaacagagctatcacccacctaatgaggtctgctaaggaacgagtgcggcaggatccctgtgaggacatctctaggattcagaaaatccgctctcgagaagtcgcccttgaagcacagactagccggtatttgaatgaattcgaggaactggccatcctaggtaaaggcggatatggccgcgtgtataaagtccgtaataaactggatggacaatattatgctattaaaaaaatcttaatcaaaggagccaccaaaacggtctgtatgaaggtcctgagagaggtcaaggtgttagctgggctacagcaccccaatattgtgggataccacaccgcatggatcgagcacgtgcacgtcattcagcctcgcgcggatcgagctgccatagagctcccttcactcgaggtactttccgatcaggaggaggacagagagcagtgtggagtgaaaaacgatgagagctcctctagtagcattattttcgcggaacctaccccggaaaaagaaaaacggtttggagaatcggacacggaaaatcaaaataacaaaagcgtgaagtacactacgaacctcgttatccgtgagagtggcgagttggaatccacattggagttacaggaaaacgggttggcggggctttcagcttctagcatcgtggagcagcagctgccgctgaggaggaactctcacctcgaggaatctttcactagtaccgaggagtccagtgaagagaacgttaatttcctgggccagaccgaagcacagtatcatttaatgctgcacatccagatgcagttgtgtgaactgagcctgtgggactggatagtcgaacgcaataagaggggaagggagtatgttgacgagtccgcttgtccttacgtgatggcaaacgtggctaccaaaatctttcaggagctggtcgaaggcgtgttttatatacacaacatgggaatcgtgcatagggatctgaagccacgcaacatttttctccacgggcccgatcagcaggtgaaaattggagatttcggactggcctgtaccgatattctccaaaagaatacagattggaccaatagaaacggcaagagaacccccacacatacctcaagagtcggcacctgcttgtacgccagtcctgagcagctcgaaggaagcgaatatgacgccaagagcgatatgtacagcctcggcgttgtgctcctggagctgtttcagccgttcgggacagagatggagagggctgaagtcctgaccggactcagaactggacaacttccggaaagtcttcggaagcgatgccctgtgcaggctaaatatatacagcatctgacgcgaaggaactcgtcacagaggcctagcgccatccagctgctccagagcgagctgtttcagaattctggaaacgtgaacttgacactgcagatgaagattatcgaacaggaaaaagagatcgccgaactgaagaagcaactaaatctgctctcccaggacaagggcgtgagagacgacggcaaagatggaggtgttggctag

SEQ ID NO: 179972 - DNA, 1734 bp, Artificial Sequence
  derived and/or modified sequence
atgaaccagacccacttcgtgcaggaccggtgcctgagcgacccctgtgaagatatatccagaatccaaaaaattcgctctcgagaggtggcgttggaagcccaaacttcgcgctacctgaatgagttcgaggagttagcaattctcggcaagggcggatatggcagggtatataaagttaggaacaagctggacggccagtactatgccattaaaaagatcctcattaaaggggcgaccaagaccgtctgcatgaaggtgttacgagaggtgaaggtgctggctggcctgcagcatcctaacatcgtgggctatcatactgcatggattgagcacgttcatgtgatccagccacgggccgacagagcagccatcgagctcccgtctctagaagttctgagcgatcaggaggaggaccgagagcagtgcggggtgaaaaacgacgaaagtagctcatcatcaataattttcgccgagccgacacccgaaaaagagaaaagatttggcgaatctgatactgaaaatcagaataataagtccgtgaagtacactaccaacctcgttataagagaaagcggcgagctggaaagcacactggaattgcaggaaaatggactggcgggcctgtctgcttcttcaattgttgaacagcaacttccacttaggaggaacagccacctggaggaatcttttacttcaaccgaagagtctagcgaggagaatgtgaactttctgggtcagacagaggcccagtatcacctgatgctgcacatacaaatgcagctgtgtgagttaagcctgtgggattggatcgtagagaggaacaagagaggtagggagtacgttgacgagtctgcctgcccctatgtgatggccaatgttgcgacaaagatcttccaggagctggtcgaaggagtgttctacatccataatatgggaattgtgcatcgggatctgaaaccacgtaatattttcctgcacggacctgatcagcaagtaaagatcggggacttcgggttggcctgtactgatatcctgcagaaaaacacagactggaccaaccgtaatgggaaacggacacccacacacaccagtagggtgggcacctgcttgtacgccagccccgaacagcttgaaggatcggagtacgatgccaagtctgatatgtatagccttggtgtggtgttgctcgaactcttccagccgttcggaacagaaatggagcgagctgaagtcttgactggtcttcggaccggacagctacctgagagcctcagaaagaggtgcccagtccaggccaagtatatccagcatttgacccgtcgaaactcttctcagcgtcccagcgctatacagttactgcagagcgagctttttcagaattccggaaacgtgaatctgaccctgcagatgaagattattgagcaggagaaagagatcgccgaactcaaaaaacaattgaatctgctgtctcaggataaaggatttagcgtcattccaaagccccacccttgtaaggccctctactctgccccgcagatgatatcaaggcagttgaggtcccttagttgcctctgtcctgcactttttcccggaacgtcatcatttatcgttgcactttcatctcctgcaaacttgtatattccccagcggcaacgctccgacgagctggtgttcgaaagtcagaaggggagcgctatggaactggctgtgataacagtggatggggtttag

SEQ ID NO: 179973 - DNA, 1893 bp, Artificial Sequence
  derived and/or modified sequence
atgcagggtgggaattcaggcgtccgtaagcgtgaagaggaaggtgacggtgccggagctgtggccgcacctcctgcgattgattttccagctgagggacctgacccagaatatgatgagtccgacgtcccagctgagatccaagtgttaaaagagccactccagcagccaaccttcccatttgctgtcgccaaccagctcctgctggtgtctctcctcgaacacctgagccacgtccacgaacccaaccccttacggtctcggcaagtcttcaagctgctgtgccagacgtttattaagatggggctactctcttccttcacatgtagcgacgagttttcatccctgcgcctgcaccacaacagagcaattactcatctgatgcggagtgccaaggagcgcgtgagacaggatccatgcgaggacatttccagaattcagaagatacgctctagggaggtagccctagaggcacagacttcacggtacctcaacgaattcgaggaattggccatcctgggaaagggcggatatgggagagtttataaagtaaggaacaaactggacgggcagtattatgcaatcaaaaaaatcctgataaagggcgctacaaaaaccgtgtgtatgaaggtgcttagggaagtcaaggtgctcgccggactacagcaccctaatattgtgggctatcatacagcttggatcgaacatgtccatgtaatccagcctagagctgaccgcgcagcaatcgaactgccttctctagaagtacttagtgatcaagaggaagacagggaacagtgtggcgtcaagaatgacgaatcttcaagctcatccatcatcttcgccgagcccacccccgaaaaagaaaagagatttggggagtcagacactgagaaccagaataataagtctgtaaagtataccacaaatcttgtgatacgcgagagcggggaactagagtctacactagagctccaggaaaacggattggccggactgagtgcttcctccattgtggagcaacaattaccattaaggcggaactctcatctggaggaatcctttacctcgacagaagagagctccgaagaaaatgtcaacttcctgggccagaccgaggctcaatatcacttaatgctgcacattcaaatgcagttgtgcgaactatccctatgggactggatcgttgagcgcaataagcgtggaagggagtatgtcgatgagtctgcctgcccctatgtgatggccaacgttgcaaccaagatcttccaggaactggttgaaggagtgttttacattcataacatgggaatcgtgcaccgcgatcttaagccgaggaacatctttcttcacgggccagaccagcaagtgaagatcggtgatttcgggctggcttgtaccgacatcctgcagaaaaacacagattggactaatagaaacggcaaaaggacccccacgcacacctctcgcgtgggcacttgtttgtatgcgagccctgagcagctagaaggatcggagtacgacgctaaatctgatatgtacagtcttggggtagtgctattagagctctttcaaccgtttggcactgagatggagagagccgaagtcctgactggccttaggaccggacagcttcccgagagtctccgcaaaagatgcccagtgcaggcaaagtacatccaacacctcactaggagaaattcatctcagaggccatccgccatacagttgctccaatccgaactgtttcaaaattcaggcaacgtcaatttgacccttcagatgaaaatcattgagcaagagaaggagattgccgagctgaaaaaacagctcaacctattgagccaagacaagggagttcgggacgacggaaaagacggcggagttggctag

SEQ ID NO: 179974 - DNA, 1734 bp, Artificial Sequence
  derived and/or modified sequence
atgaaccagacgcatttcgtacaggaccggtgcttgagtgatccttgcgaggatatttctagaatccaaaaaatccggtctcgcgaagtggccctcgaggcacaaacatcccgctatcttaacgagttcgaggagctggctattttgggaaagggcggatatgggagagtgtacaaggtgagaaacaaactcgacggccagtactacgccatcaagaaaatcttaataaaaggagctactaagaccgtgtgtatgaaggtcctgcgggaagttaaggtcttggctggccttcagcacccaaatatcgtgggctatcacaccgcgtggatcgagcacgtgcacgttattcaacccagagccgatagggcggcaatcgagctgccttccttagaagttttgagcgatcaagaagaagaccgcgaacagtgcggtgtaaagaatgacgaatctagcagctcttcaatcattttcgctgagcctactccggagaaagaaaagcgctttggagaaagcgacactgagaatcagaataataaatctgtgaagtacacaactaaccttgtcatacgggagtcaggagaactggagagtaccctagagttgcaggagaacggccttgccggactttccgcctcaagcattgtcgagcagcaactgcctctgcggagaaatagccacttggaagagagtttcacatcaacagaggagtcttcagaagaaaatgtgaattttctgggacagaccgaagctcagtaccatctgatgctgcacattcagatgcagctatgtgagctgtccctctgggactggatagtggaacggaataagcggggtcgcgagtatgtggatgagtccgcttgcccttacgtcatggcgaatgtcgcaacaaagatcttccaggagttggtggaaggtgtgttctacatccacaacatgggtatcgtccatagagatctcaaaccgagaaacatcttcttgcacgggccagatcagcaagtgaagatcggcgacttcgggctcgcatgcacagacatcctccagaagaataccgactggaccaaccgaaacgggaaacggacgcccactcacacgagcagggtcggcacctgtttgtacgcctctcccgaacaactcgaagggagcgaatacgatgcaaagtctgacatgtactccctgggcgttgtcttgctcgagcttttccagcctttcggtactgaaatggagagggcagaggtcctgacaggattgcgtactggacaactgccggaaagcctccggaagcggtgcccagttcaggcaaaatacatacaacacctgacccgacggaacagttcccaacgcccttcagcaatccagctgcttcagtcagagttattccagaactccggaaatgtcaatttgactctgcagatgaagattatcgagcaggagaaggaaattgctgagcttaaaaagcagctgaacctcctgagtcaagataagggtttcagcgttatcccaaaaccccacccttgcaaagcgctgtactctgcaccccagatgatttctcggcagctaagatccctcagctgcctctgtcccgctctgttccccggtacttcctcattcatcgttgccttgtcttcccctgccaatctgtacattccccagcggcagaggagtgatgagctggtgttcgagtcccaaaaaggatctgccatggagctggctgtgattactgtagacggggtctag

SEQ ID NO: 179975 - DNA, 1893 bp, Artificial Sequence
  derived and/or modified sequence
atgcagggcggcaacagcggcgtgagaaagagagaggaggagggcgacggcgccggcgccgtggccgccccccccgccatcgacttccccgccgagggccccgaccccgagtacgacgagagcgacgtgcccgccgagatccaggtgctgaaggagcccctgcagcagcccaccttccccttcgccgtggccaaccagctgctgctggtgagcctgctggagcacctgagccacgtgcacgagcccaaccccctgagaagcagacaggtgttcaagctgctgtgccagaccttcatcaagatgggcctgctgagcagcttcacctgcagcgacgagttcagcagcctgagactgcaccacaacagagccatcacccacctgatgagaagcgccaaggagagagtgagacaggacccctgcgaggacatcagcagaatccagaagatcagaagcagagaggtggccctggaggcccagaccagcagatacctgaacgagttcgaggagctggccatcctgggcaagggcggctacggcagagtgtacaaggtgagaaacaagctggacggccagtactacgccatcaagaagatcctgatcaagggcgccaccaagaccgtgtgcatgaaggtgctgagagaggtgaaggtgctggccggcctgcagcaccccaacatcgtgggctaccacaccgcctggatcgagcacgtgcacgtgatccagcccagagccgacagagccgccatcgagctgcccagcctggaggtgctgagcgaccaggaggaggacagagagcagtgcggcgtgaagaacgacgagagcagcagcagcagcatcatcttcgccgagcccacccccgagaaggagaagagattcggcgagagcgacaccgagaaccagaacaacaagagcgtgaagtacaccaccaacctggtgatcagagagagcggcgagctggagagcaccctggagctgcaggagaacggcctggccggcctgagcgccagcagcatcgtggagcagcagctgcccctgagaagaaacagccacctggaggagagcttcaccagcaccgaggagagcagcgaggagaacgtgaacttcctgggccagaccgaggcccagtaccacctgatgctgcacatccagatgcagctgtgcgagctgagcctgtgggactggatcgtggagagaaacaagagaggcagagagtacgtggacgagagcgcctgcccctacgtgatggccaacgtggccaccaagatcttccaggagctggtggagggcgtgttctacatccacaacatgggcatcgtgcacagagacctgaagcccagaaacatcttcctgcacggccccgaccagcaggtgaagatcggcgacttcggcctggcctgcaccgacatcctgcagaagaacaccgactggaccaacagaaacggcaagagaacccccacccacaccagcagagtgggcacctgcctgtacgccagccccgagcagctggagggcagcgagtacgacgccaagagcgacatgtacagcctgggcgtggtgctgctggagctgttccagcccttcggcaccgagatggagagagccgaggtgctgaccggcctgagaaccggccagctgcccgagagcctgagaaagagatgccccgtgcaggccaagtacatccagcacctgaccagaagaaacagcagccagagacccagcgccatccagctgctgcagagcgagctgttccagaacagcggcaacgtgaacctgaccctgcagatgaagatcatcgagcaggagaaggagatcgccgagctgaagaagcagctgaacctgctgagccaggacaagggcgtgagagacgacggcaaggacggcggcgtgggctag

SEQ ID NO: 179976 - DNA, 1734 bp, Artificial Sequence
  derived and/or modified sequence
atgaaccagacccacttcgtgcaggacagatgcctgagcgacccctgcgaggacatcagcagaatccagaagatcagaagcagagaggtggccctggaggcccagaccagcagatacctgaacgagttcgaggagctggccatcctgggcaagggcggctacggcagagtgtacaaggtgagaaacaagctggacggccagtactacgccatcaagaagatcctgatcaagggcgccaccaagaccgtgtgcatgaaggtgctgagagaggtgaaggtgctggccggcctgcagcaccccaacatcgtgggctaccacaccgcctggatcgagcacgtgcacgtgatccagcccagagccgacagagccgccatcgagctgcccagcctggaggtgctgagcgaccaggaggaggacagagagcagtgcggcgtgaagaacgacgagagcagcagcagcagcatcatcttcgccgagcccacccccgagaaggagaagagattcggcgagagcgacaccgagaaccagaacaacaagagcgtgaagtacaccaccaacctggtgatcagagagagcggcgagctggagagcaccctggagctgcaggagaacggcctggccggcctgagcgccagcagcatcgtggagcagcagctgcccctgagaagaaacagccacctggaggagagcttcaccagcaccgaggagagcagcgaggagaacgtgaacttcctgggccagaccgaggcccagtaccacctgatgctgcacatccagatgcagctgtgcgagctgagcctgtgggactggatcgtggagagaaacaagagaggcagagagtacgtggacgagagcgcctgcccctacgtgatggccaacgtggccaccaagatcttccaggagctggtggagggcgtgttctacatccacaacatgggcatcgtgcacagagacctgaagcccagaaacatcttcctgcacggccccgaccagcaggtgaagatcggcgacttcggcctggcctgcaccgacatcctgcagaagaacaccgactggaccaacagaaacggcaagagaacccccacccacaccagcagagtgggcacctgcctgtacgccagccccgagcagctggagggcagcgagtacgacgccaagagcgacatgtacagcctgggcgtggtgctgctggagctgttccagcccttcggcaccgagatggagagagccgaggtgctgaccggcctgagaaccggccagctgcccgagagcctgagaaagagatgccccgtgcaggccaagtacatccagcacctgaccagaagaaacagcagccagagacccagcgccatccagctgctgcagagcgagctgttccagaacagcggcaacgtgaacctgaccctgcagatgaagatcatcgagcaggagaaggagatcgccgagctgaagaagcagctgaacctgctgagccaggacaagggcttcagcgtgatccccaagccccacccctgcaaggccctgtacagcgccccccagatgatcagcagacagctgagaagcctgagctgcctgtgccccgccctgttccccggcaccagcagcttcatcgtggccctgagcagccccgccaacctgtacatcccccagagacagagaagcgacgagctggtgttcgagagccagaagggcagcgccatggagctggccgtgatcaccgtggacggcgtgtag

SEQ ID NO: 179977 - protein, 242 aa, Artificial Sequence
  derived and/or modified sequence
MGEASPPAPARRHLLVLLLLLSTLVIPSAAAPIHDADAQESSLGLTGLQSLLQGFSRLFLKGNLLRGIDSLFSAPMDFRGLPGNYHKEENQEHQLGNNTLSSHLQIDKMTDNKTGEVLISENVVASIQPAEGSFEGDLKVPRMEEKEALVPIQKATDSFHTELHPRVAFWIIKLPRRRSHQDALEGGHWLSEKRHRLQAIRDGLRKGTHKDVLEEGTESSSHSRLSPRKTHLLYILRPSRQL

SEQ ID NO: 179978 - DNA, 729 bp, Artificial Sequence
  derived and/or modified sequence
atgggcgaggccagcccccccgcccccgccagaagacacctgctggtgctgctgctgctgctgagcaccctggtgatccccagcgccgccgcccccatccacgacgccgacgcccaggagagcagcctgggcctgaccggcctgcagagcctgctgcagggcttcagcagactgttcctgaagggcaacctgctgagaggcatcgacagcctgttcagcgcccccatggacttcagaggcctgcccggcaactaccacaaggaggagaaccaggagcaccagctgggcaacaacaccctgagcagccacctgcagatcgacaagatgaccgacaacaagaccggcgaggtgctgatcagcgagaacgtggtggccagcatccagcccgccgagggcagcttcgagggcgacctgaaggtgcccagaatggaggagaaggaggccctggtgcccatccagaaggccaccgacagcttccacaccgagctgcaccccagagtggccttctggatcatcaagctgcccagaagaagaagccaccaggacgccctggagggcggccactggctgagcgagaagagacacagactgcaggccatcagagacggcctgagaaagggcacccacaaggacgtgctggaggagggcaccgagagcagcagccacagcagactgagccccagaaagacccacctgctgtacatcctgagacccagcagacagctgtag

SEQ ID NO: 179979 - DNA, 729 bp, Artificial Sequence
  derived and/or modified sequence
atgggggaagcctcccccccggcaccagcccggaggcacttgcttgtgctgttactgctgttaagcactcttgtcatccccagcgccgcagcgcccatccatgacgctgatgcccaggagtcctccctgggtctaaccggcctgcaatccctgctgcagggtttttctcggttgtttctgaaagggaatctgctgaggggtattgattcacttttttctgctcccatggattttaggggactgcccgggaactaccataaggaagaaaaccaagagcatcagttgggcaacaatactttgagcagccatctccagattgacaaaatgaccgataacaagactggcgaggtgctcatctctgagaatgtcgtagcatccatccagcccgctgagggctcattcgagggggacctgaaggtgccacgcatggaagagaaggaggccctggtgcccatccagaaagccacagattcctttcacaccgagctgcacccacgcgttgccttttggatcattaagctgccaaggagaaggtcacatcaggacgccctcgagggcgggcattggctgtcagaaaaaaggcaccgcctccaggcgatccgagacggacttaggaaggggacccacaaggacgtgttggaagaagggacagaaagttcttcgcattcccggctttctcccagaaaaacccacctgctatacatcttgcgacccagtagacagctatag

SEQ ID NO: 179980 - DNA, 729 bp, Artificial Sequence
  derived and/or modified sequence
atgggagaggccagccccccagccccagcccggcggcacctgctggtgctgctgctgctgctgagcaccctggtgatccccagcgctgctgcccccatccatgatgctgatgcccaggagagcagcctgggcctgaccggcctgcagagcctgctgcagggcttcagccgcctcttcctgaagggcaacctgctgcggggcatcgacagcctcttcagcgcccccatggacttccggggcctgcccggcaactaccacaaggaggagaaccaggagcaccagctgggcaacaacaccctgagcagccacctgcagattgacaagatgacagacaacaagacaggagaggtgctgatcagtgaaaatgtggtggccagcatccagcctgctgagggcagctttgaaggagacctgaaggtgcccaggatggaggagaaggaggccctggtgcccatccagaaggccacagacagcttccacacagagctgcacccccgggtggccttctggatcatcaagctgcccaggagaagaagccaccaggatgccctggagggcggccactggctgtctgagaagaggcaccggctgcaggccatcagagatggcctgaggaagggcacccacaaggatgtgctggaggagggcacagagagcagcagccacagccggctgagccccaggaagacccacctgctgtacatcctgcggcccagccggcagctgtag

SEQ ID NO: 179981 - DNA, 729 bp, Artificial Sequence
  derived and/or modified sequence
atgggcgaggccagcccccccgcccccgcccggcggcacctgctggtgctcttgctcctcctctcaacgcttgtgatccccagtgcagccgcccctatccatgatgccgatgcacaggaaagctccctaggacttactggtctgcagagcctccttcaaggattctcccggttgtttcttaagggtaatttgctgcggggaatagacagcctgttttctgcacccatggattttagaggcctacctggaaattaccacaaagaagaaaaccaagaacatcaattgggtaacaatacactgagctcccacctccagatcgacaagatgacagataacaagacaggggaagtgctaattagcgaaaacgtcgtagccagcatccagccagctgagggtagctttgagggtgatctaaaagtcccgcgcatggaggagaaggaagccctggtgccgatccagaaggcaaccgattcgttccacaccgagctccacccacgcgtggctttctggatcatcaaactgcctcggcgcaggtctcaccaggacgcactggaaggggggcactggctgtccgaaaagcgtcatcggctccaggcaatcagagatgggttacgtaaggggacccacaaggatgtcctggaagagggcaccgaatcatctagccattcccgcttgtctccgagaaaaacccatttactgtacatcctgagaccatcgcgccagctgtag

SEQ ID NO: 179982 - DNA, 729 bp, Artificial Sequence
  derived and/or modified sequence
atgggggaagcctcgcctcccgcacccgctagaaggcacctcctggtcctcttgttgctgctttcgacactggtgattccctctgcagcagcgcctatccacgacgccgacgcgcaggagtcttctctgggcctcaccggactacaaagcttgcttcaaggcttcagtagattattcctgaaggggaatctgttgcgaggaattgattcactcttctccgcaccaatggacttccggggactgcccggaaactaccacaaagaggaaaaccaggagcaccagctgggcaacaataccctatcatcgcatctccagattgataaaatgacagataataaaactggggaggtgctgatttcggagaacgtcgtagcttcaatccagcccgctgaagggagtttcgagggcgacctcaaagtgcccaggatggaggaaaaggaggctctcgtgcccatccaaaaagcaacagatagctttcatactgagctccatcccagagtggctttttggatcattaagctgccgcgacgcaggtctcatcaagacgctctagagggtggtcactggctgtccgaaaagcgacatcggctgcaagctatcagagacgggctccgaaaaggaacacataaagatgtgctggaggagggaaccgagtcgtctagtcattctaggctatcaccgagaaagactcatctgctttatattctcagaccctcacgacaactctag

SEQ ID NO: 179983 - DNA, 1029 bp, Artificial Sequence
  derived and/or modified sequence
ccgggctcctgggtgaggccggcaagtttggagcgtggtcagacaataggggcgtggctacggctcgcggagcgcaaccaacgctctagaccagacctgggctcgagaccataactgtttggctttaacagtacgtgggcggccggaatccgggagtccggtgacccgggctgtggtctagcataaaggcggagcccagaagaaggggcggggtatgggagaagcctccccacctgcccccgcaaggcggcatctgctggtcctgctgctgctcctctctaccctggtgatcccctccgctgcagctcctatccatgatgctgacgcccaagagagctccttgggtctcacaggcctccagagcctactccaaggcttcagccgacttttcctgaaaggtaacctgcttcggggcatagacagcttattctctgcccccatggacttccggggcctccctgggaactaccacaaagaggagaaccaggagcaccagctggggaacaacaccctctccagccacctccagatcgacaagatgaccgacaacaagacaggagaggtgctgatctccgagaatgtggtggcatccattcaaccagcggaggggagcttcgagggtgatttgaaggtacccaggatggaggagaaggaggccctggtacccatccagaaggccacggacagcttccacacagaactccatccccgggtggccttctggatcattaagctgccacggcggaggtcccaccaggatgccctggagggcggccactggctcagcgagaagcgacaccgcctgcaggccatccgggatggactccgcaaggggacccacaaggacgtcctagaagaggggaccgagagctcctcccactccaggctgtccccccgaaagacccacttactgtacatcctcaggccctctcggcagctgtaggggtggggaccggggagcacctgcctgtagcccccatcagaccctgccccaagcaccatatggaaataaagttctttcttacatct

SEQ ID NO: 179984 - protein, 259 aa, Artificial Sequence
  derived and/or modified sequence
MAALMRSKDSSCCLLLLAAVLMVESSQIGSSRAKLNSIKSSLGGETPGQAANRSAGMYQGLAFGGSKKGKNLGQAYPCSSDKECEVGRYCHSPHQGSSACMVCRRKKKRCHRDGMCCPSTRCNNGICIPVTESILTPHIPALDGTRHRDRNHGHYSNHDLGWQNLGRPHTKMSHIKGHEGDPCLRSSDCIEGFCCARHFWTKICKPVLHQGEVCTKQRKKGSHGLEIFQRCDCAKGLSCKVWKDATYSSKARLHVCQKI

SEQ ID NO: 179985 - DNA, 780 bp, Artificial Sequence
  derived and/or modified sequence
atggctgccctcatgcgaagcaaagattcatcctgttgcctgttgctgctggccgctgttcttatggtggagagtagccagattggtagcagcagagctaaactcaactccattaagtcatccttgggcggagagaccccagggcaggccgcaaaccgcagtgccggtatgtatcagggcctagcattcggcggtagtaagaaggggaaaaaccttgggcaggcttatccgtgttcatcagataaggagtgtgaggtgggcagatactgccatagtccacaccaggggagcagcgcttgcatggtttgcaggcgtaaaaagaagagatgccacagagacgggatgtgctgcccatccacacggtgcaacaacggaatttgtatacccgtcacagagagtattctgaccccacacatccccgctctcgacggaactcgtcaccgtgacaggaaccacgggcactactcaaatcacgatctcggctggcagaacctcggccgacctcatacaaaaatgagccacataaagggacatgagggcgacccctgtctccgctcatcggactgcatcgaaggattctgctgcgcacggcacttttggaccaagatttgcaagcctgtgctgcaccagggagaagtgtgcactaagcagcgcaaaaaaggttcacacggccttgagatattccagcgctgcgactgcgctaagggactgagttgtaaggtctggaaagatgctacatatagtagcaaagccaggttgcacgtctgccagaaaatatag

SEQ ID NO: 179986 - DNA, 780 bp, Artificial Sequence
  derived and/or modified sequence
atggcagctttgatgaggagtaaggattcttcgtgttgtctcttacttctggctgctgttttgatggtggaaagttcacagattgggtcatctcgagcgaagctgaacagcattaagagctccttgggaggggagacaccagggcaggcggccaacaggtccgctggcatgtaccaaggcttagcatttggcggttcaaaaaagggcaaaaatctgggccaggcttacccttgctctagcgataaggagtgtgaggtaggccgatattgccacagtccacatcaaggatcatctgcttgtatggtgtgtagacgaaagaaaaagaggtgtcacagggacggaatgtgctgcccttctactcgttgtaacaacggtatctgtatccccgttacagaaagtatactcaccccacacataccagcccttgatggaaccagacaccgagacagaaatcacggacattactccaaccacgatttggggtggcagaacctagggaggccacataccaagatgtcacatataaagggccacgagggtgatccatgtttgaggtcttccgactgtattgaaggcttctgttgcgcgcgccacttctggacaaagatttgtaaacccgtgttgcatcaaggtgaggtgtgtacaaaacagagaaaaaaaggtagtcatgggctagaaatctttcaaagatgtgactgcgcaaaagggctcagctgtaaggtgtggaaggatgccacttattcaagcaaagccaggttgcatgtgtgccagaaaatatag

SEQ ID NO: 179987 - DNA, 780 bp, Artificial Sequence
  derived and/or modified sequence
atggctgcactgatgagaagtaaggattctagctgttgtcttctgctgttagcggccgtactcatggtcgaatcatcccaaattggatctagtagggcaaaactgaactctattaagagctccttaggaggggagactccaggacaggcagcgaaccggtcagccggtatgtaccaaggcttggcctttggaggtagcaagaaaggcaaaaacctggggcaggcctacccctgcagttccgataaagaatgtgaagtgggcagatactgtcacagtccccatcagggttcttccgcgtgcatggtctgtagacggaaaaagaaacggtgtcaccgcgacggtatgtgctgcccttccacgaggtgtaataatggcatttgtattccagtcactgagagcattcttacaccgcacatcccggcacttgatgggaccaggcatagagataggaatcacggtcactactcaaaccatgatctgggctggcagaacttgggacggccccacaccaaaatgagccacatcaaagggcacgaaggcgacccgtgtttaaggtctagtgactgcatcgaaggattttgctgcgccagacatttctggacaaaaatctgtaaaccagtcctgcaccagggtgaagtatgtacgaaacagcgaaaaaaaggatcccacggacttgagatatttcagagatgcgattgtgccaaaggtttgtcgtgcaaagtgtggaaggacgcaacatattcttccaaggcaagattacacgtgtgccagaagatctag

SEQ ID NO: 179988 - DNA, 3638 bp, Artificial Sequence
  derived and/or modified sequence
gcgggagcccgcggcgagcgtagcgcaagtccgctccctaggcatcgctgcgctggcagcgattcgctgtctcttgtgagtcaggggacaacgcttcggggcaactgtgagtgcgcgtgtgggggacctcgattctcttcagatctcgaggattcggtccggggacgtctcctgatcccctactaaagcgcctgctaactttgaaaaggagcactgtgtcctgcaaagtttgacacataaaggataggaaaagagaggagagaaaagcaactgagttgaaggagaaggagctgatgcgggcctcctgatcaattaagaggagagttaaaccgccgagatcccggcgggaccaaggaggtgcggggcaagaaggaacggaagcggtgcgatccacagggctgggttttcttgcaccttgggtcacgcctccttggcgagaaagcgcctcgcatttgattgcttccagttattgcagaacttcctgtcctggtggagaagcgggtctcgcttgggttccgctaatttctgtcctgaggcgtgagactgagttcatagggtcctgggtccccgaaccaggaagggttgagggaacacaatctgcaagcccccgcgacccaagtgaggggccccgtgttggggtcctccctccctttgcattcccacccctccgggctttgcgtcttcctggggaccccctcgccgggagatggccgcgttgatgcggagcaaggattcgtcctgctgcctgctcctactggccgcggtgctgatggtggagagctcacagatcggcagttcgcgggccaaactcaactccatcaagtcctctctgggcggggagacgcctggtcaggccgccaatcgatctgcgggcatgtaccaaggactggcattcggcggcagtaagaagggcaaaaacctggggcaggcctacccttgtagcagtgataaggagtgtgaagttgggaggtattgccacagtccccaccaaggatcatcggcctgcatggtgtgtcggagaaaaaagaagcgctgccaccgagatggcatgtgctgccccagtacccgctgcaataatggcatctgtatcccagttactgaaagcatcttaacccctcacatcccggctctggatggtactcggcacagagatcgaaaccacggtcattactcaaaccatgacttgggatggcagaatctaggaagaccacacactaagatgtcacatataaaagggcatgaaggagacccctgcctacgatcatcagactgcattgaagggttttgctgtgctcgtcatttctggaccaaaatctgcaaaccagtgctccatcagggggaagtctgtaccaaacaacgcaagaagggttctcatgggctggaaattttccagcgttgcgactgtgcgaagggcctgtcttgcaaagtatggaaagatgccacctactcctccaaagccagactccatgtgtgtcagaaaatttgatcaccattgaggaacatcatcaattgcagactgtgaagttgtgtatttaatgcattatagcatggtggaaaataaggttcagatgcagaagaatggctaaaataagaaacgtgataagaatatagatgatcacaaaaagggagaaagaaaacatgaactgaatagattagaatgggtgacaaatgcagtgcagccagtgtttccattatgcaacttgtctatgtaaataatgtacacatttgtggaaaatgctattattaagagaacaagcacacagtggaaattactgatgagtagcatgtgactttccaagagtttaggttgtgctggaggagaggtttccttcagattgctgattgcttatacaaataacctacatgccagatttctattcaacgttagagtttaacaaaatactcctagaataacttgttatacaataggttctaaaaataaaattgctaaacaagaaatgaaaacatggagcattgttaatttacaacagaaaattaccttttgatttgtaacactacttctgctgttcaatcaagagtcttggtagataagaaaaaaatcagtcaatatttccaaataattgcaaaataatggccagttgtttaggaaggcctttaggaagacaaataaataacaaacaaacagccacaaatacttttttttcaaaattttagttttacctgtaattaataagaactgatacaagacaaaaacagttccttcagattctacggaatgacagtatatctctctttatcctatgtgattcctgctctgaatgcattatattttccaaactatacccataaattgtgactagtaaaatacttacacagagcagaattttcacagatggcaaaaaaatttaaagatgtccaatatatgtgggaaaagagctaacagagagatcattatttcttaaagattggccataacctgtattttgatagaattagattggtaaatacatgtattcatacatactctgtggtaatagagacttgagctggatctgtactgcactggagtaagcaagaaaattgggaaaactttttcgtttgttcaggttttggcaacacatagatcatatgtctgaggcacaagttggctgttcatctttgaaaccaggggatgcacagtctaaatgaatatctgcatgggatttgctatcataatatttactatgcagatgaattcagtgtgaggtcctgtgtccgtactatcctcaaattatttattttatagtgctgagatcctcaaataatctcaatttcaggaggtttcacaaaatggactcctgaagtagacagagtagtgaggtttcattgccctctataagcttctgactagccaatggcatcatccaattttcttcccaaacctctgcagcatctgctttattgccaaagggctagtttcggttttctgcagccattgcggttaaaaaatataagtaggataacttgtaaaacctgcatattgctaatctatagacaccacagtttctaaattctttgaaaccactttactactttttttaaacttaactcagttctaaatactttgtctggagcacaaaacaataaaaggttatcttatagtcgtgactttaaacttttgtagaccacaattcactttttagttttcttttacttaaatcccatctgcagtctcaaatttaagttctcccagtagagattgagtttgagcctgtatatctattaaaaatttcaacttcccacatatatttactaagatgattaagacttacattttctgcacaggtctgcaaaaacaaaaattataaactagtccatccaagaaccaaagtttgtataaacaggttgctataagcttggtgaaatgaaaatggaacatttcaatcaaacatttcctatataacaattattatatttacaatttggtttctgcaatatttttcttatgtccacccttttaaaaattattatttgaagtaatttatttacaggaaatgttaatgagatgtattttcttatagagatatttcttacagaaagctttgtagcagaatatatttgcagctattgactttgtaatttaggaaaaatgtataataagataaaatctattaaatttttctcctctaaaaactgaa

SEQ ID NO: 179989 - DNA, 780 bp, Artificial Sequence
  derived and/or modified sequence
atggccgccctgatgagaagcaaggacagcagctgctgcctgctgctgctggccgccgtgctgatggtggagagcagccagatcggcagcagcagagccaagctgaacagcatcaagagcagcctgggcggcgagacccccggccaggccgccaacagaagcgccggcatgtaccagggcctggccttcggcggcagcaagaagggcaagaacctgggccaggcctacccctgcagcagcgacaaggagtgcgaggtgggcagatactgccacagcccccaccagggcagcagcgcctgcatggtgtgcagaagaaagaagaagagatgccacagagacggcatgtgctgccccagcaccagatgcaacaacggcatctgcatccccgtgaccgagagcatcctgaccccccacatccccgccctggacggcaccagacacagagacagaaaccacggccactacagcaaccacgacctgggctggcagaacctgggcagaccccacaccaagatgagccacatcaagggccacgagggcgacccctgcctgagaagcagcgactgcatcgagggcttctgctgcgccagacacttctggaccaagatctgcaagcccgtgctgcaccagggcgaggtgtgcaccaagcagagaaagaagggcagccacggcctggagatcttccagagatgcgactgcgccaagggcctgagctgcaaggtgtggaaggacgccacctacagcagcaaggccagactgcacgtgtgccagaagatctag

SEQ ID NO: 179990 - DNA, 780 bp, Artificial Sequence
  derived and/or modified sequence
atggccgccttaatgaggagcaaggactccagctgttgcttgctgctcctggccgcagttctgatggtggagagttctcagattggcagctcgcgcgccaagctcaactcgatcaaatcaagtctaggcggtgaaaccccaggtcaggctgcgaatagaagcgctggaatgtatcaaggtcttgcattcggcgggtctaaaaagggtaagaatcttggtcaggcatacccctgcagtagcgataaggaatgtgaggtgggcagatactgccatagccctcaccagggtagctcagcctgcatggtgtgtaggcgcaagaagaagcgctgccacagggacggcatgtgctgtcccagcacgagatgcaacaatggtatctgcatacctgtgaccgagagcattctgaccccacatattcccgcgctagacgggacgaggcacagggaccgaaaccatggacattactccaaccatgatctggggtggcagaacctgggaaggccacacaccaagatgtctcacattaaggggcacgagggtgatccctgcttgcggagctcagactgtatagaaggattctgttgcgctaggcatttctggaccaagatctgcaaaccagtgctgcatcaaggcgaggtgtgcacaaagcagcggaaaaagggatcacacggattagaaatttttcagagatgcgactgcgccaaagggttatcatgtaaggtgtggaaggatgctacctattcctccaaggctagactccacgtttgtcagaagatctag

SEQ ID NO: 179991 - DNA, 780 bp, Artificial Sequence
  derived and/or modified sequence
atggccgccctgatgaggagcaaggacagcagctgctgcctgctgctgctggccgctgtgctgatggtggagagcagccagatcggcagcagccgggccaagctgaacagcatcaagagcagcctgggcggggagaccccaggccaggccgccaacagatctgctggcatgtaccagggcctggcctttggaggcagcaagaagggcaagaacctgggccaggcctacccctgcagcagtgacaaggaatgtgaggtgggccgctactgccacagcccccaccagggcagcagcgcctgcatggtgtgcaggaggaagaagaagcgctgccacagagatggcatgtgctgccccagcacccgctgcaacaacggcatctgcatccctgtgacagagagcatcctgaccccccacatcccagccctggatggcaccaggcaccgggacaggaaccacggccactacagcaaccacgacctgggctggcagaacctgggccggccccacaccaagatgagccacatcaagggccacgagggggacccctgcctgcggagcagtgactgcatcgagggcttctgctgtgcccggcacttctggaccaagatctgcaagcctgtgctgcaccagggcgaggtgtgcaccaagcagaggaagaagggcagccacggcctggagatcttccagagatgtgactgtgccaagggcctgagctgcaaggtgtggaaggatgccacctacagcagcaaggcccggctgcacgtgtgccagaagatctag

SEQ ID NO: 179992 - DNA, 780 bp, Artificial Sequence
  derived and/or modified sequence
atggccgccctgatgcggagcaaggacagcagctgctgcctgctgttactggcggcggtgctcatggtggagtcgagccagatcggttctagccgcgctaagttgaacagcatcaaatcatccctggggggggagacaccaggtcaagctgctaacagaagtgccggcatgtaccagggcctcgcctttggtggatccaagaagggtaaaaatcttgggcaagcctacccctgcagctccgataaagagtgcgaagtggggaggtactgccacagtccgcaccaaggctccagtgcctgcatggtgtgtagacggaagaagaagcgctgccatcgggacggaatgtgctgcccttccactagatgcaacaacgggatatgcattcctgtcaccgagagcatactgaccccgcacatacccgcccttgacggcactcgccatcgggatcgtaatcacggacattattctaaccatgacctcggttggcaaaatttaggtcgtccacacaccaagatgtcgcacattaagggccacgaaggagatccctgtttgcgctcttccgattgtattgaagggttctgctgtgctcggcatttctggacaaagatctgcaagccggttctacatcagggagaggtctgcactaaacagcgtaagaagggctctcacgggctggaaatctttcaaaggtgtgactgcgcaaagggccttagctgtaaggtttggaaggacgccacgtactcatctaaagcacgcctccacgtgtgccaaaagatctag

SEQ ID NO: 179993 - DNA, 663 bp, Artificial Sequence
  derived and/or modified sequence
atggacgagaacaatggcctgctgctgctggagctgaaccctccaaatccatgggacctacagccaagaagtcccgaggagttggcctttggggaagtccaaatcacatacctaacgcacgcatgtatggatttgaaactgggtgacaagaggatggtgtttgacccgtggttgatcggcccagcgttcgcccgcggatggtggctgctgcatgagcctccatctgactggctggagaggctctgccaggcagacctgatctacatttcccatctacactctgatcatctatcttaccccactctcaagaaacttgccggccgccgacctgatatccctatttatgtggggaatactgagagacctgtcttttggaatctgaaccagagcggagtccaattaacgaatattaacgtggtgccattcgggatatggcaacaggtggacaaaaacctgaggttcatgattctcatggatggagtccaccccgaaatggacacctgcatcattgtggagtacaaaggacacaagattctgaatatagtggactgtaccaggcctaatggagggcgcctacccatgaaggtcgccctaatgatgagtgactttgctgggggagcaagcggctttcctatgacattttccggcggcaagttcacgtag

SEQ ID NO: 179994 - RNA, 780 nt, Artificial Sequence
  derived and/or modified sequence
auggcagcuuugaugaggaguaaggauucuucguguugucucuuacuucuggcugcuguuuugaugguggaaaguucacagauugggucaucucgagcgaagcugaacagcauuaagagcuccuugggaggggagacaccagggcaggcggccaacagguccgcuggcauguaccaaggcuuagcauuuggcgguucaaaaaagggcaaaaaucugggccaggcuuacccuugcucuagcgauaaggagugugagguaggccgauauugccacaguccacaucaaggaucaucugcuuguaugguguguagacgaaagaaaaagaggugucacagggacggaaugugcugcccuucuacucguuguaacaacgguaucuguauccccguuacagaaaguauacucaccccacacauaccagcccuugauggaaccagacaccgagacagaaaucacggacauuacuccaaccacgauuugggguggcagaaccuagggaggccacauaccaagaugucacauauaaagggccacgagggugauccauguuugaggucuuccgacuguauugaaggcuucuguugcgcgcgccacuucuggacaaagauuuguaaacccguguugcaucaaggugagguguguacaaaacagagaaaaaaagguagucaugggcuagaaaucuuucaaagaugugacugcgcaaaagggcucagcuguaagguguggaaggaugccacuuauucaagcaaagccagguugcaugugugccagaaaauauag

SEQ ID NO: 179995 - RNA, 780 nt, Artificial Sequence
  derived and/or modified sequence
auggcugcacugaugagaaguaaggauucuagcuguugucuucugcuguuagcggccguacucauggucgaaucaucccaaauuggaucuaguagggcaaaacugaacucuauuaagagcuccuuaggaggggagacuccaggacaggcagcgaaccggucagccgguauguaccaaggcuuggccuuuggagguagcaagaaaggcaaaaaccuggggcaggccuaccccugcaguuccgauaaagaaugugaagugggcagauacugucacaguccccaucaggguucuuccgcgugcauggucuguagacggaaaaagaaacggugucaccgcgacgguaugugcugcccuuccacgagguguaauaauggcauuuguauuccagucacugagagcauucuuacaccgcacaucccggcacuugaugggaccaggcauagagauaggaaucacggucacuacucaaaccaugaucugggcuggcagaacuugggacggccccacaccaaaaugagccacaucaaagggcacgaaggcgacccguguuuaaggucuagugacugcaucgaaggauuuugcugcgccagacauuucuggacaaaaaucuguaaaccaguccugcaccagggugaaguauguacgaaacagcgaaaaaaaggaucccacggacuugagauauuucagagaugcgauugugccaaagguuugucgugcaaaguguggaaggacgcaacauauucuuccaaggcaagauuacacgugugccagaagaucuag

SEQ ID NO: 179996 - protein, 1163 aa, Artificial Sequence
  derived and/or modified sequence
MNREDRNVLRMKERERRNQEIQQGEDAFPPSSPLFAEPYKVTSKEDKLSSRIQSMLGNYDEMKDFIGDRSIPKLVAIPKPTVPPSADEKSNPNFFEQRHGGSHQSSKWTPVGPAPSTSQSQKRSSGLQSGHSSQRTSAGSSSGTNSSGQRHDRESYNNSGSSSRKKGQHGSEHSKSRSSSPGKPQAVSSLNSSHSRSHGNDHHSKEHQRSKSPRDPDANWDSPSRVPFSSGQHSTQSFPPSLMSKSNSMLQKPTAYVRPMDGQESMEPKLSSEHYSSQSHGNSMTELKPSSKAHLTKLKIPSQPLDASASGDVSCVDEILKEMTHSWPPPLTAIHTPCKTEPSKFPFPTKESQQSNFGTGEQKRYNPSKTSNGHQSKSMLKDDLKLSSSEDSDGEQDCDKTMPRSTPGSNSEPSHHNSEGADNSRDDSSSHSGSESSSGSDSESESSSSDSEANEPSQSASPEPEPPPTNKWQLDNWLNKVNPHKVSPASSVDSNIPSSQGYKKEGREQGTGNSYTDTSGPKETSSATPGRDSKTIQKGSESGRGRQKSPAQSDSTTQRRTVGKKQPKKAEKAAAEEPRGGLKIESETPVDLASSMPSSRHKAATKGSRKPNIKKESKSSPRPTAEKKKYKSTSKSSQKSREIIETDTSSSDSDESESLPPSSQTPKYPESNRTPVKPSSVEEEDSFFRQRMFSPMEEKELLSPLSEPDDRYPLIVKIDLNLLTRIPGKPYKETEPPKGEKKNVPEKHTREAQKQASEKVSNKGKRKHKNEDDNRASESKKPKTEDKNSAGHKPSSNRESSKQSAAKEKDLLPSPAGPVPSKDPKTEHGSRKRTISQSSSLKSSSNSNKETSGSSKNSSSTSKQKKTEGKTSSSSKEVKEKAPSSSSNCPPSAPTLDSSKPRRTKLVFDDRNYSADHYLQEAKKLKHNADALSDRFEKAVYYLDAVVSFIECGNALEKNAQESKSPFPMYSETVDLIKYTMKLKNYLAPDATAADKRLTVLCLRCESLLYLRLFKLKKENALKYSKTLTEHLKNSYNNSQAPSPGLGSKAVGMPSPVSPKLSPGNSGNYSSGASSASASGSSVTIPQKIHQMAASYVQVTSNFLYATEIWDQAEQLSKEQKEFFAELDKVMGPLIFNASIMTDLVRYTRQGLHWLRQDAKLIS

SEQ ID NO: 179997 - DNA, 9580 bp, Artificial Sequence
  derived and/or modified sequence
cttggtcacatggtggcacggccgctgcgtcagtcacagccctggctgcaggagtccagctgccgtcgccgccgccagcggacggggcggggatcctggtgccaggtcttcgttaacccgcccccgccgcctcagtcagctgtcccagcccgggcccgaccgtcatggagcggtgcggggcctacgcctgttccgtgtgaggcgcatcgctgccgccgccgccgacgccgccttcgtttgtcgaggcctccggaacccccgccgcctcccggagcccctcgcccttggcagcctgtcaccgccccctgggcgggctcgaatgcgcgtccggtgaaggtgcaggcccggcgccgccactgccgcagccaggagatggttcgggcctagcggagccgggactggagcaacatgaaccgtgaagaccggaatgtgctgcgtatgaaagaacgggaaaggcggaatcaggaaattcagcagggcgaagacgccttcccacctagctctcctctctttgcagagccatacaaagttactagcaaagaagataagttatcaagtcgtattcagagtatgcttggaaactacgatgaaatgaaggatttcataggagacagatctataccaaagcttgttgcaattcccaagcctacagtaccaccatcagcagatgaaaaatctaacccaaatttctttgaacagagacatggaggctctcatcagagtagcaaatggactccagtaggacccgcacccagcacttctcagtctcagaaacggtcctcaggcttacagagtggacatagtagccagcggaccagcgcaggtagcagtagtggcactaacagtagtggtcagaggcacgaccgtgagtcatataacaatagtgggagcagtagccggaaaaaaggccagcatggatcagaacactccaaatcacgttcttccagccctggaaaaccccaggctgtttcttcattaaactctagtcattccaggtctcatgggaatgatcaccatagcaaggaacatcaacgctccaaatcacctcgggaccctgatgcaaactgggattctccttcccgtgtacctttttcaagtgggcagcactcaactcaatctttcccaccctcattgatgtcaaagtccaattcaatgttacagaaacccactgcctatgtgcggcccatggacggacaggagtccatggaaccaaagctgtcctctgagcactacagcagccaatcccatggcaacagcatgactgagctgaagcccagcagcaaagcacatctcaccaagctgaaaataccttcccaaccactggatgcatcagcttctggtgatgtgagctgtgtggatgaaatcctaaaagagatgacgcattcatggcctccccctctaacggctattcatacaccatgcaaaacagaaccttccaaatttccttttccaactaaggagtctcagcagtccaattttggcactggagaacaaaaaagatataatccttctaaaacttcaaatgggcaccagtctaaatctatgttaaaagatgacttaaaactaagcagcagtgaagacagtgatggggaacaggattgtgataagacaatgccgaggagtacaccaggaagtaactctgaaccttcacaccataatagtgaaggagcagataactccagggatgattctagtagccacagtggatctgaaagcagctctggatctgactcagagagtgaaagtagttccagtgacagtgaggcaaatgagccatcccagagtgcatctcccgagcctgaacccccgccaacaaacaaatggcaacttgataattggctgaataaagtgaacccacataaagtgtcacccgcctcttcagtggacagtaacatcccatcatctcaaggctacaaaaaggaaggccgagagcagggcactgggaatagctacactgatacaagtggacctaaagaaacgagttccgctactccgggacgagactccaaaaccatccaaaagggatcagaaagtgggcgtgggaggcagaaatctcctgcacagagtgacagcacaacacagagaagaactgtaggcaaaaaacaacccaaaaaggctgagaaggcagctgctgaagagcctcgtggaggcctgaagatagaaagtgaaacccctgtagacttggctagcagcatgccctccagcagacacaaagcagccaccaaaggctcaaggaaacccaatataaagaaggagtctaagtcttcccctcgacctacagcagagaaaaagaaatataagtcaacaagtaaatcttcccagaaatcaagggaaatcatagaaacagatacctcatcctcagattcagatgaaagtgagagccttcctccttcctcacaaactcctaagtaccccgagagcaataggactcctgttaaaccctcctcagtggaggaagaagatagcttttttcggcaacgaatgttctctcctatggaagagaaggaacttctttcacccctcagtgagcctgatgacaggtacccacttattgtgaagattgacctgaatcttttgactagaataccaggaaagccttacaaagaaacagagccgcccaagggggaaaagaaaaatgtgccagaaaagcacacgagagaggctcagaaacaagcctcagaaaaagtttccaacaaaggcaagaggaagcataagaatgaagatgataaccgagccagtgagagcaagaaacccaaaacggaggacaagaattcagcaggccataagccatccagcaacagagagtcatctaagcagagtgctgcaaaagaaaaggatttgttgccttctcccgctgggcctgttccttcaaaagatccaaaaacagagcatggctctcggaagaggactattagtcagtcttcttccttaaagtcaagcagtaacagcaacaaggagacgagtggcagcagcaaaaacagttcctccacatcaaagcagaagaagaccgaagggaagacttccagtagctccaaggaggttaaggaaaaggctccaagtagctcctctaactgtcctccatctgcaccaactcttgattcttctaagcctcggagaacaaagcttgtctttgatgacagaaattattcagcagaccattatttacaagaagcaaaaaagctaaagcacaatgcagatgcattgtctgataggtttgagaaagctgtatactatcttgatgctgtggtatctttcattgaatgtgggaatgcattagagaagaatgctcaggaatccaaatccccattccctatgtattcagagacggtggatctcatcaaatacactatgaagctaaagaattacttggcaccagatgctacagctgcagataaacgactcacagtactttgcctgcgatgcgagtctttgctgtacctgaggctgttcaaactgaagaaggaaaatgctctgaagtactcaaagacactgacagagcacctgaagaattcttataataattctcaagcaccatcgcctggcttgggaagcaaagctgtggggatgccttcccctgtttctccaaagctgtcaccaggcaattcaggaaattattcatctggggccagtagtgcttctgcaagtggttcttcagtgaccattccacagaagatccaccagatggcagccagctatgttcaggtcacatccaacttcctctatgccaccgaaatttgggaccaagctgaacagctttccaaagagcaaaaagaattctttgctgaactggataaagtaatgggccctctcatctttaatgcaagcatcatgacagatctagttcgttatacccggcagggactgcactggcttcgccaggatgccaagttgatatcttgaactgaacacattctcgttgcctctgattttctccacaacactgtgtcacatcacgaaggaaaactgccataacataccacctagtcgacactaagaatgaggaatagttttctcctcgttggttcatgtgttgttgtttttgataatccaaagcgatcatgtcagttggccctttaatatttccaatgtgaaagattatttaaatgcttttaaatctgcagcacattgataagatggtttccgtgagctatgataagattgaaattccagttgcaattcataactaatgaattgaaattttatttattttaatttttttaagttcccagattggggctagtttaagacttagttatttctgcctataaatttactctgttgaatatttagcataaatttaatgtagacatttttatttatataccttgggagctttattacctaatatctttttgtggtagctgttctaagagtaagaattggttcgtctaaaataaggacatattctttctacacctgctacctgacctgatatttgaaatcttaactccaattttattattgtggaatttacagttagtattaaggatattcttctacacatgaaaaaatcacttaaatatgagaaaatggcattctacatgtatgtactatgaaatgtgtctgatttggtatgcattatttcaaaaactgtgaatgtgtgttaataacactacagcaatcacacagtgactatagcttgcatttaatgcattacaaaagagggaggacaaactttctagaagaagcatttcatgttgaagggtttcataaaaggacaatcctgaacgttacggattttattaaaaccatatgttattttttgttgctaatcatttgacacttaatcgaaacagaataagttactgtggaaaaaaggatgatccaactcctgaggattgccgcctgtgtgtctttaattgattatctttgatagttagagttatttttcagatttttccccctcatactggattgtgatgctctgatatgagcatgcaatgactgatacagaaataggctggagcttcggtgtgtgcttttgctatacagcttacagttctaatgcctgatgtagagatgatgaatttctcctttttaaacctatcttctgtttactccttttgcattatgaaggccctcttcaatgatgtatgtttctgatggaatcagaaaatttcacactagaaaagtgtacctaacttgattcagtgtgagctcttgggacagggagtggagccaggggtagagcttaaagaagctggctctgtaagagttgtatatcaaagtaccttttgctacaaggtgcatatagaagtctaagataagaaatgtaccctctatactttatttttcatgcccctatcatgtttggtgtgccttaaatcttacctttaaatgaagactctatggattgtttacaaatgaagttttacactaggaccagatcgtccatacatgattggtcttctacaataataatgttcaattctttcattttaaatctttctttagggtcatataaagattagttctttcagaaaagctattgctttggtacatgacttagtctaaccagttgggtaatgctgctttgaaaaatagtttgtccctctccccattccaaaaatgaatccattcagtcagaaaaaaagattatcctactatttgtagatgattgctaaggcttgaaataggaaaggggaaagaagggatagaaaagtttcaagtccagtagtgcagtgaatcctttgtgtttgagacttttttacacttatttctgaagttagtgaactttcattgtccctgtggcctcatatttatagagcttcttaactgttttgtacctcagattgtttttagatgtcattgaagattgagatgtacaaattatgttgaatttaacctgtttctcttggagaaattgcctctgatatctttctaacttaatcttagtgtgttctaggaacagttttccataagaggacaacttctcaatgatcatgatagttatttagtaagaaataatggttgttaatcaaatacatgttatgtcttgtccttctctgatttttctgacttggattccttaatttgcagtgatgtcttagaaatggaaaaagtatcctctgggctttcagactttcagcaacaacagccagtgggatacctctgagttcttgtgttctagtctcttgtatgtcctgaaaggcagcaggagcatttttggggtcacactgatattttgttaaagcagagtttcctgcatggtttatggtgctgctctaatattttctctttaaaactgtgtcaatttttggagaatgaatttttcaaccttttcattgtggaggatttttcccacaaggtagtaatgggcaatggatcaaaatcctatcataaatgattgaattttcaatgtcatagtgtgtggaaatactactccctttcctccatgtctatcttcttagatgttctgtctttgtcatcatctgctccagcacatactttggactcctttacaggtgaccttcccccctccctcctcaataggtgtcctcagtgttttctaagcatttaaaactgaatttgacaagtggctaaaaacttagtctgagacttgtacttagtatatggttaattatagaaacaacaactattttaaacagttactctgttgactgctctttatgactacacttgtatgccaggaggcagcagcctatacaccattagactctttacaagcaaccaacgaaccaattgcagtggttgcagttgtcacagtagtcttgcctgggccagactgggctgggctgtgggaagcattccccttcaggggagtttccacagctcagcccaggctccagtctggctagagagcatccagcccattccttgcctcagtgccacctttttctgggcaagtagccaagaagtgactttatatgcagtgagtacttcagataaacttacagctacagctgccgaagagtggagaaggttgaccaccatttatttaattctctagtgtaaaaacaattgagagcagtgtgcgtgagcccacagacacctgtgtttctgggagctctggcagtggcggattcataggcacttgggctgcactttgaatgacacacttggctttattagattcactagtttttaaaaaattgttgttcgtttcttttcattaaaggtttaatcagacagatcagacagcataattttgtatttaatgacagaaacgttggtacatttcttcatgaatgagcttgcattctgaagcaagagcctacaaaaggcacttgttataaatgaaagttctggctctagaggccagtactctggagtttcagagcagccagtgattgttccagtcagtgatgcctagttatatagaggaggagtacactgtgcactcttctaggtgtaagggtatgcaactttggatcttaaaattctgtacacatacacactttatatatatgtatgtatgtatgaaaacatgaaattagtttgtcaaatatgtgtgtgtttagtattttagcttagtgcaactatttccacattatttattaaattgatctaagacactttcttgttgacaccttgaatattaatgttcaagggtgcaatgtgtattcctttagattgttaaagcttaattactatgatttgtagtaaattaacttttaaaatgtatttgagcccttctgtagtgtcgtagggctcttacagggtgggaaagattttaattttccagttgctaattgaacagtatggcctcattatatattttgatttataggagtttgtgtctgggtcccaggaacatctactggggatgactgttaggcagcttgtgatgatgttttttaaaaaacctaagtaacttggggagacagagcatttcaaacccatatagacacctatcatacctgtatatcccctaatacatggaacataaatttcatttcagctttatgcattaatgtattgaagaggcaggctttttttccagtaataatactgtacatctaaggttgctattcagtaaaactaatagaagagataattattgaataccttggaatatgtagtgagaagaggccaaatttttcatgtttgtgagcatgtctttcagatactcgctaatggagaaattcactttagacctctagaccccaaaaccaagttagcaagtgacaaaaagtaaattattaatagtctgtaaagtggatgctggtcttacaaagctcctattcacatgaaccctatggttaattagaaagaacttgctgtctccagaaaagggaatggaaataataactatgtatcttcttttcatgtaatttggtcacagaataaggtattcaagttaagtctaatccaagtcttagagatctttaagtatcctaaaatagcagcctaagtagtcatcatgtaaagaagttgactttcaggaatgtcagcattgacctctccttgccactgttactcagctaaacataacttgccattcttaaaaataaaaaagctcccacccagaaactctagtgatactcagttttgacctcttactgcttccatgtgggacttcttttcagcttttaaccattggaattttctacctgctatgttcctctctggaaaatatcaatttggaaatgctgcctttcaaatcaatgccatgatcatccatattgttgagtttgttgttggtgttccagaagtgtccccattttacaactttatgcacacacctggcaaatcattaacatgagcattcaacagtactgggatgggtggggtgggggtagggggctcaccaacagaactggccagttgacattgcctgaaaaggcaccacctttaagggccagttgtggggttggtaagcacagttatgaaaatttctatctagcctccgttttgaatggttttaagaaattttgtatatggaggatggaaatgcttatatatttattgaaaatccttttatttgaaattaaaattatttggtatataattgtttgatatttggggagggttttggaggggagataatgtcactgataaattaaaagcctgttgattttgcagaaaggtactgttagtgactgataaggatgcctttgttttgtacatgaaccaaatctttgttttacatttcttttatccaaaatatttaggcatctgacattttcaaccagaatttcaattatatactgtgatttttatttgttgcaatacattacaatttcagaggtactttggggctcaaaagctaggatttctaagtcagtatgtgcatttcacacgataaagctgttaatggtgagcaaagtattatatactaactagatttttccacatctgtatagtatattatatgtattttgtggtattgagagtatagaaagtttagagtgtcaaacatgcgtttaatgtgtatttttaaacaaatttatggcaattaaaatatttggagacaagggtatcacatttcaatttgtaaagatctttttaactctactgtgtcattaagatgctttgtacaatgccaaaccatagttggagaaactaagtttaataaatatcaaatagattttctgtattaaagttactgaacactgta

SEQ ID NO: 179998 - DNA, 3492 bp, Artificial Sequence
  derived and/or modified sequence
atgaacagagaggacagaaacgtgctgagaatgaaggagagagagagaagaaaccaggagatccagcagggcgaggacgccttcccccccagcagccccctgttcgccgagccctacaaggtgaccagcaaggaggacaagctgagcagcagaatccagagcatgctgggcaactacgacgagatgaaggacttcatcggcgacagaagcatccccaagctggtggccatccccaagcccaccgtgccccccagcgccgacgagaagagcaaccccaacttcttcgagcagagacacggcggcagccaccagagcagcaagtggacccccgtgggccccgcccccagcaccagccagagccagaagagaagcagcggcctgcagagcggccacagcagccagagaaccagcgccggcagcagcagcggcaccaacagcagcggccagagacacgacagagagagctacaacaacagcggcagcagcagcagaaagaagggccagcacggcagcgagcacagcaagagcagaagcagcagccccggcaagccccaggccgtgagcagcctgaacagcagccacagcagaagccacggcaacgaccaccacagcaaggagcaccagagaagcaagagccccagagaccccgacgccaactgggacagccccagcagagtgcccttcagcagcggccagcacagcacccagagcttcccccccagcctgatgagcaagagcaacagcatgctgcagaagcccaccgcctacgtgagacccatggacggccaggagagcatggagcccaagctgagcagcgagcactacagcagccagagccacggcaacagcatgaccgagctgaagcccagcagcaaggcccacctgaccaagctgaagatccccagccagcccctggacgccagcgccagcggcgacgtgagctgcgtggacgagatcctgaaggagatgacccacagctggcccccccccctgaccgccatccacaccccctgcaagaccgagcccagcaagttccccttccccaccaaggagagccagcagagcaacttcggcaccggcgagcagaagagatacaaccccagcaagaccagcaacggccaccagagcaagagcatgctgaaggacgacctgaagctgagcagcagcgaggacagcgacggcgagcaggactgcgacaagaccatgcccagaagcacccccggcagcaacagcgagcccagccaccacaacagcgagggcgccgacaacagcagagacgacagcagcagccacagcggcagcgagagcagcagcggcagcgacagcgagagcgagagcagcagcagcgacagcgaggccaacgagcccagccagagcgccagccccgagcccgagcccccccccaccaacaagtggcagctggacaactggctgaacaaggtgaacccccacaaggtgagccccgccagcagcgtggacagcaacatccccagcagccagggctacaagaaggagggcagagagcagggcaccggcaacagctacaccgacaccagcggccccaaggagaccagcagcgccacccccggcagagacagcaagaccatccagaagggcagcgagagcggcagaggcagacagaagagccccgcccagagcgacagcaccacccagagaagaaccgtgggcaagaagcagcccaagaaggccgagaaggccgccgccgaggagcccagaggcggcctgaagatcgagagcgagacccccgtggacctggccagcagcatgcccagcagcagacacaaggccgccaccaagggcagcagaaagcccaacatcaagaaggagagcaagagcagccccagacccaccgccgagaagaagaagtacaagagcaccagcaagagcagccagaagagcagagagatcatcgagaccgacaccagcagcagcgacagcgacgagagcgagagcctgccccccagcagccagacccccaagtaccccgagagcaacagaacccccgtgaagcccagcagcgtggaggaggaggacagcttcttcagacagagaatgttcagccccatggaggagaaggagctgctgagccccctgagcgagcccgacgacagataccccctgatcgtgaagatcgacctgaacctgctgaccagaatccccggcaagccctacaaggagaccgagccccccaagggcgagaagaagaacgtgcccgagaagcacaccagagaggcccagaagcaggccagcgagaaggtgagcaacaagggcaagagaaagcacaagaacgaggacgacaacagagccagcgagagcaagaagcccaagaccgaggacaagaacagcgccggccacaagcccagcagcaacagagagagcagcaagcagagcgccgccaaggagaaggacctgctgcccagccccgccggccccgtgcccagcaaggaccccaagaccgagcacggcagcagaaagagaaccatcagccagagcagcagcctgaagagcagcagcaacagcaacaaggagaccagcggcagcagcaagaacagcagcagcaccagcaagcagaagaagaccgagggcaagaccagcagcagcagcaaggaggtgaaggagaaggcccccagcagcagcagcaactgcccccccagcgcccccaccctggacagcagcaagcccagaagaaccaagctggtgttcgacgacagaaactacagcgccgaccactacctgcaggaggccaagaagctgaagcacaacgccgacgccctgagcgacagattcgagaaggccgtgtactacctggacgccgtggtgagcttcatcgagtgcggcaacgccctggagaagaacgcccaggagagcaagagccccttccccatgtacagcgagaccgtggacctgatcaagtacaccatgaagctgaagaactacctggcccccgacgccaccgccgccgacaagagactgaccgtgctgtgcctgagatgcgagagcctgctgtacctgagactgttcaagctgaagaaggagaacgccctgaagtacagcaagaccctgaccgagcacctgaagaacagctacaacaacagccaggcccccagccccggcctgggcagcaaggccgtgggcatgcccagccccgtgagccccaagctgagccccggcaacagcggcaactacagcagcggcgccagcagcgccagcgccagcggcagcagcgtgaccatcccccagaagatccaccagatggccgccagctacgtgcaggtgaccagcaacttcctgtacgccaccgagatctgggaccaggccgagcagctgagcaaggagcagaaggagttcttcgccgagctggacaaggtgatgggccccctgatcttcaacgccagcatcatgaccgacctggtgagatacaccagacagggcctgcactggctgagacaggacgccaagctgatcagctag

SEQ ID NO: 179999 - DNA, 3492 bp, Artificial Sequence
  derived and/or modified sequence
atgaatagagaagatagaaatgtactgcgcatgaaagagcgggaaagaagaaaccaagagatccagcagggggaagacgcgtttccacctagcagccctctgtttgccgaaccttataaagtcacctctaaggaagacaagctgtcttcacgcatacagtctatgctcggcaactatgatgagatgaaagacttcatcggggataggagtattcctaagcttgtggcgataccaaaacccaccgtgccaccatctgcggacgaaaaaagcaatccaaatttctttgagcagcgtcatggagggtcacatcagtcatcaaaatggactccagttggccccgcgccctctactagtcagagtcaaaagcgaagcagtggtctgcaatcaggacactcaagccagagaacatcagctggaagttcaagtggcacaaatagcagcggacagcgtcacgaccgcgaatcatacaataattctggctctagctcaagaaagaaagggcaacatggcagcgaacatagcaagtctcgctcctccagtcctggaaagccccaagcagtgagctccctgaatagcagccattcacgctcgcacgggaacgaccatcacagcaaagagcatcaacggagtaagtctccgagggaccctgacgcaaattgggatagccctagcagggtgcccttctcttccggccagcacagcacccagagttttccaccatcacttatgtccaagtctaattccatgctgcagaagcctacagcttacgtgagaccaatggacgggcaagagagcatggagccaaagctgagcagcgagcactactcttctcagagtcatggaaactctatgactgagctgaaaccctcatctaaggcacatctgactaaactgaagatccccagccagcccctcgacgcatctgcctccggcgacgtgtcttgtgtcgatgagatcctgaaggaaatgacccactcctggccaccccctttgaccgccatccacacaccttgcaaaactgaaccctccaaattcccctttcccactaaggagtcccaacagagcaatttcggcacaggggagcagaaacgctataacccctccaagacctcaaatgggcatcagtctaaaagtatgctgaaggacgatcttaagctgagttcctcggaggattccgacggggagcaggattgcgataaaaccatgccgaggtccacacctggatcaaactctgaacctagtcatcacaactccgagggggctgataacagccgggacgattcttcttcgcactcaggatcagagagcagctccggatcagacagcgaaagcgagtcgagcagctcagactcagaggccaatgagccctcacagtctgcctcccctgagccggagccgccacctacaaacaaatggcagctggacaactggctgaacaaggtgaatcctcacaaggtgtctccggcgagcagcgtcgacagtaacattcctagctcccaggggtataaaaaagaggggcgagagcagggaaccggtaattcatacaccgacacctcagggcctaaagagacaagctcggccacaccggggagagactcgaagacaatccagaagggaagcgaatccggcagaggacgtcagaaatcccccgcccagtcagacagtacaactcaaagacggaccgtgggaaagaagcagcccaagaaggccgagaaggcggccgcagaggagccacggggcggcctgaagatcgagtcagaaacgccagtggatttggcttcatctatgcctagctcacgacacaaggcggcgacgaaaggatcacgaaaaccaaacatcaagaaggaatccaaaagttctccccgacctaccgcggaaaaaaagaagtacaagtccacctctaaatcctcccaaaaatcacgcgagattattgagacagacacttctagcagtgactcggatgagagcgagagtctgccaccttctagccagactccaaagtacccagaaagcaacaggactccagtgaagccgtcttcagtggaggaagaggactcgttttttaggcagcgaatgttctcaccaatggaggaaaaagaactactgtctcccctgtctgagccggacgacaggtatcccctgatcgtgaaaatagacttaaacctgcttacacgtattcccggtaagccctataaggagacagagcctcccaaaggggagaaaaaaaatgtaccagaaaagcacacgcgcgaagcgcagaaacaggcgagtgagaaggttagcaataagggcaagagaaagcataagaacgaggatgataacagggccagcgagtcaaagaagcccaagaccgaggataagaactcagccggccataaaccaagttctaacagagagtctagcaaacagtccgccgctaaggaaaaggatctcttgccttcgcccgcagggcctgtgcccagcaaagatcctaagaccgaacacggtagtagaaagaggaccattagccagtcttcctctctgaagagctctagcaactcgaacaaggagacctccggctcttctaagaatagctcttctacttctaagcagaaaaaaacagaagggaaaacttcctccagctccaaagaagtaaaagaaaaggcaccttcatcctcgagcaattgtcccccctcagcgcctaccttggattccagcaaaccaaggcgcactaagctggttttcgatgaccgcaattactcagcagaccattatctacaagaagctaaaaagctcaagcataatgctgatgctctttccgaccgcttcgagaaagcagtgtactaccttgatgctgtggtcagcttcattgaatgcggaaacgcccttgaaaagaacgcacaagaaagtaagtccccatttcctatgtactccgagacagtggacctgatcaaatacacgatgaaacttaaaaactatctagctcccgacgcaaccgctgcagacaagcgcctgaccgtgctgtgtctgcggtgcgagtcattactctaccttaggttgttcaaactcaaaaaagagaatgccctgaaatactcaaagaccctcacagaacacttaaagaactcctataataactcccaggccccctcaccgggcctgggcagcaaggcagtggggatgccaagtcccgtctcacccaaattatccccgggcaacagtggtaactacagttcaggggcctccagcgcgagtgcttcaggttcttctgtgacgatcccccagaagatccaccagatggctgcgagctacgtacaagtgacaagcaactttttgtatgccactgagatctgggaccaagccgagcaacttagtaaagagcagaaggaattctttgccgagctggacaaggtgatgggtcctcttatttttaacgctagtattatgactgatctggtgagatatacgcgtcagggcctccactggctgcggcaggatgccaaattaattagctag

SEQ ID NO: 180000 - DNA, 3492 bp, Artificial Sequence
  derived and/or modified sequence
atgaaccgggaggacagaaatgtgctgaggatgaaggagcgggagaggaggaaccaggagatccagcagggagaagatgccttcccccccagcagccccctgtttgctgagccctacaaggtgaccagcaaagaagacaagctgagcagccgcatccagagcatgctgggcaactatgatgagatgaaggacttcatcggggacaggagcatccccaagctggtggccatccccaagcccaccgtgcccccatctgcagatgagaagagcaaccccaacttctttgagcagagacatggaggcagccaccagagcagcaagtggacccctgtgggccctgcccccagcaccagccagagccagaagaggagcagcggcctgcagagcggccacagcagccagaggaccagcgctggcagcagcagcggcaccaacagcagcggccagagacatgaccgggagagctacaacaacagcggcagcagcagcaggaagaagggccagcacggcagcgagcacagcaagagccgcagcagcagccctgggaagccccaggccgtgagcagcctgaacagcagccacagccgcagccacggcaatgaccaccacagcaaggagcaccagaggagcaagagcccccgggaccctgatgccaactgggacagccccagccgggtgcccttcagcagcggccagcacagcacccagagcttcccccccagcctgatgagcaagagcaacagcatgctgcagaagcccacagcctacgtgcggcccatggatggccaggagagcatggagcccaagctgagcagcgagcactacagcagccagagccacggcaacagcatgacagagctgaagcccagcagcaaggcccacctgaccaagctgaagatccccagccagcccctggatgccagcgccagcggagatgtgtcctgtgtggatgagatcctgaaggagatgacccacagctggcccccacccctgacagccatccacaccccctgcaagacagagcccagcaagttccccttccccaccaaggagagccagcagagcaactttggaactggagagcagaagcgctacaaccccagcaagaccagcaatggccaccagagcaagtccatgctgaaggatgacctgaagctgagcagcagcgaggacagtgatggagagcaggactgtgacaagaccatgcccaggagcaccccaggcagcaacagcgagcccagccaccacaacagcgagggcgctgacaacagcagagatgacagcagcagccacagcggcagcgagagcagcagcggcagtgacagcgagagcgagagcagcagcagtgacagcgaggccaatgagcccagccagagcgccagccctgagcctgagcccccacccaccaacaagtggcagctggacaactggctgaacaaggtgaacccccacaaggtgtccccagccagctctgtggacagcaacatccccagcagccagggctacaagaaggagggccgggagcagggcactggaaacagctacacagacaccagcggccccaaggagaccagcagcgccaccccaggccgggacagcaagaccatccagaagggcagcgagagcggccggggccggcagaagagccctgcccagagcgacagcaccacccagaggagaacagtgggcaagaagcagcccaagaaggccgagaaggctgctgctgaggagccccggggcggcctgaagattgagagcgagacccctgtggacctggccagctccatgcccagcagccgccacaaggccgccaccaagggcagcaggaagcccaacatcaagaaggagagcaagagcagcccccggcccacagctgagaagaagaagtacaagagcaccagcaagagcagccagaagagccgggagatcatcgagacagacaccagcagcagtgacagtgatgagagcgagagcctgccccccagcagccagacccccaagtacccagagagcaacagaacacctgtgaagcccagctctgtggaggaggaggacagcttcttccggcagaggatgttcagccccatggaggagaaggagctgctgagccccctgtctgagccagatgaccgctaccccctgattgtgaagattgacctgaacctgctgacccgcatccctgggaagccctacaaggagacagagccccccaagggggagaagaagaatgtgcctgagaagcacacccgggaggcccagaagcaggccagcgagaaggtgagcaacaagggcaagaggaagcacaagaatgaagatgacaacagagccagcgagagcaagaagcccaagacagaggacaagaacagcgctggccacaagcccagcagcaaccgggagagcagcaagcagagcgctgccaaggagaaggacctgctgcccagccctgctggccctgtgcccagcaaggaccccaagacagagcacggcagcaggaagaggaccatcagccagagcagcagcctgaagagcagcagcaacagcaacaaggagaccagcggcagcagcaagaacagcagcagcaccagcaagcagaagaagacagagggcaagaccagcagcagcagcaaggaggtgaaggagaaggcccccagcagcagcagcaactgcccccccagcgcccccaccctggacagcagcaagcccaggaggaccaagctggtgtttgatgacaggaactacagcgctgaccactacctgcaggaggccaagaagctgaagcacaatgctgatgccctgagtgacagatttgagaaggctgtgtactacctggatgctgtggtgtccttcattgaatgtggaaatgccctggagaagaatgcccaggagagcaagagccccttccccatgtacagcgagaccgtggacctgatcaagtacaccatgaagctgaagaactacctggccccagatgccacagctgctgacaagaggctgactgtgctgtgcctgcgctgtgagagcctgctgtacctgcggctcttcaagctgaagaaggaaaatgccctgaagtacagcaagaccctgacagagcacctgaagaacagctacaacaacagccaggcccccagccctggcctgggcagcaaggctgtgggcatgcccagccctgtgagccccaagctgagccctggcaacagcggcaactacagcagcggggccagcagcgccagcgccagcggcagctctgtgaccatcccccagaagatccaccagatggccgccagctatgtgcaggtgaccagcaacttcctgtatgccacagagatctgggaccaggccgagcagctgagcaaggagcagaaggagttctttgctgagctggacaaggtgatgggccccctcatcttcaatgccagcatcatgacagacctggtgcgctacacccggcagggcctgcactggctgcggcaggatgccaagctgatctcctag

SEQ ID NO: 180001 - DNA, 9552 bp, Artificial Sequence
  derived and/or modified sequence
gtcagtcacagccctggctgcaggagtccagctgccgtcgccgccgccagcggacggggcggggatcctggtgccaggtcttcgttaacccgcccccgccgcctcagtcagctgtcccagcccgggcccgaccgtcatggagcggtgcggggcctacgcctgttccgtgtgaggcgcatcgctgccgccgccgccgacgccgccttcgtttgtcgaggcctccggaacccccgccgcctcccggagcccctcgcccttggcagcctgtcaccgccccctgggcgggctcgaatgcgcgtccggtgaaggtgcaggcccggcgccgccactgccgcagccaggagatggttcgggcctagcggagccgggactggagcaacatgaaccgtgaagaccggaatgtgctgcgtatgaaagaacgggaaaggcggaatcaggaaattcagcagggcgaagacgccttcccacctagctctcctctctttgcagagccatacaaagttactagcaaagaagataagttatcaagtcgtattcagagtatgcttggaaactacgatgaaatgaaggatttcataggagacagatctataccaaagcttgttgcaattcccaagcctacagtaccaccatcagcagatgaaaaatctaacccaaatttctttgaacagagacatggaggctctcatcagagtagcaaatggactccagtaggacccgcacccagcacttctcagtctcagaaacggtcctcaggcttacagagtggacatagtagccagcggaccagcgcaggtagcagtagtggcactaacagtagtggtcagaggcacgaccgtgagtcatataacaatagtgggagcagtagccggaaaaaaggccagcatggatcagaacactccaaatcacgttcttccagccctggaaaaccccaggctgtttcttcattaaactctagtcattccaggtctcatgggaatgatcaccatagcaaggaacatcaacgctccaaatcacctcgggaccctgatgcaaactgggattctccttcccgtgtacctttttcaagtgggcagcactcaactcaatctttcccaccctcattgatgtcaaagtccaattcaatgttacagaaacccactgcctatgtgcggcccatggacggacaggagtccatggaaccaaagctgtcctctgagcactacagcagccaatcccatggcaacagcatgactgagctgaagcccagcagcaaagcacatctcaccaagctgaaaataccttcccaaccactggatgcatcagcttctggtgatgtgagctgtgtggatgaaatcctaaaagagatgacgcattcatggcctccccctctaacggctattcatacaccatgcaaaacagaaccttccaaatttccttttccaactaaggagtctcagcagtccaattttggcactggagaacaaaaaagatataatccttctaaaacttcaaatgggcaccagtctaaatctatgttaaaagatgacttaaaactaagcagcagtgaagacagtgatggggaacaggattgtgataagacaatgccgaggagtacaccaggaagtaactctgaaccttcacaccataatagtgaaggagcagataactccagggatgattctagtagccacagtggatctgaaagcagctctggatctgactcagagagtgaaagtagttccagtgacagtgaggcaaatgagccatcccagagtgcatctcccgagcctgaacccccgccaacaaacaaatggcaacttgataattggctgaataaagtgaacccacataaagtgtcacccgcctcttcagtggacagtaacatcccatcatctcaaggctacaaaaaggaaggccgagagcagggcactgggaatagctacactgatacaagtggacctaaagaaacgagttccgctactccgggacgagactccaaaaccatccaaaagggatcagaaagtgggcgtgggaggcagaaatctcctgcacagagtgacagcacaacacagagaagaactgtaggcaaaaaacaacccaaaaaggctgagaaggcagctgctgaagagcctcgtggaggcctgaagatagaaagtgaaacccctgtagacttggctagcagcatgccctccagcagacacaaagcagccaccaaaggctcaaggaaacccaatataaagaaggagtctaagtcttcccctcgacctacagcagagaaaaagaaatataagtcaacaagtaaatcttcccagaaatcaagggaaatcatagaaacagatacctcatcctcagattcagatgaaagtgagagccttcctccttcctcacaaactcctaagtaccccgagagcaataggactcctgttaaaccctcctcagtggaggaagaagatagcttttttcggcaacgaatgttctctcctatggaagagaaggaacttctttcacccctcagtgagcctgatgacaggtacccacttattgtgaagattgacctgaatcttttgactagaataccaggaaagccttacaaagaaacagagccgcccaagggggaaaagaaaaatgtgccagaaaagcacacgagagaggctcagaaacaagcctcagaaaaagtttccaacaaaggcaagaggaagcataagaatgaagatgataaccgagccagtgagagcaagaaacccaaaacggaggacaagaattcagcaggccataagccatccagcaacagagagtcatctaagcagagtgctgcaaaagaaaaggatttgttgccttctcccgctgggcctgttccttcaaaagatccaaaaacagagcatggctctcggaagaggactattagtcagtcttcttccttaaagtcaagcagtaacagcaacaaggagacgagtggcagcagcaaaaacagttcctccacatcaaagcagaagaagaccgaagggaagacttccagtagctccaaggaggttaaggaaaaggctccaagtagctcctctaactgtcctccatctgcaccaactcttgattcttctaagcctcggagaacaaagcttgtctttgatgacagaaattattcagcagaccattatttacaagaagcaaaaaagctaaagcacaatgcagatgcattgtctgataggtttgagaaagctgtatactatcttgatgctgtggtatctttcattgaatgtgggaatgcattagagaagaatgctcaggaatccaaatccccattccctatgtattcagagacggtggatctcatcaaatacactatgaagctaaagaattacttggcaccagatgctacagctgcagataaacgactcacagtactttgcctgcgatgcgagtctttgctgtacctgaggctgttcaaactgaagaaggaaaatgctctgaagtactcaaagacactgacagagcacctgaagaattcttataataattctcaagcaccatcgcctggcttgggaagcaaagctgtggggatgccttcccctgtttctccaaagctgtcaccaggcaattcaggaaattattcatctggggccagtagtgcttctgcaagtggttcttcagtgaccattccacagaagatccaccagatggcagccagctatgttcaggtcacatccaacttcctctatgccaccgaaatttgggaccaagctgaacagctttccaaagagcaaaaagaattctttgctgaactggataaagtaatgggccctctcatctttaatgcaagcatcatgacagatctagttcgttatacccggcagggactgcactggcttcgccaggatgccaagttgatatcttgaactgaacacattctcgttgcctctgattttctccacaacactgtgtcacatcacgaaggaaaactgccataacataccacctagtcgacactaagaatgaggaatagttttctcctcgttggttcatgtgttgttgtttttgataatccaaagcgatcatgtcagttggccctttaatatttccaatgtgaaagattatttaaatgcttttaaatctgcagcacattgataagatggtttccgtgagctatgataagattgaaattccagttgcaattcataactaatgaattgaaattttatttattttaatttttttaagttcccagattggggctagtttaagacttagttatttctgcctataaatttactctgttgaatatttagcataaatttaatgtagacatttttatttatataccttgggagctttattacctaatatctttttgtggtagctgttctaagagtaagaattggttcgtctaaaataaggacatattctttctacacctgctacctgacctgatatttgaaatcttaactccaattttattattgtggaatttacagttagtattaaggatattcttctacacatgaaaaaatcacttaaatatgagaaaatggcattctacatgtatgtactatgaaatgtgtctgatttggtatgcattatttcaaaaactgtgaatgtgtgttaataacactacagcaatcacacagtgactatagcttgcatttaatgcattacaaaagagggaggacaaactttctagaagaagcatttcatgttgaagggtttcataaaaggacaatcctgaacgttacggattttattaaaaccatatgttattttttgttgctaatcatttgacacttaatcgaaacagaataagttactgtggaaaaaaggatgatccaactcctgaggattgccgcctgtgtgtctttaattgattatctttgatagttagagttatttttcagatttttccccctcatactggattgtgatgctctgatatgagcatgcaatgactgatacagaaataggctggagcttcggtgtgtgcttttgctatacagcttacagttctaatgcctgatgtagagatgatgaatttctcctttttaaacctatcttctgtttactccttttgcattatgaaggccctcttcaatgatgtatgtttctgatggaatcagaaaatttcacactagaaaagtgtacctaacttgattcagtgtgagctcttgggacagggagtggagccaggggtagagcttaaagaagctggctctgtaagagttgtatatcaaagtaccttttgctacaaggtgcatatagaagtctaagataagaaatgtaccctctatactttatttttcatgcccctatcatgtttggtgtgccttaaatcttacctttaaatgaagactctatggattgtttacaaatgaagttttacactaggaccagatcgtccatacatgattggtcttctacaataataatgttcaattctttcattttaaatctttctttagggtcatataaagattagttctttcagaaaagctattgctttggtacatgacttagtctaaccagttgggtaatgctgctttgaaaaatagtttgtccctctccccattccaaaaatgaatccattcagtcagaaaaaaagattatcctactatttgtagatgattgctaaggcttgaaataggaaaggggaaagaagggatagaaaagtttcaagtccagtagtgcagtgaatcctttgtgtttgagacttttttacacttatttctgaagttagtgaactttcattgtccctgtggcctcatatttatagagcttcttaactgttttgtacctcagattgtttttagatgtcattgaagattgagatgtacaaattatgttgaatttaacctgtttctcttggagaaattgcctctgatatctttctaacttaatcttagtgtgttctaggaacagttttccataagaggacaacttctcaatgatcatgatagttatttagtaagaaataatggttgttaatcaaatacatgttatgtcttgtccttctctgatttttctgacttggattccttaatttgcagtgatgtcttagaaatggaaaaagtatcctctgggctttcagactttcagcaacaacagccagtgggatacctctgagttcttgtgttctagtctcttgtatgtcctgaaaggcagcaggagcatttttggggtcacactgatattttgttaaagcagagtttcctgcatggtttatggtgctgctctaatattttctctttaaaactgtgtcaatttttggagaatgaatttttcaaccttttcattgtggaggatttttcccacaaggtagtaatgggcaatggatcaaaatcctatcataaatgattgaattttcaatgtcatagtgtgtggaaatactactccctttcctccatgtctatcttcttagatgttctgtctttgtcatcatctgctccagcacatactttggactcctttacaggtgaccttcccccctccctcctcaataggtgtcctcagtgttttctaagcatttaaaactgaatttgacaagtggctaaaaacttagtctgagacttgtacttagtatatggttaattatagaaacaacaactattttaaacagttactctgttgactgctctttatgactacacttgtatgccaggaggcagcagcctatacaccattagactctttacaagcaaccaacgaaccaattgcagtggttgcagttgtcacagtagtcttgcctgggccagactgggctgggctgtgggaagcattccccttcaggggagtttccacagctcagcccaggctccagtctggctagagagcatccagcccattccttgcctcagtgccacctttttctgggcaagtagccaagaagtgactttatatgcagtgagtacttcagataaacttacagctacagctgccgaagagtggagaaggttgaccaccatttatttaattctctagtgtaaaaacaattgagagcagtgtgcgtgagcccacagacacctgtgtttctgggagctctggcagtggcggattcataggcacttgggctgcactttgaatgacacacttggctttattagattcactagtttttaaaaaattgttgttcgtttcttttcattaaaggtttaatcagacagatcagacagcataattttgtatttaatgacagaaacgttggtacatttcttcatgaatgagcttgcattctgaagcaagagcctacaaaaggcacttgttataaatgaaagttctggctctagaggccagtactctggagtttcagagcagccagtgattgttccagtcagtgatgcctagttatatagaggaggagtacactgtgcactcttctaggtgtaagggtatgcaactttggatcttaaaattctgtacacatacacactttatatatatgtatgtatgtatgaaaacatgaaattagtttgtcaaatatgtgtgtgtttagtattttagcttagtgcaactatttccacattatttattaaattgatctaagacactttcttgttgacaccttgaatattaatgttcaagggtgcaatgtgtattcctttagattgttaaagcttaattactatgatttgtagtaaattaacttttaaaatgtatttgagcccttctgtagtgtcgtagggctcttacagggtgggaaagattttaattttccagttgctaattgaacagtatggcctcattatatattttgatttataggagtttgtgtctgggtcccaggaacatctactggggatgactgttaggcagcttgtgatgatgttttttaaaaaacctaagtaacttggggagacagagcatttcaaacccatatagacacctatcatacctgtatatcccctaatacatggaacataaatttcatttcagctttatgcattaatgtattgaagaggcaggctttttttccagtaataatactgtacatctaaggttgctattcagtaaaactaatagaagagataattattgaataccttggaatatgtagtgagaagaggccaaatttttcatgtttgtgagcatgtctttcagatactcgctaatggagaaattcactttagacctctagaccccaaaaccaagttagcaagtgacaaaaagtaaattattaatagtctgtaaagtggatgctggtcttacaaagctcctattcacatgaaccctatggttaattagaaagaacttgctgtctccagaaaagggaatggaaataataactatgtatcttcttttcatgtaatttggtcacagaataaggtattcaagttaagtctaatccaagtcttagagatctttaagtatcctaaaatagcagcctaagtagtcatcatgtaaagaagttgactttcaggaatgtcagcattgacctctccttgccactgttactcagctaaacataacttgccattcttaaaaataaaaaagctcccacccagaaactctagtgatactcagttttgacctcttactgcttccatgtgggacttcttttcagcttttaaccattggaattttctacctgctatgttcctctctggaaaatatcaatttggaaatgctgcctttcaaatcaatgccatgatcatccatattgttgagtttgttgttggtgttccagaagtgtccccattttacaactttatgcacacacctggcaaatcattaacatgagcattcaacagtactgggatgggtggggtgggggtagggggctcaccaacagaactggccagttgacattgcctgaaaaggcaccacctttaagggccagttgtggggttggtaagcacagttatgaaaatttctatctagcctccgttttgaatggttttaagaaattttgtatatggaggatggaaatgcttatatatttattgaaaatccttttatttgaaattaaaattatttggtatataattgtttgatatttggggagggttttggaggggagataatgtcactgataaattaaaagcctgttgattttgcagaaaggtactgttagtgactgataaggatgcctttgttttgtacatgaaccaaatctttgttttacatttcttttatccaaaatatttaggcatctgacattttcaaccagaatttcaattatatactgtgatttttatttgttgcaatacattacaatttcagaggtactttggggctcaaaagctaggatttctaagtcagtatgtgcatttcacacgataaagctgttaatggtgagcaaagtattatatactaactagatttttccacatctgtatagtatattatatgtattttgtggtattgagagtatagaaagtttagagtgtcaaacatgcgtttaatgtgtatttttaaacaaatttatggcaattaaaatatttggagacaagggtatcacatttcaatttgtaaagatctttttaactctactgtgtcattaagatgctttgtacaatgccaaaccatagttggagaaactaagtttaataaatatcaaatagattttctgtattaaagttactgaacactgta

SEQ ID NO: 180002 - DNA, 3492 bp, Artificial Sequence
  derived and/or modified sequence
atgaaccgggaggaccggaacgtgctgcggatgaaggagcgggagcggaggaatcaggaaatccagcagggcgaggacgcattccccccatccagccctctgtttgccgagccctacaaggtaactagtaaggaagataagttatcttcccgtatccagagtatgctagggaactatgatgagatgaaagacttcattggtgatcgtagcattcctaagctggtagctattcccaagccaaccgtacccccttcagcggacgaaaaatcaaaccccaactttttcgagcagcggcacggaggcagccatcagtcatcaaagtggactcctgtaggcccagcccccagtacttcacaatcccagaagaggtcctctggcctccaaagtggccactcctcacagcgcacctctgctgggagttcttctgggaccaacagctcaggccagcggcacgatagagaatcttataacaacagcggctcttcttctagaaaaaagggacagcacggctcagaacatagcaagtctagatcctcctctccaggaaaaccccaagcggtctcgagcctgaactcaagccactccagatcccatgggaatgaccatcacagcaaagaacatcaaagaagtaagagcccccgagatcctgatgccaattgggactcaccatccagagtcccgttttcgagtgggcagcactctactcagtcgttcccacccagtctgatgagcaaaagcaacagcatgttacagaagcccactgcatacgtgaggcccatggatgggcaggaatctatggagccaaaactgtcttctgaacactattcatcacagtcacatggcaactcaatgacagaactcaagccctcttccaaggctcatttaacgaaactcaaaatcccaagccaacctctggacgcatcagcgtccggcgacgtgtcttgcgtcgacgagattttaaaggaaatgacccattcatggccacctccactgactgcaattcataccccttgcaaaacagaacccagcaagtttccttttccaacaaaggagtcccaacagtctaactttggaacaggggaacaaaagcgatataatccctcgaaaacctccaatggccatcaatctaaatcgatgttaaaggatgatctgaaactgtcaagctctgaggactcagatggggaacaagactgtgataaaaccatgcctcggtctacacccgggtcgaatagcgagccgtcccatcacaacagtgagggtgccgataacagccgagacgacagctctagccactctggtagcgaatccagttccggatccgacagcgaatcagagtcctcgtccagcgactccgaggccaatgaaccatcccagagtgcgtctccagaaccagagccccctcccacgaataagtggcagctcgacaactggctgaacaaggtgaacccgcacaaggtaagtcctgcttcatcagtggacagcaatatccctagtagccaggggtacaagaaggagggtcgggagcagggtacgggcaactcctacaccgatactagcggccccaaagaaacgtcaagtgctacccccggcagggactccaaaacaatccagaaaggctctgaaagcgggcggggcaggcagaagtcccctgcacagtccgatagcaccacgcagaggcggacggtcggaaagaaacagccgaagaaggccgaaaaagccgcagcggaggagcctcggggtggtctgaagatcgagtccgaaacccccgtcgacctagcatcgtcaatgccgtcatccaggcataaggccgccaccaagggctcccgcaagccaaatattaagaaagagtcaaaatccagccctcgtcccactgccgagaagaaaaagtataagtctaccagcaaaagctctcagaaaagccgggagatcatagagacggatacctccagctctgattctgatgagtccgaaagcctgcccccttcttctcaaactccgaagtacccagagtcaaataggaccccggtcaaacccagcagcgtcgaggaggaggattccttctttcggcagcggatgttctccccaatggaggaaaaagagctgctgtcccccttatcagagcctgatgaccgataccccctcattgtgaagatcgacctgaacttgctcactcggatcccaggaaaaccttacaaggaaaccgaaccccccaaaggcgaaaagaaaaacgttcccgagaaacacacccgcgaggcacaaaagcaggcatctgaaaaagtttcaaataaaggtaagcgcaaacataagaacgaagatgataaccgtgcaagtgagagtaaaaagcctaagaccgaagataagaactccgccggccacaagcccagttcaaatcgtgaaagttccaagcagtccgctgctaaagagaaagacttactgccatcccctgccggtcccgtcccctcaaaagatcccaaaacggagcacgggtcccgcaagcgcacaatttctcagtccagctccttgaaatcatccagcaattccaataaagaaacaagcggatcctcgaagaacagcagcagcacgagcaagcagaagaagaccgagggtaaaaccagctcttcaagcaaggaggtgaaggagaaggcaccgagttcttcttcgaactgtccgccctccgctccgaccctggacagcagcaaacccagacgcactaagctggtttttgacgatagaaattattcagccgaccattatcttcaggaggccaagaagctgaagcacaatgccgatgccctgtcagatcggttcgaaaaagccgtatactacctggacgctgtggtgtctttcattgagtgtggcaacgccctcgagaaaaatgctcaagaatctaagagccccttcccaatgtatagtgagacggtggacttgatcaagtacacgatgaaactcaagaattaccttgcccccgacgccacagcagccgataaacgccttacagttttgtgtttgcgttgcgaaagcttgctgtacctgaggcttttcaagcttaagaaggaaaacgccctcaaatacagtaaaacactcacagagcatctgaagaacagctataacaacagccaggccccgtctcctggtctcggctcaaaggccgttgggatgccctcgcccgtgtccccgaaactgtctccagggaactccggcaattattcatccggcgcatcatccgcctctgctagcggatctagtgtcactattccacagaaaatccaccaaatggcggcttcctacgtgcaggttacctctaacttcttgtacgcaactgagatatgggaccaagcagagcagctgtccaaagagcagaaggaattttttgctgagctcgataaagtgatggggcccctgatctttaatgcttctattatgactgatcttgtgcggtatacccgccagggtctgcactggctcaggcaagatgcgaagctgatttcttag

SEQ ID NO: 180003 - DNA, 3492 bp, Artificial Sequence
  derived and/or modified sequence
atgaaccgcgaagaccggaacgttctgcgcatgaaagagcgcgagaggagaaatcaagaaattcagcagggcgaggacgccttcccaccgtcttcccctctcttcgcggaaccttacaaagttaccagtaaagaagacaaattgtcctctcgcatccagtctatgctcggcaattacgatgagatgaaggacttcattggcgaccgcagtatccctaagctggtggcaattcctaaacccactgtcccgccttctgccgatgagaaatccaaccccaactttttcgaacagcgacacggtggatcccatcagagttctaaatggacacctgtcggcccagccccttccacgtctcagtctcagaagagaagcagtggcctgcagtccggacacagcagtcagagaacgtctgcaggctcttcaagcggcacaaattcctcaggccaaaggcatgacagggaaagttataacaactctggttctagttctcggaaaaaaggacagcatggatccgagcactcaaaatctagatcgtcaagtccgggaaaaccccaggctgtgtcttctttaaatagctcacactctcggtcgcatgggaatgaccaccactcaaaggagcaccagaggtcgaagagccctagagacccagatgctaattgggattctccttcaagggtccctttcagctcaggccagcacagcacccagtctttccctccgtccctgatgtctaagtctaactccatgcttcaaaagccaacggcctatgtgcgaccgatggatggacaggagtccatggaaccaaagctgtcatcggagcactattcttcacagagccacggtaattccatgaccgaactgaagccctcaagcaaagcccaccttacaaaattaaaaatccctagccagcctcttgatgcctctgcctccggggatgtctcatgcgttgacgagatcctcaaagaaatgacccacagctggcctcccccacttacagcaatccacacgccctgcaaaacggagccttctaagtttccattccccaccaaggaaagtcagcaatcaaacttcggcactggcgagcaaaagcgatacaatcctagtaagacatctaacggacaccagtctaaatcaatgctgaaggacgatttaaagttgagctcctctgaagacagcgacggagagcaggactgcgacaaaactatgcctcggagcactcccggttcaaatagtgaaccctcccatcataacagcgaaggcgcagataattcaagagatgattctagtagccacagcggcagcgaatccagctcaggctctgattccgagagcgagagtagctcttccgactctgaggccaacgagccttcccagtcagcctcccctgaaccagagccaccccctaccaacaagtggcagctggacaattggctgaataaggtcaatccccacaaagtttcccccgcaagctccgttgactctaacattccatcaagccagggttataaaaaagaaggacgggaacagggcaccggaaattcttacacagacacctcgggtccaaaagaaacgagctctgcgaccccaggacgagacagtaagactattcagaaagggtctgaatccggcagaggaagacagaagtcccccgctcaaagtgacagcaccacccagcgccgtactgtgggcaaaaaacagccgaaaaaggccgagaaggctgccgcagaagagccacggggagggctgaaaatcgaaagcgaaaccccagtagacttggcaagctcaatgcctagctcccgccacaaagccgctacaaaaggcagtagaaaacctaacataaagaaggaaagtaagagctccccaaggccaaccgcggaaaaaaagaaatataaatctacatctaagagttcccagaagagccgtgagatcatcgagacagatacatcatccagtgactctgatgaaagcgagtccctacccccatcgtcccagacgccaaagtatcctgagagcaatcggaccccagttaagccgtcttccgtggaagaagaagactccttcttccgtcaacgtatgttttctcccatggaagagaaggaattactttcacccttgtccgagccggacgatagatacccactgatcgtgaaaattgacttgaacttactcacccgaattcctggtaagccatacaaggagactgaaccacctaaaggggagaagaaaaacgtgcctgagaagcacacgagagaagcccagaaacaggcgagcgaaaaagtgagtaacaagggcaagagaaagcacaagaacgaagacgataacagggcctccgaatccaaaaagccaaaaacagaagacaaaaatagtgctgggcataagccctccagtaatagggagtcttctaaacaatcggccgctaaggagaaagacctcctgccttccccggcagggcctgtcccctctaaagatccaaaaacagagcacggctcccgtaaaaggacaatctctcagtctagctccctcaagtcgtcaagcaactcgaacaaagaaacctcaggctcctcaaaaaattcgagcagcacatctaaacaaaagaaaacagaaggaaagacctcttcttcttccaaggaagtcaaggagaaagcgccatctagtagctccaactgtccccctagcgctccaactctggacagcagcaaacctaggaggaccaagctggtgtttgacgatcggaattattccgcagatcactatctgcaagaggctaaaaaacttaaacataatgccgatgcgctgagcgaccgctttgaaaaagccgtgtattatctggatgcggttgtttctttcatcgaatgtgggaacgccctggagaaaaatgcccaggagtctaaaagccccttccccatgtattcggaaactgtggacttgataaaatatacaatgaaactgaaaaattacctggcacccgacgctactgctgcagacaagcggcttaccgtgttgtgcttgaggtgtgagtccctgctgtatcttaggctgtttaaactgaagaaagagaacgcattgaaatattcaaagacacttaccgagcatctgaaaaacagctacaataattcccaagccccttcccccggacttggaagcaaagccgtggggatgccctcccccgtgtccccaaaattgagccccggtaactcaggtaactattcgagtggggcaagcagcgccagcgcctccgggagcagcgtgaccataccccagaagattcaccaaatggctgcttcttatgtccaagtgactagtaactttctctatgcaaccgagatttgggatcaggcggaacagttgtcgaaagagcagaaggagttctttgccgaacttgataaggtgatgggacccctgatcttcaatgcatcaatcatgactgatctagtgcggtatacacggcaggggttacattggcttcggcaagacgctaagttgatctcgtag

SEQ ID NO: 180004 - protein, 1065 aa, Artificial Sequence
  derived and/or modified sequence
MNKSENLLFAGSSLASQVHAAAVNGDKGALQRLIVGNSALKDKEDQFGRTPLMYCVLADRLDCADALLKAGADVNKTDHSQRTALHLAAQKGNYRFMKLLLTRRANWMQKDLEEMTPLHLTTRHRSPKCLALLLKFMAPGEVDTQDKNKQTALHWSAYYNNPEHVKLLIKHDSNIGIPDVEGKIPLHWAANHKDPSAVHTVRCILDAAPTESLLNWQDYEGRTPLHFAVADGNVTVVDVLTSYESCNITSYDNLFRTPLHWAALLGHAQIVHLLLERNKSGTIPSDSQGATPLHYAAQSNFAETVKVFLKHPSVKDDSDLEGRTSFMWAAGKGSDDVLRTMLSLKSDIDINMADKYGGTALHAAALSGHVSTVKLLLENNAQVDATDVMKHTPLFRACEMGHKDVIQTLIKGGARVDLVDQDGHSLLHWAALGGNADVCQILIENKINPNVQDYAGRTPLQCAAYGGYINCMAVLMENNADPNIQDKEGRTALHWSCNNGYLDAIKLLLDFAAFPNQMENNEERYTPLDYALLGERHEVIQFMLEHGALSIAAIQDIAAFKIQAVYKGYKVRKAFRDRKNLLMKHEQLRKDAAAKKREEENKRKEAEQQKGRRSPDSCRPQALPCLPSTQDVPSRQSRAPSKQPPAGNVAQGPEPRDSRGSPGGSLGGALQKEQHVSSDLQGTNSRRPNETAREHSKGQSACVHFRPNEGSDGSRHPGVPSVEKSRGETAGDERCAKGKGFVKQPSCIRVAGPDEKGEDSRRAAASLPPHDSHWKPSRRHDTEPKAKCAPQKRRTQELRGGRCSPAGSSRPGSARGEAVHAGQNPPHHRTPRNKVTQAKLTGGLYSHLPQSTEELRSGARRLETSTLSEDFQVSKETDPAPGPLSGQSVNIDLLPVELRLQIIQRERRRKELFRKKNKAAAVIQRAWRSYQLRKHLSHLRHMKQLGAGDVDRWRQESTALLLQVWRKELELKFPQTTAVSKAPKSPSKGTSGTKSTKHSVLKQIYGCSHEGKIHHPTRSVKASSVLRLNSVSNLQCIHLLENSGRSKNFSYNLQSATQPKNKTKP

SEQ ID NO: 180005 - DNA, 3198 bp, Artificial Sequence
  derived and/or modified sequence
atgaataaatctgaaaatctcctgttcgccggatcctccctcgcttcacaggtgcacgccgctgctgttaacggggataagggtgcactccaaaggctcatcgttggtaattctgctctgaaggataaggaggaccagtttggtagaacccccctgatgtattgtgtgttagctgatagactggattgtgccgatgcactgctgaaagccggagcagatgtcaacaagacagaccactcacaaagaaccgctctacacctggccgctcagaaaggaaactatagattcatgaagcttctattgacgaggcgtgctaattggatgcagaaggatctagaggagatgaccccacttcacctcactacgagacacaggtctcctaaatgtcttgcactcctgctgaagtttatggccccaggggaggtcgacactcaggacaagaataaacagacagctctgcattggtctgcttactataacaacccagagcacgtgaagttactgattaaacacgactctaacattggcattcctgacgtggaggggaagatccccctgcattgggccgctaaccacaaggatccatcagccgtccacactgtacggtgtattctcgacgcggccccgacagagagtctgctgaattggcaggattatgaggggcgcacccctctgcacttcgccgttgctgacggtaacgttacagtcgtggacgttctgaccagctatgaatcctgtaacatcacgtcatacgataatttattcagaactcccctgcattgggccgcacttctggggcacgcacagatcgtacacttgctgctggaaaggaataagtctggaacaattccgagcgatagccagggagccacacccctgcattacgctgcccagtcaaatttcgccgaaactgttaaagtgttcctcaagcacccctccgttaaggacgattctgatttggagggtaggacctcctttatgtgggccgcaggaaagggtagtgacgacgtgctgcggacaatgttatctctgaaaagcgacatcgatatcaatatggctgataaatacggaggcaccgcactgcacgctgccgccctgagcggccatgtgtctaccgtgaagctgctgttggaaaataacgcacaggtcgatgccactgatgtgatgaaacacacgccactcttccgcgcctgcgagatgggtcataaggatgtgatccaaacccttattaaaggcggggccagggtcgatttggtcgaccaggatgggcactccctcctgcattgggcagctctcggcgggaatgcagatgtttgccaaattctaatcgagaataagataaaccccaatgttcaggactatgcaggaaggacccctttacaatgcgcggcctacggcggatatatcaactgtatggccgttcttatggaaaataacgctgaccctaatatccaggacaaggaagggcgaactgcgctgcattggagctgtaataacggctatttggatgctattaaactcttactggacttcgccgctttccctaaccagatggaaaataatgaggaaagatacacgccgcttgattacgccttactgggcgaaagacacgaggtgatccagttcatgctggaacacggtgccctgagcatcgccgctatacaggatatcgccgcctttaaaatccaggcagtgtacaaaggatataaggtgcggaaggcatttcgggaccgcaaaaatttactgatgaagcacgagcagctgcggaaggacgcggccgcgaaaaagagggaagaggagaataaacggaaagaggcggaacagcaaaaggggcggcgaagccctgattcttgtagaccccaagcactcccctgtctgccctcaacacaggatgtcccctctcgccaaagcagggctccatccaagcagccccccgccggaaatgttgcccagggacccgaaccacgggattcgcggggcagcccgggtggctcattggggggtgctcttcagaaagagcaacacgtgagttcggatctgcagggaacaaattcgaggcgtcctaacgagactgcccgagagcatagcaagggccagtctgcctgcgtacactttaggcctaacgaaggtagtgatggctcccggcaccccggagtgcccagcgtcgaaaaaagccgcggggagacagctggcgatgaaagatgcgccaaaggaaaaggattcgttaaacagcctagttgtatccgggtcgcaggccccgacgagaagggcgaggatagtcgtcgagctgccgctagcctgcccccgcacgattcgcactggaaaccgagccgcaggcacgataccgagccaaaggcgaaatgcgccccccaaaagagacgtacccaggagctgagagggggacgctgcagccctgcaggaagctccagacctggctccgcccgcggcgaagccgtacacgctggtcagaaccccccgcaccataggacaccccggaataaagtcacccaggccaaactcactggtggcctgtatagccacctgccgcaatctacagaggagctgagatctggtgctcggagactggagacctccaccttgtccgaagattttcaggtgtcgaaagagacagacccagctcctggtcccctgtccgggcaatcagtgaacattgatctgctacccgtggaacttagactccaaattatccagcgagaaagaagacggaaggaactctttcgcaaaaaaaataaagctgctgccgtgatccagagggcctggcgctcctatcaactgcgaaagcacctttcacacctccggcacatgaagcagttgggtgcaggagacgttgatcgttggagacaggaatccaccgctttgttacttcaggtgtggcggaaagagttggaacttaagtttcctcagactacagcagtctctaaggctccaaagtccccttctaaggggacctccgggaccaaatccaccaagcattcggtgctgaaacagatatacggatgttcgcatgaaggcaagatccatcatccaactagatcagtgaaggcaagcagcgtgctacgtctgaattccgtgtccaatctccaatgtattcacctgctcgagaacagcggcagatcgaaaaacttctcttacaaccttcaatccgccacccaacctaagaacaaaacgaagccatag

SEQ ID NO: 180006 - DNA, 3709 bp, Artificial Sequence
  derived and/or modified sequence
gccgaaagcctcgggcggccttttgaggggctcggctagcttcagcgccgtggggtctgacctggctggatatagtgtaccggcccggcaggaggggcggcccggtccgggttgcgcctcctggagccgcccccgggacgtcagtcctggaggaggcgagggttgctccggttgctaagaagactatgaacaagtcagagaacctgctgtttgctggttcatcattagcatcacaagtccatgctgctgccgttaatggagataagggtgctctacagaggctcatcgtaggaaactctgctcttaaagacaaagaagatcagtttgggagaacaccacttatgtattgcgtgttggctgacagattggattgtgcagatgctcttctgaaggcaggagcagatgtgaataaaactgaccatagccagagaacagccctccatcttgcagcccagaagggaaattatcgtttcatgaaactcttacttacacgcagagcaaactggatgcaaaaggatctggaagagatgactcctttgcacttgaccacccggcacaggagccctaagtgtttggcacttctgctgaagtttatggcaccaggagaagtggatacacaggataaaaacaagcaaacagctctgcattggagtgcctactacaataaccctgagcatgtgaagctgctcatcaagcatgattctaacattgggattcctgatgttgaaggcaagatcccacttcactgggcagccaaccataaagatccaagtgctgttcacacagtgagatgcattctggatgctgctccaacagagtctttactgaactggcaagactacgagggtcgaactcctcttcactttgcagttgctgatgggaatgtgaccgtggttgatgtcttgacctcatatgaaagctgcaatataacgtcttatgataacttatttcgaaccccactgcactgggcagctttattaggccatgcacagattgtccatctccttttagaaagaaataagtctggaactatcccatctgacagccaaggagccacacctttgcactatgctgctcagagtaactttgctgaaacggttaaagtgtttttaaaacatccttcagtgaaagatgattcagacctggaaggaagaacatcctttatgtgggcagctggcaaaggcagtgatgatgtccttagaactatgctgagcttaaaatcggacatagatattaacatggctgacaaatatggaggtacagctttgcatgctgctgctctttctggccatgtcagcaccgtgaagttattactggaaaataatgctcaagtagatgctactgatgttatgaaacatactccacttttccgagcctgtgagatgggacacaaagatgtgattcagacactcattaaaggtggagcaagggtagatctagttgaccaagatggacattctcttctacattgggcagcactgggaggaaatgctgatgtttgccagatattaatagaaaataagatcaatccaaatgtccaggattatgcaggaagaacccctttgcagtgtgcagcatatggaggctatatcaactgcatggcagttctcatggaaaacaatgcagaccctaacattcaagacaaagagggaagaacagctttgcattggtcctgcaacaatggataccttgatgccattaaattactgctagactttgctgctttccctaatcagatggaaaacaatgaagagagatacacaccccttgattatgctttgcttggtgagcgccatgaagtgatccagttcatgttggagcacggtgccctgtccatcgcagccatacaagacatcgccgccttcaaaatccaagctgtctacaaagggtacaaggtcagaaaagccttccgagacaggaaaaatctcctcatgaagcatgaacagttgagaaaagatgctgctgccaaaaagcgagaggaagaaaacaaacgaaaagaggcagaacagcaaaaaggaaggcggagcccagattcctgcagaccccaggcccttccctgtctgcctagcacccaggatgtgcccagcaggcagagccgggcccccagcaagcagcctcctgctggcaacgtggcccaaggccctgagccaagagacagcagaggatctccaggagggtctctaggcggagccctccagaaggagcagcatgtttcctcagatttgcagggaacaaactccagaaggccaaatgaaacagccagagaacattctaaaggccaatctgcttgtgtccacttcagacccaatgaaggcagtgatggaagcaggcatccaggagttccctctgttgagaagtccagaggtgagacagctggcgatgagcggtgtgcaaaggggaaaggcttcgtgaagcagccctcctgtatcagggtggctgggcctgatgagaaaggagaggactccaggcgggcagctgcaagccttccaccgcacgatagccactggaagcccagcaggcggcatgacacagaacccaaggccaaatgtgccccccagaaaaggcgcactcaagagctcagaggaggaaggtgctctccggctggttctagccgccctggcagtgcccggggggaggcggtccatgctgggcagaatcctccccaccatcgtacaccaagaaacaaagtgacacaagccaagctcacaggagggctctattcacatttgccacagagcacagaggagttgaggtcaggagctaggaggctggagacatctaccctgtccgaggactttcaggtatctaaggagactgatccagcacctggtcccctctctgggcagagtgtgaatattgaccttctccccgtagagctccgactgcagataattcagagagaacgaaggaggaaggagctgtttcgcaaaaagaacaaggcagcagcagtcatccagcgcgcctggcgaagctaccagctcaggaagcacctgtcccaccttcggcatatgaagcagcttggagctggagatgtggacagatggaggcaagagtctacagcattgctcctccaggtttggaggaaggaactggaactaaaattcccccaaaccactgcagtaagcaaggcccccaagagtccatccaagggcacctcaggcacaaagtccaccaagcactcagtgcttaagcaaatctatggttgttctcacgaagggaaaatacatcatcctacaagatctgtaaaagcctcttctgtgctgcgtctcaactcagtgagcaacctacagtgtatacatctccttgagaacagtggaagatcaaagaacttttcttataacctgcaatcagctactcagccaaaaaacaaaacaaaaccttgactgcctatggaggaagactgtgttcgggggagctggcatagctagtgcagagttcagattttctgctgataatcttttacaccttgggaaaactttaatatccgtacctgaaggctgattcacctaaaaatgtgttaactgaaagaaaatgtcagaatgtttcctttctgctcttacacagcattgttttgtcaatcaacacagcctgcactgaaaggacctgcatagactatgtctgtgcaaagtgcctgagtgtctgctttcacctcagtctgtacagttggaaatgagaattcataattaacagcaaaatctaaggaaaacta

SEQ ID NO: 180007 - DNA, 3198 bp, Artificial Sequence
  derived and/or modified sequence
atgaacaagtctgagaacctgctgtttgctggcagcagcctggccagccaggtgcacgccgctgctgtgaatggagacaagggggccctgcagaggctcatcgtgggcaacagcgccctgaaggacaaggaggaccagtttggaagaacacccctgatgtactgtgtgctggccgaccggctggactgtgctgatgccctgctgaaggccggggctgatgtgaacaagacagaccacagccagaggacagccctgcacctggccgcccagaagggcaactaccgcttcatgaagctgctgctgacccggcgggccaactggatgcagaaggacctggaggagatgacccccctgcacctgaccaccaggcacaggagccccaagtgcctggccctgctgctgaagttcatggcccctggagaggtggacacccaggacaagaacaagcagacagccctgcactggagcgcctactacaacaaccctgagcacgtgaagctgctgatcaagcatgacagcaacatcggcatcccagatgtggagggcaagatccccctgcactgggccgccaaccacaaggaccccagcgctgtgcacacagtgcgctgcatcctggatgctgcccccacagagagcctgctgaactggcaggactatgagggccgcacccccctgcactttgctgtggctgatggaaatgtgacagtggtggatgtgctgaccagctatgagagctgcaacatcaccagctatgacaacctcttccgcacccccctgcactgggccgccctgctgggccacgcccagatcgtgcacctgctgctggagaggaacaagagcggcaccatccccagcgacagccagggcgccacccccctgcactacgccgcccagagcaactttgctgagaccgtgaaggtgttcctgaagcaccccagcgtgaaggatgacagcgacctggagggccgcaccagcttcatgtgggccgccggcaagggcagtgatgatgtgctgcggaccatgctgagcctgaagagtgacatcgacatcaacatggctgacaagtatggaggaacagccctgcatgctgctgccctgagcggccacgtgtccacagtgaagctgctgctggagaacaatgcccaggtggatgccacagatgtgatgaagcacacccccctcttccgggcctgtgagatgggccacaaggatgtgatccagaccctcatcaagggcggggcccgggtggacctggtggaccaggacggccacagcctgctgcactgggccgccctgggcggcaatgctgatgtgtgccagatcctgattgagaacaagatcaaccccaacgtgcaggactatgccggccgcacccccctgcagtgtgccgcctatggaggctacatcaactgcatggctgtgctgatggagaacaatgctgaccccaacatccaggacaaggagggccgcacagccctgcactggagctgcaacaacggctacctggatgccatcaagctgctgctggactttgctgccttccccaaccagatggagaacaatgaggagcgctacacccccctggactatgccctgctgggggagagacatgaagtcatccagttcatgctggagcacggggccctgagcattgctgccatccaggacattgctgccttcaagatccaggccgtgtacaagggctacaaggtgaggaaggccttccgggacaggaagaacctgctgatgaagcatgagcagctgaggaaggatgctgctgccaagaagcgggaggaggagaacaagaggaaggaggccgagcagcagaagggccgccgcagcccagacagctgccggccccaggccctgccctgcctgcccagcacccaggatgtgcccagccggcagagccgggcccccagcaagcagcccccagctggaaatgtggcccagggccctgagccccgggacagccggggcagccctgggggcagcctgggcggggccctgcagaaggagcagcacgtgtccagtgacctgcagggcaccaacagccggcggcccaatgaaacagcccgggagcacagcaagggccagagcgcctgtgtgcacttccggcccaatgaaggaagtgatggcagccgccaccctggggtgcccagcgtggagaagagcagaggagaaacagctggagatgagcgctgtgccaagggcaaaggatttgtgaagcagcccagctgcatccgggtggccggcccagatgagaagggggaggacagcagaagagctgctgccagcctgccccctcatgacagccactggaagcccagcagaagacatgacacagagcccaaggccaagtgtgccccccagaagaggaggacccaggagctgcggggcggccgctgcagccctgctggcagcagcaggcctggcagcgcccggggggaggccgtgcatgctggccagaaccccccccaccacaggacccccaggaacaaggtgacccaggccaagctgactggaggcctgtacagccacctgccccagagcacagaggagctgcggagcggggcccggcggctggagaccagcaccctgtctgaggacttccaggtgtccaaggagacagatcctgcccctggccccctgagcggccagagcgtgaacatcgacctgctgcctgtggagctgcggctgcagatcatccagcgggagaggaggaggaaggagctgttcaggaagaagaacaaggctgctgctgtgatccagagggcctggaggagctaccagctgaggaagcacctgagccacctgcggcacatgaagcagctgggcgctggagatgtggaccgctggaggcaggagagcacagccctgctgctgcaggtgtggaggaaggagctggagctgaagttcccccagaccacagctgtgtccaaggcccccaagagccccagcaagggcaccagcggcaccaagagcaccaagcacagcgtgctgaagcagatctacggctgcagccatgagggcaagatccaccaccccaccaggtctgtgaaggccagctctgtgctgcggctgaacagcgtgagcaacctgcagtgcatccacctgctggagaacagcggccgcagcaagaacttctcctacaacctgcagagcgccacccagcccaagaacaagaccaagccctag

SEQ ID NO: 180008 - DNA, 3198 bp, Artificial Sequence
  derived and/or modified sequence
atgaacaagagcgagaacctgctgttcgccggcagcagcctggcctcccaggttcatgccgcggctgtgaatggtgataagggtgcactccagcgactaatagtgggcaactcagccctgaaggacaaggaggaccagttcgggcggacaccccttatgtactgtgtactcgccgatcgtcttgattgtgcagacgcccttttgaaggccggtgctgatgtcaacaaaactgatcatagccagaggaccgcactgcatcttgccgcccagaagggaaactacaggttcatgaagcttctgctcaccaggcgggccaactggatgcaaaaggacctggaagagatgacgcccttacacctgactacacgccatcgcagtcctaaatgcctggccctcctgcttaagtttatggccccgggcgaagttgatacacaggacaagaataaacagactgccctgcactggagtgcctactacaataacccagagcacgtaaaattgctgatcaagcacgacagcaacataggtataccagacgttgaaggcaagatccctcttcattgggccgctaatcacaaggatccttcagccgtgcatactgtgcggtgcattctggatgccgccccaaccgaaagccttttgaactggcaagactatgagggacggacccccctccattttgctgtcgccgacgggaatgtcactgtcgtagatgtgcttacatcatatgagtcatgtaacattacttcatacgacaacctgtttaggacaccccttcactgggctgcccttctgggccatgctcagattgttcacctgctattggaacggaacaagtctggcactatccccagcgacagccagggagccacccccctgcactatgccgcccagtcgaattttgccgagaccgttaaagtgttcctcaaacacccctcggtcaaggacgactcagatctggaaggacgaacgtcatttatgtgggctgcagggaaaggcagcgacgatgtgcttcgtacaatgctgtctctgaaaagcgatatagatattaacatggccgataagtacggcgggaccgcactgcacgccgccgcactgtcaggccacgtgtccacagttaagctgctccttgagaacaacgcccaggtggacgccacagacgtaatgaagcatacacccctctttcgtgcatgtgagatgggccacaaggacgtgatccagaccctgattaagggaggagcccgcgtagatcttgtggaccaggacggtcattcacttttgcactgggctgcactcggaggcaacgccgatgtctgtcagattctcattgagaataaaatcaacccaaacgtacaagactacgccgggagaacccccttacagtgcgcagcctatggagggtacattaattgtatggcagtcctaatggaaaataatgctgacccaaacatccaggacaaagagggcaggacggcactgcactggtcatgcaacaacggctacctagatgctataaagctcctcctggatttcgccgcatttccaaaccaaatggaaaataatgaggagcgctacacaccactggattacgctttgctgggagagcgccatgaagttatccagttcatgctggagcacggcgcactgtcaatcgcagctattcaagatatcgctgctttcaaaatccaagcagtgtataaggggtacaaagtccgcaaagctttcagagaccgcaagaatctgttaatgaagcatgaacaactgcggaaggatgctgcagccaagaagcgggaggaggagaataagcgaaaagaagccgagcagcagaaagggagacgtagccctgattcctgtcgcccacaagcactaccatgtctgccaagcacacaagacgtgccaagcaggcagtccagggctccttccaagcagcctccggccggcaatgtggctcagggtcccgagcctcgcgactcccgaggctcccctgggggatctctcggtggcgcgctgcaaaaggagcagcacgtctcatcggaccttcaggggaccaattctcggaggccgaacgagacggcaagggaacatagcaaaggacagtcagcctgtgtgcatttcaggcccaacgagggatctgatggctctaggcacccgggggtaccgtctgttgaaaagtcccgcggcgagaccgctggcgacgaaaggtgcgccaagggcaaggggttcgttaagcagccaagttgcatccgagtcgccggccctgacgagaaaggcgaagattcccgccgggccgctgcatctttacccccccatgactcccattggaaaccttcaagaaggcacgatacggaacccaaggccaaatgcgcaccacagaaaagaagaacacaggaacttcgcgggggcagatgttcgccagcagggagttcacgtcctggctctgctcgcggtgaggccgtgcacgccggccagaaccctccccatcaccggacacctcgaaataaagttacacaggcaaagctcacagggggactttacagccacctaccacagtctaccgaggaattaagatccggtgctaggagattggaaacctcaactctgagcgaggatttccaggtgtctaaggagacggatcccgctcccgggcccctctccgggcagtctgtgaacattgaccttctcccagtggagctacgcctccagataattcagcgagagcgaaggcgcaaggagctgttcaggaaaaagaataaagccgctgctgtaatccagagggcctggcgctcctaccagctgagaaagcatttgagtcacctccgccatatgaaacagctgggagcaggtgacgttgaccgctggcggcaagagtcgacggccttacttctccaggtatggcggaaagagctggaactcaaattccctcagactaccgcggtttcaaaagcgccgaagtctccatccaaaggaacttccggcacaaagtcaacaaaacattcggtcctgaagcagatatatggatgtagtcatgaaggtaagattcatcaccccactcgctcagtaaaggcctcttctgtgctccggctgaatagtgtttccaaccttcagtgtatccacttgttagagaattcaggcagaagtaaaaatttcagttacaatttgcaaagtgccacacagcccaagaataagacaaaaccctag

SEQ ID NO: 180009 - DNA, 3198 bp, Artificial Sequence
  derived and/or modified sequence
atgaacaagtccgagaatctcttgttcgcaggatctagcttagcctcacaggtgcatgccgctgcggttaatggcgacaaaggagcgctgcagcggttgattgtgggaaactcagcccttaaggataaggaggatcagtttgggcgaactccactgatgtattgtgttctcgccgaccgccttgattgcgccgatgctctactgaaagccggtgcagacgtgaacaagacggaccacagtcaaagaacggccctccatctcgctgcacagaaaggtaactatcggtttatgaaacttctgctcacacgtagggcaaattggatgcagaaagatttggaagaaatgacccctctgcaccttaccacccgccacagatcgcctaaatgcctagcattactcctgaagtttatggctccaggcgaagtcgacactcaagacaaaaacaagcaaacagctttgcattggtcggcttattacaacaatcccgagcacgtgaagctgcttataaagcacgattctaatatcggcattccggacgtagaaggaaagatccctcttcattgggccgcaaaccacaaagatcctagcgcggtgcacactgtgcggtgtatactggacgccgcaccaactgaaagccttctcaattggcaggattacgagggccgtacaccgttacactttgctgttgccgacggaaacgtcaccgttgtggacgtgctaacaagttatgaatcttgcaacataactagctatgacaacctatttaggacaccgttgcattgggctgccctgttaggccacgcccagattgtgcacctactgctggaacggaataaaagtggcacaattccttccgacagccaaggcgcaactccgttacactacgccgcacagagcaattttgctgaaactgtgaaagtcttcctgaagcacccatcagtgaaagacgactcggacctcgaggggagaactagtttcatgtgggccgctgggaagggatccgatgacgtattgcgcaccatgctgtcactcaagagtgatatcgacatcaacatggcggataaatatggtgggacagccctacatgccgcagccctaagtggccacgtcagcaccgtgaaattgctgctggagaataacgcacaggtggatgccacagacgtcatgaagcataccccactttttcgggcatgtgaaatggggcataaggacgtcatccagactctgattaaaggcggtgcaagggttgacctggttgatcaggacggtcactctctattgcactgggctgcactgggcggaaatgccgatgtttgccagatactcatcgagaataaaattaaccctaacgtgcaggactacgctggaaggactccattacagtgcgcggcatacggaggatacatcaattgtatggcagtgctcatggaaaacaatgctgaccccaacatccaggacaaagagggacggacagctctacattggagctgtaacaatggctatctcgacgcaataaagctgctgctggattttgctgcctttccaaatcaaatggagaacaacgaagagcggtacactccacttgactatgccctactcggggaacgccacgaggttatccagtttatgctcgaacatggtgctcttagcatcgctgcgattcaggatatcgccgcattcaaaattcaggccgtttacaagggatacaaggtgaggaaggcctttcgcgataggaaaaatctgctcatgaagcacgagcagctccggaaagatgcggcagctaaaaagagggaagaggagaacaaacggaaggaagccgaacagcagaaaggaaggcggagtcccgattcatgccgcccacaggcactgccatgcttgcctagcacccaggatgtcccaagccggcagtcgcgcgcaccttccaagcagcctcctgccggtaatgtggcgcaggggcctgaaccaagagactcccgagggagtcctggcggatctttgggcggtgccttgcagaaggaacagcacgtctcaagtgacctgcagggcacgaactctcggagaccaaatgagaccgccagggagcacagtaagggccagtccgcctgtgttcatttccgccctaacgaaggttctgatggatcaaggcaccccggtgtaccgagtgtcgagaagtcccggggagaaacagcaggcgacgagcggtgcgctaaggggaagggatttgtaaaacagccaagttgcattcgggtcgccggtcctgatgagaaaggggaagatagtcgcagggccgcagcctccctgccaccccacgattcccactggaaaccttcccggaggcacgacactgaaccaaaggcaaagtgtgcacctcaaaaacgaagaacacaggagttgcgaggcggtaggtgctcacccgctgggtcatctaggccaggatctgcccgaggggaggccgtgcatgcaggccagaatccgcctcaccatcgtaccccccgaaataaggtgacacaggccaagttaaccggcggattatactcgcacctgcctcagtctactgaggaattgcggagcggggctcgaagacttgaaacaagtaccctttccgaggacttccaggttagcaaggaaacagacccggctcccggtcccttaagcgggcagtccgtcaacattgaccttttacccgtggaactgcgactacagatcatccagagggagaggagaaggaaggagctctttcgcaagaaaaacaaagcagccgcagtgatacaacgcgcttggagatcctatcagctgcgcaaacacctttcgcacctgcggcacatgaagcaactgggcgctggcgacgtcgaccgatggcgccaggagtccacagcgctgctgctgcaggtgtggagaaaggaactcgaattgaagtttccacagaccacagctgtgagtaaggccccaaaaagcccctcaaagggaacttcgggtactaaatccacgaaacactccgtgctgaagcagatttacggatgttcacacgaggggaaaattcatcatcccacacgttcagttaaagctagcagcgtcctgcggctgaactctgtctctaacctgcagtgtatccatcttttggagaattccggccgtagcaagaatttctcttacaaccttcagagtgccacccagcctaagaataaaaccaagccctag

SEQ ID NO: 180010 - DNA, 3198 bp, Artificial Sequence
  derived and/or modified sequence
atgaacaagagcgagaacctgctgttcgccggcagcagcctggccagccaggtgcacgccgccgccgtgaacggcgacaagggcgccctgcagagactgatcgtgggcaacagcgccctgaaggacaaggaggaccagttcggcagaacccccctgatgtactgcgtgctggccgacagactggactgcgccgacgccctgctgaaggccggcgccgacgtgaacaagaccgaccacagccagagaaccgccctgcacctggccgcccagaagggcaactacagattcatgaagctgctgctgaccagaagagccaactggatgcagaaggacctggaggagatgacccccctgcacctgaccaccagacacagaagccccaagtgcctggccctgctgctgaagttcatggcccccggcgaggtggacacccaggacaagaacaagcagaccgccctgcactggagcgcctactacaacaaccccgagcacgtgaagctgctgatcaagcacgacagcaacatcggcatccccgacgtggagggcaagatccccctgcactgggccgccaaccacaaggaccccagcgccgtgcacaccgtgagatgcatcctggacgccgcccccaccgagagcctgctgaactggcaggactacgagggcagaacccccctgcacttcgccgtggccgacggcaacgtgaccgtggtggacgtgctgaccagctacgagagctgcaacatcaccagctacgacaacctgttcagaacccccctgcactgggccgccctgctgggccacgcccagatcgtgcacctgctgctggagagaaacaagagcggcaccatccccagcgacagccagggcgccacccccctgcactacgccgcccagagcaacttcgccgagaccgtgaaggtgttcctgaagcaccccagcgtgaaggacgacagcgacctggagggcagaaccagcttcatgtgggccgccggcaagggcagcgacgacgtgctgagaaccatgctgagcctgaagagcgacatcgacatcaacatggccgacaagtacggcggcaccgccctgcacgccgccgccctgagcggccacgtgagcaccgtgaagctgctgctggagaacaacgcccaggtggacgccaccgacgtgatgaagcacacccccctgttcagagcctgcgagatgggccacaaggacgtgatccagaccctgatcaagggcggcgccagagtggacctggtggaccaggacggccacagcctgctgcactgggccgccctgggcggcaacgccgacgtgtgccagatcctgatcgagaacaagatcaaccccaacgtgcaggactacgccggcagaacccccctgcagtgcgccgcctacggcggctacatcaactgcatggccgtgctgatggagaacaacgccgaccccaacatccaggacaaggagggcagaaccgccctgcactggagctgcaacaacggctacctggacgccatcaagctgctgctggacttcgccgccttccccaaccagatggagaacaacgaggagagatacacccccctggactacgccctgctgggcgagagacacgaggtgatccagttcatgctggagcacggcgccctgagcatcgccgccatccaggacatcgccgccttcaagatccaggccgtgtacaagggctacaaggtgagaaaggccttcagagacagaaagaacctgctgatgaagcacgagcagctgagaaaggacgccgccgccaagaagagagaggaggagaacaagagaaaggaggccgagcagcagaagggcagaagaagccccgacagctgcagaccccaggccctgccctgcctgcccagcacccaggacgtgcccagcagacagagcagagcccccagcaagcagccccccgccggcaacgtggcccagggccccgagcccagagacagcagaggcagccccggcggcagcctgggcggcgccctgcagaaggagcagcacgtgagcagcgacctgcagggcaccaacagcagaagacccaacgagaccgccagagagcacagcaagggccagagcgcctgcgtgcacttcagacccaacgagggcagcgacggcagcagacaccccggcgtgcccagcgtggagaagagcagaggcgagaccgccggcgacgagagatgcgccaagggcaagggcttcgtgaagcagcccagctgcatcagagtggccggccccgacgagaagggcgaggacagcagaagagccgccgccagcctgcccccccacgacagccactggaagcccagcagaagacacgacaccgagcccaaggccaagtgcgccccccagaagagaagaacccaggagctgagaggcggcagatgcagccccgccggcagcagcagacccggcagcgccagaggcgaggccgtgcacgccggccagaaccccccccaccacagaacccccagaaacaaggtgacccaggccaagctgaccggcggcctgtacagccacctgccccagagcaccgaggagctgagaagcggcgccagaagactggagaccagcaccctgagcgaggacttccaggtgagcaaggagaccgaccccgcccccggccccctgagcggccagagcgtgaacatcgacctgctgcccgtggagctgagactgcagatcatccagagagagagaagaagaaaggagctgttcagaaagaagaacaaggccgccgccgtgatccagagagcctggagaagctaccagctgagaaagcacctgagccacctgagacacatgaagcagctgggcgccggcgacgtggacagatggagacaggagagcaccgccctgctgctgcaggtgtggagaaaggagctggagctgaagttcccccagaccaccgccgtgagcaaggcccccaagagccccagcaagggcaccagcggcaccaagagcaccaagcacagcgtgctgaagcagatctacggctgcagccacgagggcaagatccaccaccccaccagaagcgtgaaggccagcagcgtgctgagactgaacagcgtgagcaacctgcagtgcatccacctgctggagaacagcggcagaagcaagaacttcagctacaacctgcagagcgccacccagcccaagaacaagaccaagccctag

SEQ ID NO: 180011 - protein, 633 aa, Artificial Sequence
  derived and/or modified sequence
MSAGSERGAAATPGGLPAPCASKVELRLSCRHLLDRDPLTKSDPSVALLQQAQGQWVQVGRTEVVRSSLHPVFSKVFTVDYYFEEVQRLRFEVYDTHGPSGFSCQEDDFLGGMECTLGQPAQKWLLQVVMRVSVDVLGPAGHCAKHFLCCTESSHLARTGPSFLLRYDDLCLPWATAGAVRWWTCRGGHTQGWQIVAQKKVTRPLLLKFGRNAGKSTITVIAEDISGNNGYVELSFRARKLDDKDLFSKSDPFLELYRVNDDQGLQLVYRTEVVKNNLNPVWEAFKVSLSSLCSCEETRPLKCLVWDYDSRGKHDFIGEFSTTFEEMQKAFEEGQAQWDCVNPKYKQKRRSYKNSGVVVLADLKFHRVYSFLDYIMGGCQIHFTVAIDFTASNGDPRNSCSLHYINPYQPNEYLKALVSVGEICQDYDSDKRFSALGFGARIPPKYEVSHDFAINFNPEDDECEGIQGVVEAYQNCLPRVQLYGPTNVAPIISKVARVAAAEESTGKASQYYILLILTDGVVTDMADTREAIVRASRLPMSIIIVGVGNADFTDMQVLDGDDGVLRSPRGEPALRDIVQFVPFRELKNASPAALAKCVLAEVPKQVVEYYSHRGLPPRSLGVPAGEASPGCTP

SEQ ID NO: 180012 - DNA, 1902 bp, Artificial Sequence
  derived and/or modified sequence
atgtcggcaggaagtgagaggggagccgcagccaccccaggagggctgcccgcaccgtgcgcatccaaagtcgagcttagactgagctgccggcacctgctggacagagaccccctgaccaaatccgacccatctgtggctttgctgcaacaggcccagggacagtgggtccaagtcggaaggaccgaagttgtgcggagtagcctccaccccgtttttagcaaggtgttcacagttgattattactttgaggaggtgcagagacttcggtttgaagtgtacgatacccacggaccaagtgggtttagctgccaagaggatgactttctgggaggaatggaatgtacgttgggccaacctgcgcagaagtggctactgcaggtggtaatgcgcgtatctgtggacgttctaggccctgcaggccattgtgctaagcacttcctatgttgtaccgagagttcacaccttgcccggactggtccatcctttctgcttaggtacgatgacttgtgccttccttgggctacagcgggagctgttcgctggtggacctgccgaggaggccacacccaaggttggcagattgtggcccagaagaaggtaacacgccccctgctgttaaagtttggtcgcaatgccgggaagtcaaccatcactgtgatagcagaggatatttcagggaacaacggatacgtggagctgagttttcgggcaaggaaactggatgataaggacttattttccaaatccgaccctttcttggaactgtatcgagttaacgatgatcagggcctccagctcgtttacaggactgaggtggtcaagaataacctcaatcccgtttgggaggccttcaaagtctcattgagtagcctgtgcagctgtgaggaaacacgtcctttgaaatgcttagtttgggactacgactctcggggcaaacatgactttattggcgaattcagcaccaccttcgaagaaatgcaaaaggcctttgaagagggacaggcccagtgggactgcgtgaacccgaaatacaaacagaaaaggagaagctacaagaacagcggcgtggtggttctggccgatttaaagtttcatcgcgtgtattcttttctggactacattatgggtgggtgccagatccacttcactgtggcaatcgatttcactgcctcgaatggcgaccccagaaacagttgctcgttacattacatcaacccataccagccaaatgagtatctcaaagcactagtatctgtgggtgagatttgccaagactacgattctgacaagaggttctcggcattgggattcggggctcggattccaccgaaatatgaggtgtcccacgactttgccatcaattttaatcctgaggatgacgagtgcgagggaatacagggcgtcgttgaagcataccagaattgtctgcccagagttcagctgtatgggccgaccaatgtagccccaatcatttccaaggtagcaagggtggccgctgcagaggagagcacggggaaggccagtcagtattacatcctacttatcctgacagatggcgtggtcacagatatggcagatacccgtgaggcaatcgtgcgcgcttctcgactcccaatgagtattattatcgtcggagttggaaacgccgattttacagacatgcaagtgcttgacggagacgacggggtgttgagatcccccagaggggagcccgcgctgcgcgacattgtccaatttgtgcccttcagggaattaaaaaatgctagtccggcagcgctggccaaatgtgttctggccgaggttccaaaacaggtggtcgaatactatagtcatcgggggttgcccccaagaagcctgggtgtccccgcaggagaggcatctccgggatgtacaccttag

SEQ ID NO: 180013 - DNA, 1902 bp, Artificial Sequence
  derived and/or modified sequence
atgtctgctggcagcgagagaggagctgctgccaccccaggcggcctgcctgccccctgtgccagcaaggtggagctgcggctgagctgccgccacctgctggaccgggaccccctgaccaagagtgaccccagcgtggccctgctgcagcaggcccagggccagtgggtgcaggtgggccgcacagaggtggtgcgcagcagcctgcaccctgtgttcagcaaggtgttcaccgtggactactactttgaggaggtgcagaggctgcgctttgaggtgtatgacacccacggccccagcggcttcagctgccaggaggatgacttcctgggcggcatggagtgcaccctgggccagcctgcccagaagtggctgctgcaggtggtgatgagggtgtctgtggatgtgctgggccctgctggccactgtgccaagcacttcctgtgctgcacagagagcagccacctggccaggacaggccccagcttcctgctgcgctatgatgacctgtgcctgccctgggccacagctggagctgtgcgctggtggacctgccggggcggccacacccagggctggcagatcgtggcccagaagaaggtgacccggcccctgctgctgaagtttggaagaaatgccggcaagagcaccatcaccgtgattgctgaggacatcagcggcaacaacggctacgtggagctgtccttccgggccaggaagctggatgacaaggacctcttcagcaagagtgaccccttcctggagctgtacagagtgaatgatgaccagggcctgcagctggtgtacagaacagaggtggtgaagaacaacctgaaccctgtgtgggaggccttcaaggtgtccctgagcagcctgtgcagctgtgaggagacccggcccctgaagtgcctggtgtgggactatgacagccggggcaagcatgacttcatcggggagttcagcaccacctttgaggagatgcagaaggcctttgaggagggccaggcccagtgggactgtgtgaaccccaagtacaagcagaagagaagaagctacaagaacagcggcgtggtggtgctggccgacctgaagttccaccgggtgtacagcttcctggactacatcatgggcggctgccagatccacttcaccgtggccatcgacttcaccgccagcaatggagaccccaggaacagctgcagcctgcactacatcaacccctaccagcccaatgagtacctgaaggccctggtgtctgtgggggagatctgccaggactatgacagcgacaagcgcttcagcgccctgggctttggagcccgcatcccccccaagtatgaggtgtcccatgactttgccatcaacttcaacccagaagatgatgaatgtgagggcatccagggcgtggtggaggcctaccagaactgcctgccccgggtgcagctgtatggccccaccaacgtggcccccatcatcagcaaggtggcccgggtggccgctgctgaggagagcacaggcaaggccagccagtactacatcctgctgatcctgacagatggagtggtgacagacatggctgacacccgggaggccatcgtgcgggccagccggctgcccatgagcatcatcatcgtgggcgtgggcaatgctgacttcacagacatgcaggtgctggatggagatgatggagtgctgcggagccccagaggagagcccgccctgcgggacatcgtgcagtttgtgcccttccgggagctgaagaatgccagccctgctgccctggccaagtgtgtgctggccgaggtgcccaagcaggtggtggagtactacagccaccggggcctgccccccaggagcctgggcgtgcctgctggggaggccagccctggctgcaccccctag

SEQ ID NO: 180014 - DNA, 1902 bp, Artificial Sequence
  derived and/or modified sequence
atgagcgccggcagcgagcggggcgccgccgccacccccggcggcttgccggccccctgcgcctcgaaagtcgagctaaggttgagctgccgtcacttgctggatagagacccgttgactaagagtgatccctcagtggccttgctgcagcaagctcagggccagtgggtccaggttggccgtactgaggtggtccgatcatctctacaccctgttttcagcaaagtattcactgtcgactattacttcgaggaagtgcaacgcttgcggtttgaggtttatgatacccacggaccatccgggttctcttgtcaggaggacgactttctgggggggatggagtgcacgctgggtcaacccgcccagaaatggctgttgcaggtggtgatgagagtttcagttgacgttctcggccccgcaggtcattgcgccaagcactttttatgctgcactgaatcctcgcatctggccaggacaggccctagtttccttctgagatatgatgatttatgccttccctgggccacagcgggcgcagttcgatggtggacctgtaggggcggtcacacgcaagggtggcagatagtagctcagaagaaggtgacacgccctctacttctgaagttcggccgtaatgcggggaagtccactatcaccgtgatcgctgaggacatatcagggaacaatggctatgtggagctgagtttcagagccagaaagctggatgataaggacctattctctaaaagtgacccattcttagaactatacagggtgaatgatgatcaggggcttcagctggtgtatagaacggaagttgtgaagaacaacttgaatcccgtctgggaggctttcaaggtgtctctgtctagtttgtgctcatgtgaagagactaggccattgaagtgcctggtctgggattacgactcccgcggaaaacacgatttcattggggagtttagtaccaccttcgaagaaatgcagaaagctttcgaggagggacaggctcagtgggattgtgtaaatcccaaatacaaacagaagcgtcggagctataaaaactcaggtgtcgtggtcttggctgacctgaaattccacagggtctattcattcctggactatataatgggggggtgtcagattcactttacagtggccattgatttcaccgctagcaatggtgacccgaggaactcatgcagtctgcactacattaatccctatcagcctaacgagtacctgaaagccctggtaagcgtgggagagatctgccaggactatgatagcgacaagcggtttagcgctctcgggtttggagcacggatcccacccaagtacgaggtgagtcatgatttcgccatcaactttaatcctgaggatgacgagtgcgaggggatccaaggggtagtcgaggcataccaaaactgtctgcctcgagtacagctgtatggccctaccaacgtcgcccctataattagtaaagtggcacgggttgccgctgcagaggaatccacaggtaaggcctcacagtattacattcttctcatcctgactgatggggtagttaccgacatggccgataccagggaagccattgtgcgcgccagtaggctccccatgtcgatcatcatcgttggcgtcgggaacgcagattttacagacatgcaggtcctggatggcgacgatggggtgctgagaagcccgcgaggtgaacctgctctgagagacatcgttcagtttgtgcctttcagggagctgaagaacgccagtcctgctgccctggccaagtgcgtactagcggaggttcccaaacaggtagtggagtactattctcacaggggcctgccacccagatctctgggagtgcccgctggagaggcttcacctggctgcaccccttag

SEQ ID NO: 180015 - DNA, 1902 bp, Artificial Sequence
  derived and/or modified sequence
atgtccgcaggctcggaacgcggagcggctgccaccccagggggtctgcctgcaccctgcgccagcaaagtggagctaagacttagttgtagacacctcctggatagggatccactgacaaagtctgacccctctgtcgccctcctccagcaggcccaggggcagtgggttcaggtgggtaggactgaggtggtcaggagcagcctgcacccagtatttagcaaagtgttcactgtggattattattttgaagaagtgcaaagactgaggttcgaagtgtacgatacccatggacccagcggcttcagctgtcaggaagatgattttcttgggggaatggagtgtacacttggccagcctgcccaaaaatggctcctgcaggtggtcatgcgggtctcagtcgacgtattagggcctgccggacactgcgccaagcactttctctgctgcacagaatcgagccatctggctcgaacaggcccttccttccttctgagatacgacgacctttgcctcccatgggctaccgcgggtgccgtccgatggtggacatgtcgagggggacatacgcaaggttggcagatcgtcgcccagaaaaaagtgactcgcccactgctgctgaagtttgggcgtaatgcaggcaagagcaccatcaccgtgattgcagaggacattagtggcaataacgggtacgtcgaattgagctttagggcgaggaaattggacgataaggacctcttctctaagagcgatccattcctagaattgtacagggtgaatgacgaccaaggcttgcagctagtgtaccggacagaggtcgttaagaacaatctcaatcccgtgtgggaagcattcaaggtgagcctgagttcgctctgctcttgcgaggagactaggcccctcaaatgcctcgtttgggactatgatagcaggggtaagcacgacttcattggggaatttagcacgacctttgaggaaatgcagaaggcgttcgaagaagggcaggcccaatgggattgcgtaaacccaaagtacaagcaaaaaagacgcagttacaagaattcaggagtggtcgtcctggcagatctcaagtttcatcgagtgtactcgttcttggactatattatggggggttgccagatccactttaccgtggccattgattttaccgcttcaaacggcgaccccaggaatagttgctctctacattatatcaacccatatcagcctaatgaatacttgaaggctttggtaagcgttggcgagatatgccaagactacgactctgataagcggttcagtgccctgggatttggggcacgtatcccacccaaatacgaagtatcacatgacttcgccatcaactttaacccagaggacgatgaatgcgaaggaatacaaggagtcgtagaggcctatcagaactgtctgccacgggtgcagctgtacggtccaaccaacgtggctcctatcattagtaaggtggctcgcgtggcagcagcagaggaatctactgggaaagccagccagtactatatactactgatactgaccgatggagtagttacagatatggcggatacacgggaagcgatagttagggcctcccgcttgcccatgtcgattatcatcgttggggtgggcaatgctgacttcaccgatatgcaggtcctcgatggcgatgacggagtgttgcgtagtcccagaggggagcctgcgctgcgggacatcgtgcaatttgttcccttccgagagttgaaaaatgcgtcacccgctgccttggccaagtgcgtccttgccgaggttcctaaacaggtggtggaatattattcccacaggggattgccgcctaggagtctaggagtccctgccggagaagcctcgcctggctgcaccccctag

SEQ ID NO: 180016 - DNA, 2657 bp, Artificial Sequence
  derived and/or modified sequence
gcgcccggcaggcgttcagggaagcgcggccacgcctgggccggccaccatttcccgggcgccgcggcggcgccgactcgcgggcagcggcccctcagtgcgcccagccgggcccccgaacgccgggagcatgagcgcgggctcggagcgcggggcggcggcaacccccgggggtttgcccgcgccctgcgcctcgaaggtggagctgcggctcagctgccggcacctgctggaccgcgacccgctcaccaagtccgaccccagcgtggcgttgctgcagcaggcgcagggccagtgggtgcaggtgggcagaaccgaggtggtccggagcagcctgcatcccgtgttctccaaggtcttcacggtggactactacttcgaggaggtgcagaggctgcgctttgaggtgtacgacacgcatgggcccagcggcttcagctgtcaggaggacgatttcctggggggcatggagtgcaccctggggcagccagcccaaaagtggcttctgcaagtcgtgatgagagtgtctgttgatgtgctgggccctgctggacactgcgctaagcacttcctgtgctgcacggaatcctcacaccttgccaggacgggtccttcttttttattgaggtatgatgacctctgcctcccctgggcgactgctggcgccgtgaggtggtggacgtgcaggggtggccacacgcagggatggcagattgtggcccagaagaaggtgacccgcccgctgctgctcaagtttggcaggaacgctggcaagtccaccatcacggtgatcgccgaggacatctcggggaacaacggctacgtggagctctccttccgggccaggaagctggacgacaaggacctcttcagcaagtccgaccccttcctggagctctacagggtcaacgacgaccagggcttgcagctggtgtacaggacggaggtggtgaagaacaacctgaacccggtgtgggaggccttcaaagtctctctgagttccctctgcagctgcgaggagacaaggcctctaaagtgcctggtctgggattacgactctcgaggaaagcacgacttcatcggagaattctctaccaccttcgaggagatgcagaaggcctttgaggaggggcaggcccagtgggactgtgtgaaccccaaatacaagcagaagagacgcagttataagaactcaggagtggtcgtcctggctgacctcaagttccacagggtgtactccttcctggactatatcatgggcggctgccagatccacttcaccgtggccattgacttcaccgcctccaatggagacccgcggaacagctgctccctgcactacatcaacccctaccagccgaacgagtacctgaaggcactggtgtccgtgggcgagatctgccaggactatgacagtgacaagaggttttccgctttggggtttggagcccggatccctcccaagtatgaggtgtcccatgactttgccatcaatttcaaccctgaggacgatgagtgtgaaggcatccagggcgtggtggaggcctaccagaactgcctgcccagggtccagctctacggccccaccaacgtggcgcccatcatctccaaggtggcacgcgtggcggcggccgaggagagcaccgggaaagcctctcaatactacatcctgctgatcctgacggacggcgtggtgaccgacatggccgacacacgggaggccattgtgcgtgcctcacgcctgcccatgtccatcatcatcgtgggcgtgggcaacgccgacttcaccgacatgcaggtcctggacggcgacgacggcgtcctgcgctccccacggggtgagcccgcgctccgggacatcgtacagttcgtgcccttccgggagctcaagaacgcatcccctgcggcgctggccaagtgcgtgctggccgaggtcccgaagcaggtggtggagtactacagccacagaggcctgcccccgagaagcctgggtgtccctgccggagaggccagcccaggctgcacaccgtgaagatgtggagggcgtagggtgggggcagtgaggaatgggtccgtacagcctctgtctgcaacatgcttggggtcccttaagctccctccgacctcccagaagcctccagtccccaccaggccccactcccagtcctcctgggatcctgctggcttgggcccggctctggggcccccaaggccgaagggtgacaaaatacaggcccccatgcctggccctgcctgagccaggtgggtggagggagggagatcatgagggacttggagggagctgggagttcatccacgggagaccctgccccgatgagaaggggcagggactgggggctctgctttgcgtctaacctttgtgggggagggccagcaaggcagtccccccacgcccgagaaagcctgggggacccagacacctgtccccacagtcaaagcctggggacccagacatcctgtccccacagtcagcctcctgtccctgctggtgcccccacacccacctaccctgtgctttttgccgtcgggcctctgcacctgggtccatggggtctgcggggtctgcggggtctgcctggcctgtgggttctgccggtggggcttcaggagtaataaagtgtcaccctatccttgta

SEQ ID NO: 180017 - DNA, 1902 bp, Artificial Sequence
  derived and/or modified sequence
atgagcgccggcagcgagagaggcgccgccgccacccccggcggcctgcccgccccctgcgccagcaaggtggagctgagactgagctgcagacacctgctggacagagaccccctgaccaagagcgaccccagcgtggccctgctgcagcaggcccagggccagtgggtgcaggtgggcagaaccgaggtggtgagaagcagcctgcaccccgtgttcagcaaggtgttcaccgtggactactacttcgaggaggtgcagagactgagattcgaggtgtacgacacccacggccccagcggcttcagctgccaggaggacgacttcctgggcggcatggagtgcaccctgggccagcccgcccagaagtggctgctgcaggtggtgatgagagtgagcgtggacgtgctgggccccgccggccactgcgccaagcacttcctgtgctgcaccgagagcagccacctggccagaaccggccccagcttcctgctgagatacgacgacctgtgcctgccctgggccaccgccggcgccgtgagatggtggacctgcagaggcggccacacccagggctggcagatcgtggcccagaagaaggtgaccagacccctgctgctgaagttcggcagaaacgccggcaagagcaccatcaccgtgatcgccgaggacatcagcggcaacaacggctacgtggagctgagcttcagagccagaaagctggacgacaaggacctgttcagcaagagcgaccccttcctggagctgtacagagtgaacgacgaccagggcctgcagctggtgtacagaaccgaggtggtgaagaacaacctgaaccccgtgtgggaggccttcaaggtgagcctgagcagcctgtgcagctgcgaggagaccagacccctgaagtgcctggtgtgggactacgacagcagaggcaagcacgacttcatcggcgagttcagcaccaccttcgaggagatgcagaaggccttcgaggagggccaggcccagtgggactgcgtgaaccccaagtacaagcagaagagaagaagctacaagaacagcggcgtggtggtgctggccgacctgaagttccacagagtgtacagcttcctggactacatcatgggcggctgccagatccacttcaccgtggccatcgacttcaccgccagcaacggcgaccccagaaacagctgcagcctgcactacatcaacccctaccagcccaacgagtacctgaaggccctggtgagcgtgggcgagatctgccaggactacgacagcgacaagagattcagcgccctgggcttcggcgccagaatcccccccaagtacgaggtgagccacgacttcgccatcaacttcaaccccgaggacgacgagtgcgagggcatccagggcgtggtggaggcctaccagaactgcctgcccagagtgcagctgtacggccccaccaacgtggcccccatcatcagcaaggtggccagagtggccgccgccgaggagagcaccggcaaggccagccagtactacatcctgctgatcctgaccgacggcgtggtgaccgacatggccgacaccagagaggccatcgtgagagccagcagactgcccatgagcatcatcatcgtgggcgtgggcaacgccgacttcaccgacatgcaggtgctggacggcgacgacggcgtgctgagaagccccagaggcgagcccgccctgagagacatcgtgcagttcgtgcccttcagagagctgaagaacgccagccccgccgccctggccaagtgcgtgctggccgaggtgcccaagcaggtggtggagtactacagccacagaggcctgccccccagaagcctgggcgtgcccgccggcgaggccagccccggctgcaccccctag

SEQ ID NO: 180018 - protein, 856 aa, Artificial Sequence
  derived and/or modified sequence
MGTTASTAQQTVSAGTPFEGLQGSGTMDSRHSVSIHSFQSTSLHNSKAKSIIPNKVAPVVITYNCKEEFQIHDELLKAHYTLGRLSDNTPEHYLVQGRYFLVRDVTEKMDVLGTVGSCGAPNFRQVQGGLTVFGMGQPSLSGFRRVLQKLQKDGHRECVIFCVREEPVLFLRADEDFVSYTPRDKQNLHENLQGLGPGVRVESLELAIRKEIHDFAQLSENTYHVYHNTEDLWGEPHAVAIHGEDDLHVTEEVYKRPLFLQPTYRYHRLPLPEQGSPLEAQLDAFVSVLRETPSLLQLRDAHGPPPALVFSCQMGVGRTNLGMVLGTLILLHRSGTTSQPEAAPTQAKPLPMEQFQVIQSFLRMVPQGRRMVEEVDRAITACAELHDLKEVVLENQKKLEGIRPESPAQGSGSRHSVWQRALWSLERYFYLILFNYYLHEQYPLAFALSFSRWLCAHPELYRLPVTLSSAGPVAPRDLIARGSLREDDLVSPDALSTVREMDVANFRRVPRMPIYGTAQPSAKALGSILAYLTDAKRRLRKVVWVSLREEAVLECDGHTYSLRWPGPPVAPDQLETLEAQLKAHLSEPPPGKEGPLTYRFQTCLTMQEVFSQHRRACPGLTYHRIPMPDFCAPREEDFDQLLEALRAALSKDPGTGFVFSCLSGQGRTTTAMVVAVLAFWHIQGFPEVGEEELVSVPDAKFTKGEFQVVMKVVQLLPDGHRVKKEVDAALDTVSETMTPMHYHLREIIICTYRQAKAAKEAQEMRRLQLRSLQYLERYVCLILFNAYLHLEKADSWQRPFSTWMQEVASKAGIYEILNELGFPELESGEDQPFSRLRYRWQEQSCSLEPSAPEDLL

SEQ ID NO: 180019 - protein, 832 aa, Artificial Sequence
  derived and/or modified sequence
MGTTASTAQQTVSAGTPFEGLQGSGTMDSRHSVSIHSFQSTSLHNSKAKSIIPNKVAPVVITYNCKEEFQIHDELLKAHYTLGRLSDNTPEHYLVQGRYFLVRDVTEKMDVLGTVGSCGAPNFRQVQGGLTVFGMGQPSLSGFRRVLQKLQKDGHRECVIFCVREEPVLFLRADEDFVSYTPRDKQNLHENLQGLGPGVRVESLELAIRKEIHDFAQLSENTYHVYHNTEDLWGEPHAVAIHGEDDLHVTEEVYKRPLFLQPTYRYHRLPLPEQGSPLEAQLDAFVSVLRETPSLLQLRDAHGPPPALVFSCQMGVGRTNLGMVLGTLILLHRSGTTSQPEAAPTQAKPLPMEQFQVIQSFLRMVPQGRRMVEEVDRAITACAELHDLKEVVLENQKKLEGIRPESPAQGSGSRHSVWQRALWSLERYFYLILFNYYLHEQYPLAFALSFSRWLCAHPELYRLPVTLSSAGPVAPRDLIARGSLREDDLVSPDALSTVREMDVANFRRVPRMPIYGTAQPSAKALGSILAYLTDAKRRLRKVVWVSLREEAVLECDGHTYSLRWPGPPVAPDQLETLEAQLKAHLSEPPPGKEGPLTYRFQTCLTMQEVFSQHRRACPGLTYHRIPMPDFCAPREEDFDQLLEALRAALSKDPGTGFVFSCLSGQGRTTTAMVVAVLAFWHIQVVMKVVQLLPDGHRVKKEVDAALDTVSETMTPMHYHLREIIICTYRQAKAAKEAQEMRRLQLRSLQYLERYVCLILFNAYLHLEKADSWQRPFSTWMQEVASKAGIYEILNELGFPELESGEDQPFSRLRYRWQEQSCSLEPSAPEDLL

SEQ ID NO: 180020 - protein, 237 aa, Artificial Sequence
  derived and/or modified sequence
  misc_feature (1)..(1): Xaa can be any naturally occurring amino acid
XTYHRIPMPDFCAPREEDFDQLLEALRAALSKDPGTGFVFSCLSGQGRTTTAMVVAVLAFWHIQGFPEVGEEELVSVPDAKFTKGEFQVVMKVVQLLPDGHRVKKEVDAALDTVSETMTPMHYHLREIIICTYRQAKAAKEAQEMRRLQLRSLQYLERYVCLILFNAYLHLEKADSWQRPFSTWMQEVASKAGIYEILNELGFPELESGEDQPFSRLRYRWQEQSCSLEPSAPEDLL

SEQ ID NO: 180021 - DNA, 2571 bp, Artificial Sequence
  derived and/or modified sequence
atgggcaccaccgccagcaccgcccagcagaccgtgagcgccggcacccccttcgagggcctgcagggcagcggcaccatggacagcagacacagcgtgagcatccacagcttccagagcaccagcctgcacaacagcaaggccaagagcatcatccccaacaaggtggcccccgtggtgatcacctacaactgcaaggaggagttccagatccacgacgagctgctgaaggcccactacaccctgggcagactgagcgacaacacccccgagcactacctggtgcagggcagatacttcctggtgagagacgtgaccgagaagatggacgtgctgggcaccgtgggcagctgcggcgcccccaacttcagacaggtgcagggcggcctgaccgtgttcggcatgggccagcccagcctgagcggcttcagaagagtgctgcagaagctgcagaaggacggccacagagagtgcgtgatcttctgcgtgagagaggagcccgtgctgttcctgagagccgacgaggacttcgtgagctacacccccagagacaagcagaacctgcacgagaacctgcagggcctgggccccggcgtgagagtggagagcctggagctggccatcagaaaggagatccacgacttcgcccagctgagcgagaacacctaccacgtgtaccacaacaccgaggacctgtggggcgagccccacgccgtggccatccacggcgaggacgacctgcacgtgaccgaggaggtgtacaagagacccctgttcctgcagcccacctacagataccacagactgcccctgcccgagcagggcagccccctggaggcccagctggacgccttcgtgagcgtgctgagagagacccccagcctgctgcagctgagagacgcccacggccccccccccgccctggtgttcagctgccagatgggcgtgggcagaaccaacctgggcatggtgctgggcaccctgatcctgctgcacagaagcggcaccaccagccagcccgaggccgcccccacccaggccaagcccctgcccatggagcagttccaggtgatccagagcttcctgagaatggtgccccagggcagaagaatggtggaggaggtggacagagccatcaccgcctgcgccgagctgcacgacctgaaggaggtggtgctggagaaccagaagaagctggagggcatcagacccgagagccccgcccagggcagcggcagcagacacagcgtgtggcagagagccctgtggagcctggagagatacttctacctgatcctgttcaactactacctgcacgagcagtaccccctggccttcgccctgagcttcagcagatggctgtgcgcccaccccgagctgtacagactgcccgtgaccctgagcagcgccggccccgtggcccccagagacctgatcgccagaggcagcctgagagaggacgacctggtgagccccgacgccctgagcaccgtgagagagatggacgtggccaacttcagaagagtgcccagaatgcccatctacggcaccgcccagcccagcgccaaggccctgggcagcatcctggcctacctgaccgacgccaagagaagactgagaaaggtggtgtgggtgagcctgagagaggaggccgtgctggagtgcgacggccacacctacagcctgagatggcccggcccccccgtggcccccgaccagctggagaccctggaggcccagctgaaggcccacctgagcgagcccccccccggcaaggagggccccctgacctacagattccagacctgcctgaccatgcaggaggtgttcagccagcacagaagagcctgccccggcctgacctaccacagaatccccatgcccgacttctgcgcccccagagaggaggacttcgaccagctgctggaggccctgagagccgccctgagcaaggaccccggcaccggcttcgtgttcagctgcctgagcggccagggcagaaccaccaccgccatggtggtggccgtgctggccttctggcacatccagggcttccccgaggtgggcgaggaggagctggtgagcgtgcccgacgccaagttcaccaagggcgagttccaggtggtgatgaaggtggtgcagctgctgcccgacggccacagagtgaagaaggaggtggacgccgccctggacaccgtgagcgagaccatgacccccatgcactaccacctgagagagatcatcatctgcacctacagacaggccaaggccgccaaggaggcccaggagatgagaagactgcagctgagaagcctgcagtacctggagagatacgtgtgcctgatcctgttcaacgcctacctgcacctggagaaggccgacagctggcagagacccttcagcacctggatgcaggaggtggccagcaaggccggcatctacgagatcctgaacgagctgggcttccccgagctggagagcggcgaggaccagcccttcagcagactgagatacagatggcaggagcagagctgcagcctggagcccagcgcccccgaggacctgctgtag

SEQ ID NO: 180022 - DNA, 2499 bp, Artificial Sequence
  derived and/or modified sequence
atgggcaccaccgccagcaccgcccagcagaccgtgagcgccggcacccccttcgagggcctgcagggcagcggcaccatggacagcagacacagcgtgagcatccacagcttccagagcaccagcctgcacaacagcaaggccaagagcatcatccccaacaaggtggcccccgtggtgatcacctacaactgcaaggaggagttccagatccacgacgagctgctgaaggcccactacaccctgggcagactgagcgacaacacccccgagcactacctggtgcagggcagatacttcctggtgagagacgtgaccgagaagatggacgtgctgggcaccgtgggcagctgcggcgcccccaacttcagacaggtgcagggcggcctgaccgtgttcggcatgggccagcccagcctgagcggcttcagaagagtgctgcagaagctgcagaaggacggccacagagagtgcgtgatcttctgcgtgagagaggagcccgtgctgttcctgagagccgacgaggacttcgtgagctacacccccagagacaagcagaacctgcacgagaacctgcagggcctgggccccggcgtgagagtggagagcctggagctggccatcagaaaggagatccacgacttcgcccagctgagcgagaacacctaccacgtgtaccacaacaccgaggacctgtggggcgagccccacgccgtggccatccacggcgaggacgacctgcacgtgaccgaggaggtgtacaagagacccctgttcctgcagcccacctacagataccacagactgcccctgcccgagcagggcagccccctggaggcccagctggacgccttcgtgagcgtgctgagagagacccccagcctgctgcagctgagagacgcccacggccccccccccgccctggtgttcagctgccagatgggcgtgggcagaaccaacctgggcatggtgctgggcaccctgatcctgctgcacagaagcggcaccaccagccagcccgaggccgcccccacccaggccaagcccctgcccatggagcagttccaggtgatccagagcttcctgagaatggtgccccagggcagaagaatggtggaggaggtggacagagccatcaccgcctgcgccgagctgcacgacctgaaggaggtggtgctggagaaccagaagaagctggagggcatcagacccgagagccccgcccagggcagcggcagcagacacagcgtgtggcagagagccctgtggagcctggagagatacttctacctgatcctgttcaactactacctgcacgagcagtaccccctggccttcgccctgagcttcagcagatggctgtgcgcccaccccgagctgtacagactgcccgtgaccctgagcagcgccggccccgtggcccccagagacctgatcgccagaggcagcctgagagaggacgacctggtgagccccgacgccctgagcaccgtgagagagatggacgtggccaacttcagaagagtgcccagaatgcccatctacggcaccgcccagcccagcgccaaggccctgggcagcatcctggcctacctgaccgacgccaagagaagactgagaaaggtggtgtgggtgagcctgagagaggaggccgtgctggagtgcgacggccacacctacagcctgagatggcccggcccccccgtggcccccgaccagctggagaccctggaggcccagctgaaggcccacctgagcgagcccccccccggcaaggagggccccctgacctacagattccagacctgcctgaccatgcaggaggtgttcagccagcacagaagagcctgccccggcctgacctaccacagaatccccatgcccgacttctgcgcccccagagaggaggacttcgaccagctgctggaggccctgagagccgccctgagcaaggaccccggcaccggcttcgtgttcagctgcctgagcggccagggcagaaccaccaccgccatggtggtggccgtgctggccttctggcacatccaggtggtgatgaaggtggtgcagctgctgcccgacggccacagagtgaagaaggaggtggacgccgccctggacaccgtgagcgagaccatgacccccatgcactaccacctgagagagatcatcatctgcacctacagacaggccaaggccgccaaggaggcccaggagatgagaagactgcagctgagaagcctgcagtacctggagagatacgtgtgcctgatcctgttcaacgcctacctgcacctggagaaggccgacagctggcagagacccttcagcacctggatgcaggaggtggccagcaaggccggcatctacgagatcctgaacgagctgggcttccccgagctggagagcggcgaggaccagcccttcagcagactgagatacagatggcaggagcagagctgcagcctggagcccagcgcccccgaggacctgctgtag

SEQ ID NO: 180023 - DNA, 714 bp, Artificial Sequence
  derived and/or modified sequence
tgaacctaccacagaatccccatgcccgacttctgcgcccccagagaggaggacttcgaccagctgctggaggccctgagagccgccctgagcaaggaccccggcaccggcttcgtgttcagctgcctgagcggccagggcagaaccaccaccgccatggtggtggccgtgctggccttctggcacatccagggcttccccgaggtgggcgaggaggagctggtgagcgtgcccgacgccaagttcaccaagggcgagttccaggtggtgatgaaggtggtgcagctgctgcccgacggccacagagtgaagaaggaggtggacgccgccctggacaccgtgagcgagaccatgacccccatgcactaccacctgagagagatcatcatctgcacctacagacaggccaaggccgccaaggaggcccaggagatgagaagactgcagctgagaagcctgcagtacctggagagatacgtgtgcctgatcctgttcaacgcctacctgcacctggagaaggccgacagctggcagagacccttcagcacctggatgcaggaggtggccagcaaggccggcatctacgagatcctgaacgagctgggcttccccgagctggagagcggcgaggaccagcccttcagcagactgagatacagatggcaggagcagagctgcagcctggagcccagcgcccccgaggacctgctgtag

SEQ ID NO: 180024 - DNA, 2571 bp, Artificial Sequence
  derived and/or modified sequence
atgggaaccactgcttcaaccgctcagcagacagttagcgccggtactccctttgagggacttcaggggtccgggaccatggattccaggcacagtgtgtctatccacagctttcaatccacttctttacataactctaaggccaagtctatcatacctaataaagttgcaccggtggtcattacctataactgcaaagaggaattccagattcatgatgagctgcttaaagctcactacacattgggacgtctctccgacaacacacccgaacactaccttgttcagggccggtacttcctggtgagagacgtgaccgagaagatggatgtactaggcaccgtgggtagttgcggcgcccccaacttcagacaggtgcagggggggcttactgtctttggcatgggccaacctagtctatccggctttcggcgggtattacaaaagctgcagaaagatggacaccgggaatgcgtgatattctgcgtgcgggaggaacctgtgctgttcctccgggcggatgaggatttcgtgagttacactcctcgagacaaacagaatctgcacgaaaaccttcagggtctgggtccgggtgtgagggtcgagtcgttggagctggctattaggaaagaaatccatgacttcgctcagttgtctgaaaatacctatcacgtgtatcataacacggaagatctatggggggagccccacgccgtcgcaattcacggcgaagatgacctgcacgtcactgaggaagtgtataaacgacctttattcctgcagcctacctacaggtaccatcggttgccgctgccagagcaggggtcccctctggaagcacaacttgatgccttcgtgtctgtgctgcgggaaacccctagtttactccagctccgggatgcccacgggccccctcccgctctcgtattttcatgccagatgggcgtgggtcgcacgaatctgggcatggtactgggtacgctgattctgctgcatcggtctggaacaacctcccagccagaagccgcccccacgcaagccaaaccacttcctatggagcaattccaggtgatccagagctttcttaggatggttccccagggccggagaatggtcgaagaggtggaccgtgccatcactgcatgcgcagagcttcatgacctgaaggaggtcgttctggaaaatcaaaagaaactggaaggcattcgccctgaatcccccgcacaggggagtggctcccggcactccgtgtggcagagggccctgtggtctctcgagaggtacttttaccttatccttttcaattactatctgcatgaacagtacccactggcgttcgctctttcgttctcacgatggctttgcgcacaccccgaactctatcgactgccggttaccttaagttctgccggtcctgttgccccccgggaccttattgcaaggggctctcttagggaggatgacttggtctcaccagatgctctgagtacagtccgcgagatggatgtagctaacttcagacgcgtgcccagaatgccaatctacgggactgctcaacctagcgccaaggccctgggtagtatccttgcatatctgacggacgcaaagagacgcctgcggaaggtggtctgggttagccttagggaagaggctgtgctggaatgcgacggacatacctactccttgcgctggccagggcctccagtagctcctgaccagctggagactctcgaggcccaactgaaagcccatctatccgagcctcctccaggtaaagaagggccgctcacttaccgattccagacctgtctgactatgcaggaagtgttctcacagcaccgacgcgcttgcccaggactgacctatcacaggataccaatgcctgatttctgtgctccgagagaagaagattttgatcagcttttagaagccctcagggcggccctgagcaaggatcccggtacaggctttgtgttttcgtgtttgtccggacagggaagaacaactactgcaatggtggtcgcagtcctggccttttggcatatccagggattccccgaagtgggagaggaggagctggtctccgtccccgatgcaaagtttaccaaaggcgagtttcaggttgtgatgaaagtcgtgcagctgctgccagatgggcaccgtgttaaaaaggaggttgatgcggccctggataccgtgtccgaaacaatgaccccgatgcattatcacttgagagagatcattatctgcacatatcgacaggcgaaagccgccaaagaggcccaggaaatgcggcgactacagctgagaagtctccagtatttggaacggtacgtgtgcctaatcttattcaatgcctatctgcatctcgaaaaagcagacagctggcagcgccctttttctacctggatgcaggaagtggcctccaaggctggtatctatgagatcctgaatgagttaggcttccctgagttagaatccggtgaggaccagcccttcagtcgtttaagatatcggtggcaggaacagtcatgctccctcgagcctagcgcgccagaggatctgctctag

SEQ ID NO: 180025 - DNA, 2499 bp, Artificial Sequence
  derived and/or modified sequence
atgggtaccacagcttcaacggcccagcagaccgttagcgcaggcaccccctttgaaggcctgcagggcagcggcaccatggacagccgccactcagtcagcattcactccttccagagtacttccctgcacaattccaaggccaagagtataatcccaaacaaggtggccccagtcgtgattacctataactgcaaagaggaatttcagatacacgatgagcttctcaaggcccactatacgcttggacgactgtcggataatacccctgagcactacctcgtgcagggaagatatttcctcgtgcgcgatgtaactgaaaaaatggatgtactggggactgtgggttcatgtggtgctcccaactttagacaagtgcagggtggtctgaccgtttttggtatgggccagccgtccctgagtggcttccgcagggtgcttcagaagctgcagaaagatggacacagagaatgcgtcatcttctgtgtgagggaggagccagtcctattcctgcgggctgacgaagacttcgtgtcctacactcccagggacaagcagaacctgcacgagaatttgcaggggcttggtcccggggtaagagtggagtccctcgagctggccatccggaaagaaatacacgactttgcacagctcagtgagaacacctaccacgtgtaccataatactgaggacctgtggggtgagccacatgctgtggctatacatggcgaagacgacctccatgtaactgaagaagtgtataagcggccattgttccttcagccgacttaccgttatcataggctgccgctcccagaacagggcagtcctctagaggcccaactcgacgcatttgtcagcgtcttgcgggaaactccctcactcctccagctgcgggacgctcatggtccaccacccgcactcgtgttctcttgtcagatgggagtcggaagaactaacctggggatggtgctggggactctgatcctcctgcacaggtcaggcactacatctcaacccgaggccgctccaactcaggcgaagcctctgcctatggaacagttccaggtcatccaatcatttctgcgtatggtgccacaagggagaaggatggtcgaggaagtggatagagccatcacggcgtgcgcagaactccatgacctaaaggaggtggtcctcgaaaatcagaagaagttagaaggcattcgacccgaaagccccgcccagggttccgggagcagacacagcgtgtggcaaagggcgttatggtcattggaacgatacttttatcttattctctttaattactacctccacgagcagtaccctctggcattcgccctctccttcagtcggtggctctgtgctcaccccgaactatacaggctccctgtgacactctcctccgccgggcctgtcgccccacgagacttgattgctcgaggatcactgagagaggatgacctggtgtcacccgatgctctgagcactgtaagagaaatggacgtggccaatttccgccgtgtgccaaggatgccaatatacgggaccgcccagccgtcagccaaagcactgggatccatcctcgcatacctcacagatgctaagcgtcgattacgaaaggtggtctgggtgtctctgagggaggaggccgtgcttgaatgcgacggtcacacgtactccctgcgctggcccggcccccctgtagcacccgaccagctggagaccttagaggcacagctgaaggcccatttatcagagccaccaccaggcaaagaaggacctttgacataccgatttcagacttgtctaaccatgcaggaggtgttttcgcagcacaggagagcctgccctggactgacataccatagaattccgatgcctgacttctgcgccccccgcgaagaagatttcgaccaactgctggaggctcttagagccgccctgagtaaggaccctggcaccggattcgtgttctcttgcctgtccggtcagggcagaacaactacagctatggtcgtggcagtcctcgccttttggcatatccaggtcgtcatgaaagtcgtgcagctgctgccagatggacaccgcgtgaaaaaagaggttgacgcggctctcgacactgttagcgagactatgaccccaatgcactaccacctccgcgaaatcattatatgcacttataggcaggcaaaagccgcgaaggaggctcaggagatgaggagattgcagctccgttctttgcaatatctcgagcggtatgtgtgtctcattctttttaacgcctatctgcacttagaaaaagccgatagctggcagcgcccattcagcacctggatgcaggaggtggccagcaaggctggcatttacgagatactcaacgaactgggcttccccgagctcgagtctggggaagaccaaccttttagccgattgcggtaccgctggcaggagcagagctgtagcctggagccttctgcccctgaggaccttctctag

SEQ ID NO: 180026 - DNA, 714 bp, Artificial Sequence
  derived and/or modified sequence
tgaacctatcatcgaatccccatgcccgacttctgcgccccgagggaagaggactttgaccagctgctcgaggccttgcgcgccgctttatccaaggatcctggcacaggttttgtattttcatgcttgtcaggacaggggcgcaccaccactgctatggttgtggcagttctggctttttggcacattcagggattcccagaggttggagaggaagaattggtgtcagtccccgacgctaagttcactaaaggggagttccaggtggtgatgaaggttgtccagctgcttccagatgggcaccgagtcaaaaaggaggttgatgccgctttggacactgtgtccgagacgatgactcccatgcactatcacctgcgcgagattatcatctgtacctaccggcaggccaaggccgcaaaagaagcccaggagatgagacgactacagctccgctccctccagtatcttgagagatacgtatgtctgattctgttcaacgcctaccttcacttggaaaaggccgatagctggcaaagaccgttctcaacctggatgcaggaagtagcttccaaggcaggcatctacgagatcttgaacgaactggggttcccagagcttgaatctggggaagatcaaccctttagccgcttgcgctatcgttggcaagagcagtcttgcagtctggagccctccgcccccgaggacctgctgtag

SEQ ID NO: 180027 - DNA, 2571 bp, Artificial Sequence
  derived and/or modified sequence
atgggcaccacagccagcacagcccagcagacagtgtctgctggcaccccatttgagggcctgcagggcagcggcaccatggacagccgccacagcgtgtccatccacagcttccagagcaccagcctgcacaacagcaaggccaagagcatcatccccaacaaggtggcccctgtggtgatcacctacaactgcaaggaggagttccagatccatgatgagctgctgaaggcccactacaccctgggccgcctgagtgacaacaccccagagcactacctggtgcagggccgctacttcctggtgagagatgtgacagagaagatggatgtgctgggcaccgtgggcagctgtggggcccccaacttccggcaggtgcagggcggcctgactgtgtttggcatgggccagcccagcctgagcggcttccggcgggtgctgcagaagctgcagaaggatggccacagagaatgtgtgatcttctgtgtgcgggaggagcctgtgctcttcctgcgggcagatgaagattttgtgtcctacaccccccgggacaagcagaacctgcacgagaacctgcagggcctgggccctggggtgcgggtggagagcctggagctggccatcaggaaggagatccatgactttgcccagctgtctgagaacacctaccacgtgtaccacaacacagaggacctgtggggcgagccccatgctgtggccatccacggggaggatgacctgcacgtgacagaggaggtgtacaagaggcccctcttcctgcagcccacctaccgctaccaccggctgcccctgcctgagcagggcagccccctggaggcccagctggatgcctttgtgtctgtgctgcgggagacccccagcctgctgcagctgagagatgcccacggccccccaccagccctggtgttcagctgccagatgggcgtgggccgcaccaacctgggcatggtgctgggcaccctcatcctgctgcacaggagcggcaccaccagccagcctgaggccgcccccacccaggccaagcccctgcccatggagcagttccaggtgatccagagcttcctgaggatggtgccccagggccgcaggatggtggaggaggtggaccgggccatcacagcctgtgccgagctgcatgacctgaaggaggtggtgctggagaaccagaagaagctggagggcatccggcctgagagccctgcccagggcagcggcagccgccacagcgtgtggcagagggccctgtggagcctggagcgctacttctacctgatcctcttcaactactacctgcacgagcagtaccccctggcctttgccctgtccttcagccgctggctgtgtgcccaccctgagctgtaccgcctgcctgtgaccctgagcagcgctggccctgtggccccccgggacctgattgcccggggcagcctgcgggaggatgacctggtgtccccagatgccctgagcacagtgcgggagatggatgtggccaacttcagaagagtgcccaggatgcccatctatggaacagcccagcccagcgccaaggccctgggcagcatcctggcctacctgacagatgccaagaggcggctgaggaaggtggtgtgggtgtccctgcgggaggaggccgtgctggagtgtgatggccacacctacagcctgcgctggccaggcccccctgtggccccagaccagctggagaccctggaggcccagctgaaggcccacctgtctgagcccccacctgggaaggagggccccctgacctaccgcttccagacctgcctgaccatgcaggaggtgttcagccagcaccggcgggcctgccccggcctgacctaccaccgcatccccatgccagacttctgtgccccccgggaggaggactttgaccagctgctggaggccctgcgggccgccctgagcaaggaccccggcactggatttgtgttcagctgcctgagcggccagggccgcaccaccacagccatggtggtggccgtgctggccttctggcacatccagggcttccctgaggtgggggaggaggagctggtgtctgtgcctgatgccaagttcaccaagggggagttccaggtggtgatgaaggtggtgcagctgctgcctgatggccaccgggtgaagaaggaggtggatgctgccctggacacagtgtctgagaccatgacccccatgcactaccacctgcgggagatcatcatctgcacctaccggcaggccaaggccgccaaggaggcccaggagatgaggcggctgcagctgcggagcctgcagtacctggagcgctacgtgtgcctgatcctcttcaatgcctacctgcacctggagaaggctgacagctggcagaggcccttcagcacctggatgcaggaggtggccagcaaggccggcatctatgagatcctgaatgagctgggcttccctgagctggagagcggggaggaccagcccttcagccggctgcgctaccgctggcaggagcagagctgcagcctggagcccagcgcccctgaggacctgctgtag

SEQ ID NO: 180028 - DNA, 2499 bp, Artificial Sequence
  derived and/or modified sequence
atgggcaccacagccagcacagcccagcagacagtgtctgctggcaccccatttgagggcctgcagggcagcggcaccatggacagccgccacagcgtgtccatccacagcttccagagcaccagcctgcacaacagcaaggccaagagcatcatccccaacaaggtggcccctgtggtgatcacctacaactgcaaggaggagttccagatccatgatgagctgctgaaggcccactacaccctgggccgcctgagtgacaacaccccagagcactacctggtgcagggccgctacttcctggtgagagatgtgacagagaagatggatgtgctgggcaccgtgggcagctgtggggcccccaacttccggcaggtgcagggcggcctgactgtgtttggcatgggccagcccagcctgagcggcttccggcgggtgctgcagaagctgcagaaggatggccacagagaatgtgtgatcttctgtgtgcgggaggagcctgtgctcttcctgcgggcagatgaagattttgtgtcctacaccccccgggacaagcagaacctgcacgagaacctgcagggcctgggccctggggtgcgggtggagagcctggagctggccatcaggaaggagatccatgactttgcccagctgtctgagaacacctaccacgtgtaccacaacacagaggacctgtggggcgagccccatgctgtggccatccacggggaggatgacctgcacgtgacagaggaggtgtacaagaggcccctcttcctgcagcccacctaccgctaccaccggctgcccctgcctgagcagggcagccccctggaggcccagctggatgcctttgtgtctgtgctgcgggagacccccagcctgctgcagctgagagatgcccacggccccccaccagccctggtgttcagctgccagatgggcgtgggccgcaccaacctgggcatggtgctgggcaccctcatcctgctgcacaggagcggcaccaccagccagcctgaggccgcccccacccaggccaagcccctgcccatggagcagttccaggtgatccagagcttcctgaggatggtgccccagggccgcaggatggtggaggaggtggaccgggccatcacagcctgtgccgagctgcatgacctgaaggaggtggtgctggagaaccagaagaagctggagggcatccggcctgagagccctgcccagggcagcggcagccgccacagcgtgtggcagagggccctgtggagcctggagcgctacttctacctgatcctcttcaactactacctgcacgagcagtaccccctggcctttgccctgtccttcagccgctggctgtgtgcccaccctgagctgtaccgcctgcctgtgaccctgagcagcgctggccctgtggccccccgggacctgattgcccggggcagcctgcgggaggatgacctggtgtccccagatgccctgagcacagtgcgggagatggatgtggccaacttcagaagagtgcccaggatgcccatctatggaacagcccagcccagcgccaaggccctgggcagcatcctggcctacctgacagatgccaagaggcggctgaggaaggtggtgtgggtgtccctgcgggaggaggccgtgctggagtgtgatggccacacctacagcctgcgctggccaggcccccctgtggccccagaccagctggagaccctggaggcccagctgaaggcccacctgtctgagcccccacctgggaaggagggccccctgacctaccgcttccagacctgcctgaccatgcaggaggtgttcagccagcaccggcgggcctgccccggcctgacctaccaccgcatccccatgccagacttctgtgccccccgggaggaggactttgaccagctgctggaggccctgcgggccgccctgagcaaggaccccggcactggatttgtgttcagctgcctgagcggccagggccgcaccaccacagccatggtggtggccgtgctggccttctggcacatccaggtggtgatgaaggtggtgcagctgctgcctgatggccaccgggtgaagaaggaggtggatgctgccctggacacagtgtctgagaccatgacccccatgcactaccacctgcgggagatcatcatctgcacctaccggcaggccaaggccgccaaggaggcccaggagatgaggcggctgcagctgcggagcctgcagtacctggagcgctacgtgtgcctgatcctcttcaatgcctacctgcacctggagaaggctgacagctggcagaggcccttcagcacctggatgcaggaggtggccagcaaggccggcatctatgagatcctgaatgagctgggcttccctgagctggagagcggggaggaccagcccttcagccggctgcgctaccgctggcaggagcagagctgcagcctggagcccagcgcccctgaggacctgctgtag

SEQ ID NO: 180029 - DNA, 714 bp, Artificial Sequence
  derived and/or modified sequence
tgaacctaccaccgcatccccatgccagacttctgtgccccccgggaggaggactttgaccagctgctggaggccctgcgggccgccctgagcaaggaccccggcaccggctttgtgttcagctgcctgagcggccagggccgcaccaccacagccatggtggtggccgtgctggccttctggcacatccagggcttccctgaggtgggggaggaggagctggtgtctgtgcctgatgccaagttcaccaagggggagttccaggtggtgatgaaggtggtgcagctgctgcctgatggccaccgggtgaagaaggaggtggatgctgccctggacacagtgtctgagaccatgacccccatgcactaccacctgcgggagatcatcatctgcacctaccggcaggccaaggccgccaaggaggcccaggagatgaggcggctgcagctgcggagcctgcagtacctggagagatatgtgtgcctgatcctcttcaatgcctacctgcacctggagaaggctgacagctggcagaggcccttcagcacctggatgcaggaggtggccagcaaggccggcatctatgagatcctgaatgagctgggcttccctgagctggagagcggggaggaccagcccttcagccggctgcgctaccgctggcaggagcagagctgcagcctggagcccagcgcccctgaggacctgctgtag

SEQ ID NO: 180030 - DNA, 2571 bp, Artificial Sequence
  derived and/or modified sequence
atgggcaccaccgccagcaccgcccagcagaccgtgagcgccggcacgccttttgaaggccttcagggatctggtacgatggattcccggcacagcgtgagcatccactcctttcagagtacttccctgcataattccaaagctaagtccatcatcccaaataaggtggctccggtggtaattacctataattgtaaggaagagttccagattcacgatgaactgctgaaggcccactacacattgggtcgactgtccgacaacacccccgagcactatctcgttcaggggcgttactttctggtgcgggatgtaaccgaaaagatggacgttttgggtacggtggggtcttgtggagcccctaattttagacaggttcaaggcgggctgaccgttttcggcatgggccagccaagcctcagcgggttcagacgagttcttcagaaactacagaaagacgggcacagggaatgtgtaattttctgcgtgagagaagagccagtgctattcctcagagccgatgaggatttcgtgtcatacacccctagggataagcagaacctccacgagaacctgcaaggcctgggaccaggtgtgcgagtcgaatctctggaactggctatccgcaaggagatccacgacttcgcacaactatccgagaatacttaccatgtatatcacaatacagaggacttgtggggcgagcctcacgccgtcgctattcacggtgaggatgatctgcacgttactgaggaggtttacaaacgacccctgtttctccagcctacctatagataccataggctgcccctgccagaacaagggtcaccactggaggctcagctcgatgcattcgtcagtgttctccgcgagaccccaagtctactgcagctccgggacgcccatggacctccacctgcgctggttttcagctgccaaatgggagtcggtaggactaatcttggaatggttctcggcaccctgatactgttgcataggtctgggacaacatcccagcccgaggccgctccaacgcaggcaaaacctttgcctatggaacagtttcaggtgatccagtcatttcttcgaatggtgccacaaggcagacgcatggtggaagaggtggaccgtgccattacagcctgcgccgagctgcatgatctgaaggaggttgtgctggagaatcagaagaaactggagggcatccgacctgagagcccagctcagggatccgggtccagacactccgtgtggcaacgcgccctctggtcgttagagaggtacttttacttaattttgttcaactactatctccacgaacagtacccgctcgcgtttgcgctctcctttagtagatggctgtgcgcccatcctgaattgtataggttaccggtaaccctgagttccgccggaccagtagcgccccgagacctaattgctcggggttcacttcgcgaagacgacttggtgtcccccgatgccctgtcgacagtgcgcgaaatggatgtggctaactttagacgcgtgcccaggatgcctatctacggcactgcccagccctctgctaaagctctggggtccatcctggcatatctgactgacgccaagcggaggttacggaaagtggtctgggtgtcactccgggaggaggctgttctggagtgcgacggacacacatacagcctgcgctggcctggccctcccgtggctccagatcagttggaaacactggaagctcagctcaaagcccacctctcagaaccccctcccggcaaggagggccctcttacgtataggttccagacatgtctgacaatgcaggaggtgttttcgcagcaccgaagggcctgtcccgggctcacgtaccacaggattcctatgcctgacttttgcgctccgcgcgaagaggacttcgatcagctcctggaggctctgagggccgctctgagcaaagatcctgggacggggtttgtgttctcatgcctgagcggtcagggaagaacaaccaccgccatggtcgtcgcagtcctagctttttggcacattcagggcttcccggaggtaggagaagaagagctcgtctccgtgccagatgcaaaatttactaagggggaattccaagttgtgatgaaagttgtgcagcttctgccagacggccacagggtgaagaaggaagtagatgccgcactcgatactgtgagtgaaacaatgactccaatgcactaccatctgcgtgagatcataatttgcacctacagacaggcgaaggccgctaaggaagcacaggaaatgagaaggctccagctacgctcactgcagtacctcgaaagatatgtatgcttaattctttttaatgcatatctgcacctcgagaaggctgacagctggcaacggcccttctccacctggatgcaagaggtggcttctaaagccggtatttacgaaattctcaatgagctcggctttcccgagctggagagcggagaagatcagccattttcacggcttagatatagatggcaggagcagagctgcagtctggagccaagcgcacccgaagacctgttgtag

SEQ ID NO: 180031 - DNA, 2499 bp, Artificial Sequence
  derived and/or modified sequence
atgggcaccaccgccagcaccgcccagcagaccgtgagcgccggcactcccttcgagggcctgcagggcagcggcacaatggatagccggcatagcgtttccatacacagttttcagtccacatccctccataatagcaaagccaaaagcattatcccaaacaaagtggctcctgtggtgatcacatacaattgtaaagaagagtttcagatccacgacgagctattgaaggcccactacaccctcgggcggcttagcgataacactcctgaacattacttggtgcagggaagatattttctggtgagagacgttactgagaagatggacgtgctgggtaccgtgggaagctgtggtgcaccgaactttaggcaggtacagggagggctcaccgtttttggaatggggcagcccagtttgtctggcttccggcgcgtgctccagaaactgcagaaggacggccaccgtgagtgtgttattttttgcgtgcgggaagaaccagtcctttttctacgcgcggacgaagattttgtaagttacaccccgagagataaacaaaatttacatgagaacctgcaggggctcggaccaggagtgagagttgaaagtttggaactggccatcagaaaggagattcacgatttcgctcagctgtccgaaaatacatatcatgtctatcacaacacggaggatctttggggagagccacatgctgtggctatccatggagaagacgacctacatgtgaccgaggaagtgtataagcggcccctctttctccagcctacttaccgctaccatcgactccctctgcctgagcaggggagtcccctagaggcacaattggatgcctttgtgtctgttctgagagagactccatccctgctccagttgcgcgatgcgcatgggcccccccctgccctggttttctcctgtcagatgggcgtaggacggactaaccttggcatggtgcttggcacgctgatactgctccacagatcaggtacgacttcacagcccgaagctgccccaacccaggctaaacctttacctatggagcagttccaagtgattcagagcttccttagaatggtgccccagggtaggaggatggtagaagaagtagaccgggcgattacagcctgcgccgaactacacgacttaaaagaggttgtgctggagaaccagaagaaattggagggcattaggcctgagagcccggcacagggtagcggaagccgccactcagtgtggcagcgggccctgtggtcgctcgagcgctatttctacctcatcctgttcaattattatcttcatgagcagtatcctctggcgttcgcactctcatttagcagatggctgtgtgctcatcctgagctgtatcgtctgccagttactctgtcctcggcgggacccgtcgccccacgtgatttgatcgccaggggcagtctgagggaagatgacctggtgtcacccgacgcactctccaccgtgcgggaaatggatgtggctaactttcgaagggtccctcggatgccgatctacggcaccgcccagccttctgccaaagccctaggttccatcctagcttaccttacagacgccaaacgacgcctgcgtaaggtggtgtgggtctccctgcgggaagaggctgttcttgagtgtgacggacatacgtactccttgcggtggcctggaccacccgtggctcccgaccagcttgagacgttagaggcccagctgaaagcccacctgagcgagcctcctcctggcaaggagggcccattgacatatagatttcaaacgtgcctgacgatgcaagaggttttcagtcagcaccgcagagcttgccccggactgacataccatagaattcccatgccagatttctgcgccccgcgggaggaagacttcgaccagttgctcgaagccctgcgcgcagctctttcgaaagacccaggaacgggtttcgtcttctcctgcctttcgggacagggccgtactacaactgctatggttgtggccgtgctggcattttggcatatccaagttgtgatgaaagttgtccagctgctgcctgacggtcatcgcgtgaagaaggaggtggatgcagcactggacaccgtgtcagagactatgacacccatgcactatcacctgcgggaaatcattatctgcacttatcgacaggcaaaggctgccaaagaggctcaggaaatgaggcgattacagttaagatccttacagtatctcgaacgctacgtgtgtctcattctgtttaatgcctatctacaccttgagaaagcagatagttggcagaggcccttttccacatggatgcaggaagtcgctagtaaagccggcatctatgaaatactgaatgagctcgggttccctgagttggaatccggggaggaccagcctttctctcgattaagatacaggtggcaggagcagtcttgtagtcttgaaccaagcgcccccgaggacctgctgtag

SEQ ID NO: 180032 - DNA, 714 bp, Artificial Sequence
  derived and/or modified sequence
tgaacctaccaccggatccccatgcccgacttctgcgccccccgggaggaagactttgaccagcttttggaggcactaagagcggctttgtctaaagaccctggaactggattcgtttttagctgcctaagcggacaaggaaggacaaccactgcaatggtggtagctgttctggccttttggcatattcaggggttcccggaagtcggcgaggaggaacttgtgtccgttcctgatgcaaaattcactaaaggcgaattccaggtagtcatgaaggtcgtgcaactgctgcctgatggacaccgggttaagaaagaggtggacgcggcactcgatactgtcagcgagacgatgactccaatgcattaccatcttagggagatcattatttgcacctacaggcaggccaaggcggcgaaagaggcccaggagatgcgtagactccagctgcgttctctgcagtatctggagcgatatgtctgtctgatcttgttcaacgcgtacctgcacctcgagaaggctgactcttggcagaggcccttttctacttggatgcaggaggttgctagcaaagccgggatatacgagatccttaatgagcttggctttccagaactggagagcggggaagaccagccgttctcaagattgcggtaccgttggcaggagcagagctgttctttagagccgagtgctccggaggatcttctatag

SEQ ID NO: 180033 - DNA, 2571 bp, Artificial Sequence
  derived and/or modified sequence
atgggcacgacggcaagcacagcacagcagactgtcagcgccggaacaccctttgaggggttgcaggggtctggcactatggactcccgacattctgtcagcattcactcctttcaatccacatccttacataattcaaaggctaaatctatcataccaaataaggtggcccctgtagtgatcacatataattgtaaggaggagttccagattcatgatgagctgctgaaggctcactacactctcgggaggctgtctgataacacgcctgagcattacctcgtccaggggagatatttcctggtgagagatgtgacagaaaaaatggacgtgctcggaacagtcggtagctgtggtgcgccaaatttcaggcaggtccagggcggactaaccgtgttcggaatggggcaaccctcattgtccgggttcagacgagtgttacagaaactgcaaaaggacgggcaccgggagtgtgtgatcttctgtgtgcgtgaggaacctgtattatttttgagggctgatgaggactttgtgtcttacacccctcgggataaacagaatctacatgagaatctgcagggtctcgggccaggagtcagggtcgaatctctggagctggctatacggaaggagatccacgactttgcacagctgagcgagaacacgtatcatgtatatcataatacagaagacctgtggggggaacctcacgccgtggccatccacggggaagatgacttacatgtaactgaggaggtctacaagcggcctctgttcctgcaacctacctatcgctatcaccgtctccctttgccagagcagggtagtcccctcgaagcacagcttgatgcattcgtatccgtgctcagggagactccaagtctgctccagcttcgtgacgctcacggtccacccccagctttagtgttctcctgtcagatgggagtgggacggaccaatttgggaatggtgcttggaaccctgatcctgcttcatcgaagtggcactaccagtcagcctgaagccgctcctactcaagccaaacccctccccatggaacagttccaggtgatccagtctttccttaggatggtgccacagggcaggcgtatggtggaagaggtggaccgtgccatcaccgcatgtgccgaactgcacgatctcaaggaggtcgtgctggaaaaccagaagaaactggaaggcatccggcctgagtcccccgctcaggggagcggctccaggcatagcgtctggcaacgtgccctgtggtcgttagagcgctacttttacctcattctttttaactactatctgcacgagcaataccctcttgccttcgctctgagcttttcaagatggctatgcgcacacccagaactgtaccgcttgccagtcactctgagtagtgcaggccctgtggcacctagagatctaatcgctaggggcagcctacgtgaggacgacctagtgagcccagacgcgttgtccaccgtccgcgagatggacgtggccaatttccgcagagtgcccaggatgccgatttacggtacagctcagccaagcgcaaaggctctcgggtcaatcctggcctacctgactgacgcaaagcgcaggctccggaaggtggtgtgggtcagcttaagagaggaggccgtccttgaatgcgatgggcacacttacagccttcgctggcctggtccccctgtggcacctgaccagctggagactctggaagctcagcttaaagcccacctctcggagcccccaccaggcaaggaaggcccattgacatataggtttcagacatgtcttacgatgcaggaagtattctcccagcaccgccgagcatgtcctgggttgacatatcatagaattccaatgcccgatttttgtgctcccagagaagaagacttcgatcagctgctggaggcattgcgggctgccctgtcaaaggacccaggcacaggcttcgtgtttagttgcctgtctggacaaggaagaacaaccaccgcaatggtcgtcgccgtactcgccttttggcatattcaaggattccccgaggtcggtgaagaagaactcgtgtccgttcccgatgctaagttcacgaaaggcgaattccaggttgtcatgaaagttgtgcagttgctccccgacgggcaccgcgtgaagaaggaggtggacgctgccctggatactgtcagcgagaccatgacccccatgcactatcacctgcgagagatcatcatctgcacgtacagacaggccaaggcagccaaagaagcccaggaaatgcgaagactgcagcttagaagcctgcagtatttagagaggtacgtatgcctgatcctgtttaacgcttacctgcatctggagaaagctgattcttggcagcgtccgttttctacatggatgcaagaagtagcatctaaggcaggaatatacgagatacttaatgagcttggttttccagaactcgaatccggcgaagatcagccctttagccggttgcgatacaggtggcaggaacagagctgcagcctcgaaccatccgcaccagaagaccttctttag

SEQ ID NO: 180034 - DNA, 2499 bp, Artificial Sequence
  derived and/or modified sequence
atgggtaccaccgcatccactgctcagcaaactgtctctgccggtaccccattcgaaggcctgcaggggtccggcactatggactcaaggcacagcgtatccattcattcatttcaatctacctcactccacaatagcaaagccaagtcaatcatccccaacaaagtagcacccgtagtgattacctacaactgcaaagaggagtttcagatccacgatgaacttctaaaagctcattacacactggggcgactgtccgacaacaccccagagcattacctcgtacaggggaggtatttccttgtaagggacgtgaccgagaagatggacgtcctgggaaccgtagggagctgtggagcccctaatttcagacaggtgcaggggggtcttactgtgttcggcatgggccagccttctctttccggttttcgtcgggttctccagaagctgcaaaaggacgggcatagagaatgcgtcattttttgcgtgcgagaagagccagtgctgttccttcgcgcagacgaagactttgtgagctacactccgcgtgataaacagaatcttcacgaaaacctccaaggattgggtccaggtgttcgagtagagagtttggaactcgctatccgcaaagaaattcacgacttcgcacagctttcagagaacacataccacgtgtatcacaacactgaggacctatggggcgagcctcacgccgttgccatacacggggaggacgatctccacgtaacagaagaggtgtacaaacggccattattcctgcagccaacctataggtaccaccgactgccccttcccgagcaggggtccccccttgaagcccagcttgacgcttttgtctcagtgctcagagagaccccttctctattacagctgcgagatgctcacggaccgcctccagccctggtcttcagctgtcagatgggggtgggtcgcaccaacctggggatggtgctcggcacactgatactactccaccggagtggtactacctcccagcccgaagctgcccctacacaagccaagcccctgccaatggaacagttccaggtgatacagtcctttctgcgaatggtacctcaaggacgcaggatggtggaggaggtggatcgggctattacagcttgtgccgaactccacgatctgaaggaggtggtcctggaaaaccagaagaaactcgagggaattaggcccgaatctccagcacagggcagtggtagcaggcatagcgtgtggcaacgggcattgtggagtttagaacgttatttctatcttatcctcttcaactactacctgcacgaacagtaccctcttgcgtttgctctgtccttctctaggtggctctgtgcccacccagagttgtaccggcttcctgtgactctctcatcggctggtcctgtcgctcccagggacctaatcgcccgagggagcctgagggaagacgacctggtctctccggacgccctcagcactgtccgcgagatggacgttgcaaattttcggagggtcccacgtatgcccatctacggcactgcccaaccgagcgcaaaggccctagggtccatcctggcatatctgacagacgccaaaagacggctgagaaaagtagtatgggtgagccttagggaggaggcagtcctggagtgtgacggccatacttactcattgagatggcctgggccacccgtggcacccgaccaactcgagacactcgaggcccaactaaaggctcacctcagcgaaccaccaccgggaaaggaaggccctctgacttaccgctttcagacatgcctaacaatgcaggaagtgtttagccagcatcgccgagcctgccctggcctcacctaccaccggattccaatgcctgacttctgcgccccaagagaggaggactttgatcagttgctggaggccctaagggcagctctgtcaaaagatcctggaacaggatttgtgttctcctgtctatctgggcagggaaggacaactactgcgatggtggttgctgtgctggctttctggcatattcaggtagtgatgaaggtggtgcagctcctccccgacggtcatagggtcaagaaggaagttgacgccgctctggacaccgtcagcgagacaatgactcctatgcactaccacctccgagaaattattatatgtacttacaggcaggcaaaggccgcaaaggaggctcaggaaatgcgtaggctgcagctgcggagcctgcagtatcttgaaagatacgtttgcctcattttatttaacgcctatctgcatctagaaaaagcagactcttggcagcgccctttctctacttggatgcaagaggttgcaagtaaagctgggatttatgagatcttgaacgagttgggattcccagagttggagagtggtgaggatcagccattctcccgcctgcggtatcggtggcaggagcaatcctgctctctggagccttcagctcctgaggacctgctatag

SEQ ID NO: 180035 - DNA, 714 bp, Artificial Sequence
  derived and/or modified sequence
tgaacataccaccgaattcctatgcccgacttctgcgcgcctagagaggaggacttcgatcagctgttggaagccctccgggctgctttgtctaaggatcccggaacagggtttgtgttcagttgcttgtctggacagggcagaaccaccactgcaatggtcgtggccgtgcttgcattctggcacattcagggctttcctgaagtcggagaagaagaattagtgagtgtccctgacgcaaagttcacaaagggggaatttcaggtcgtgatgaaggtggtacagttattgcctgatgggcacagagttaagaaggaggtcgacgcggctctcgatacagtctccgaaactatgacgcccatgcactaccacttgcgcgagatcatcatatgcacttatcgacaagctaaggctgccaaggaagctcaggagatgagacgtctccagctccgaagtcttcagtacttggaaaggtacgtgtgtttaatactgttcaatgcatacctgcacctcgagaaagccgatagttggcagagacccttcagtacatggatgcaggaagtggcgagcaaggccggtatctacgagatcctgaatgagctcggatttcctgaattggaatccggcgaggatcagcccttcagccggctgcggtaccgctggcaagagcaaagttgttctttggaaccgtcagcgcctgaagatctcctctag

SEQ ID NO: 180036 - DNA, 4568 bp, Artificial Sequence
  derived and/or modified sequence
cgggccggggcgcgcaggtcccgtcgccggtgagcacgggctccctctcgcgtggcctcgccgggtccgcctggcctgcccacctccggagccacctctgcccccgcatgggctggcgaagttgggaggagcgagctggagccagagcgcgcgccgggcgcgccccgtcgctgcctgactcggcgcccgcagttcgggcgcagcacgccggccgcaggagcacggatgccccccggagccgcgggctggcaggtctggggtcctgaggctgctggcagactatgggtacaacggccagcacagcccagcagacggtctcggcaggcaccccatttgagggcctacagggcagtggcacgatggacagtcggcactccgtcagcatccactccttccagagcactagcttgcataacagcaaggccaagtccatcatccccaacaaggtggcccctgttgtgatcacgtacaactgcaaggaggagttccagatccatgatgagctgctcaaggctcattacacgttgggccggctctcggacaacacccctgagcactacctggtgcaaggccgctacttcctggtgcgggatgtcactgagaagatggatgtgctgggcaccgtgggaagctgtggggcccccaacttccggcaggtgcagggtgggctcactgtgttcggcatgggacagcccagcctctcagggttcaggcgggtcctccagaaactccagaaggacggacatagggagtgtgtcatcttctgtgtgcgggaggaacctgtgcttttcctgcgtgcagatgaggactttgtgtcctacacacctcgagacaagcagaaccttcatgagaacctccagggccttggacccggggtccgggtggagagcctggagctggccatccggaaagagatccacgactttgcccagctgagcgagaacacataccatgtgtaccataacaccgaggacctgtggggggagccccatgctgtggccatccatggtgaggacgacttgcatgtgacggaggaggtgtacaagcggcccctcttcctgcagcccacctacaggtaccaccgcctgcccctgcccgagcaagggagtcccctggaggcccagttggacgcctttgtcagtgttctccgggagacccccagcctgctgcagctccgtgatgcccacgggcctcccccagccctcgtcttcagctgccagatgggcgtgggcaggaccaacctgggcatggtcctgggcaccctcatcctgcttcaccgcagtgggaccacctcccagccagaggctgcccccacgcaggccaagcccctgcctatggagcagttccaggtgatccagagctttctccgcatggtgccccagggaaggaggatggtggaagaggtggacagagccatcactgcctgtgccgagttgcatgacctgaaagaagtggtcttggaaaaccagaagaagttagaaggtatccgaccggagagcccagcccagggaagcggcagccgacacagcgtctggcagagggcgctgtggagcctggagcgatacttctacctgatcctgtttaactactaccttcatgagcagtacccgctggcctttgccctcagtttcagccgctggctgtgtgcccaccctgagctgtaccgcctgcccgtgacgctgagctcagcaggccctgtggctccgagggacctcatcgccaggggctccctacgggaggacgatctggtctccccggacgcgctcagcactgtcagagagatggatgtggccaacttccggcgggtgccccgcatgcccatctacggcacggcccagcccagcgccaaggccctggggagcatcctggcctacctgacggacgccaagaggaggctgcggaaggttgtctgggtgagccttcgggaggaggccgtgttggagtgtgacgggcacacctacagcctgcggtggcctgggccccctgtggctcctgaccagctggagaccctggaggcccagctgaaggcccatctaagcgagcctcccccaggcaaggagggccccctgacctacaggttccagacctgccttaccatgcaggaggtcttcagccagcaccgcagggcctgtcctggcctcacctaccaccgcatccccatgccggacttctgtgccccccgagaggaggactttgaccagctgctggaggccctgcgggccgccctctccaaggacccaggcactggcttcgtgttcagctgcctcagcggccagggccgtaccacaactgcgatggtggtggctgtcctggccttctggcacatccaaggcttccccgaggtgggtgaggaggagctcgtgagtgtgcctgatgccaagttcactaagggtgaatttcaggtagtaatgaaggtggtgcagctgctacccgatgggcaccgtgtgaagaaggaggtggacgcagcgctggacactgtcagcgagaccatgacgcccatgcactaccacctgcgggagatcatcatctgcacctaccgccaggcgaaggcagcgaaagaggcgcaagaaatgcggaggctgcagctgcggagcctgcagtacttggagcgctatgtctgcctgattctcttcaacgcgtacctccacctggagaaggccgactcctggcagaggcccttcagcacctggatgcaggaggtggcatcgaaggctggcatctacgagatccttaacgagctgggcttccccgagctggagagcggggaggaccagcccttctccaggctgcgctaccggtggcaggagcagagctgcagcctcgagccctctgcccccgaggacttgctgtagggggccttactccctgtccccccacccacagggccccacgcaggcctggggtgtctgaggtgctcttggctgggagcggccctgaggggtgctggccttgaaatgattcccccacttcctggagagactgagcggagttgggagcctttttagaaagaactttttataggacagggagacagcacagccatcccttgcaaaccaccaaggtgtgtggctgacctccagggaggagcactcactggagtgctcacaaggtgcacactgctgtgtgtaccttgcagacaggccggcgttcagcctccaaggggctcactcccccagttgccaaacactgtggatctctctgtcctcttctcccctctctcagattggcctggcagcccctggcacagagcagacccggccactggtagctccccacttccttactcctgctgctctgccattgccgctccccttgttgctgcccaagcactgccctcgggcgtctggcagcctgaggtgggtggaggggacagtgttctggatagatctattatgtgaaaggcagcttcacccagttttctggactctcatgcccccatctccgacctgggagacttcaggaatgacaacctacccagcctggtggggctggcaggatggtggaggtttctcaaggagctggagacttcagggagcccctctcatggggaggaaagagcttccagggggcgaacgcagcacagaggaagaggcctgctccacttgtctgggaacctgggcaggaggcacagaggaagccaaggcctggagctgcaggtcccccggcatctctctctgtcccggcagcccaggatggcctggtgcccccacctgctgcagcaggagccccaaggagtgctagctgagggtggttgctggggtggtcctcatggacagtgaggtgtgcaagggtgcactgagggtggtgggaggggatcacctgggttccaggccatccttgctgagcatctttgagcctgccttccggtgggagcagaaaaggccagaccctgctgagttagaggctgctgggatccactgtttccacacagcgggaaggctgctgggaacaggtggcagagaagtgccatgtttgcgttgagccttgcagctcttccagctggggactggtgcttgctgaaacccaggagctgaacagtgaggaggctgtccaccttgcttggctcactgggaccaggaaagcctgtctttggttaggctcgtgtacttctgcaggaaaaaaaaaaaaggatgtgtcattggtcatgatatttgaaaaggggaggaggccgaagttgttcccatttatccagtattggaaaatatttgacccccttggctgaattcttttgcagaactactgtgtgtctgttcactaccttttcaggtttattgtttttatttttgcatgaattaagacgttttaatttctttgcagacaaggtctagatgcggagtcagagatgggactgaatggggagggatcctttgtgttctcatggttggctctgactttcagctgtgttgggaccactggctgatcacatcacctctctgcctcagtttccccatctgtaaaatgggagaataatacttgcctacctacctcacaggggtgttgtgaggattcatttgtgattttttttttttttgtacagagcttttaagcattaaaaacagctaaatgtg

SEQ ID NO: 180037 - DNA, 4483 bp, Artificial Sequence
  derived and/or modified sequence
gcaggtcccgtcgccggtgagcacgggctccctctcgcgtggcctcgccgggtccgcctggcctgcccacctccggagccacctctgcccccgcatgggctggcgaagttgggaggagcgagctggagccagagcgcgcgccgggcgcgccccgtcgctgcctgactcggcgcccgcagttcgggcgcagcacgccggccgcaggagcacggatgccccccggagccgcgggctggcaggtctggggtcctgaggctgctggcagactatgggtacaacggccagcacagcccagcagacggtctcggcaggcaccccatttgagggcctacagggcagtggcacgatggacagtcggcactccgtcagcatccactccttccagagcactagcttgcataacagcaaggccaagtccatcatccccaacaaggtggcccctgttgtgatcacgtacaactgcaaggaggagttccagatccatgatgagctgctcaaggctcattacacgttgggccggctctcggacaacacccctgagcactacctggtgcaaggccgctacttcctggtgcgggatgtcactgagaagatggatgtgctgggcaccgtgggaagctgtggggcccccaacttccggcaggtgcagggtgggctcactgtgttcggcatgggacagcccagcctctcagggttcaggcgggtcctccagaaactccagaaggacggacatagggagtgtgtcatcttctgtgtgcgggaggaacctgtgcttttcctgcgtgcagatgaggactttgtgtcctacacacctcgagacaagcagaaccttcatgagaacctccagggccttggacccggggtccgggtggagagcctggagctggccatccggaaagagatccacgactttgcccagctgagcgagaacacataccatgtgtaccataacaccgaggacctgtggggggagccccatgctgtggccatccatggtgaggacgacttgcatgtgacggaggaggtgtacaagcggcccctcttcctgcagcccacctacaggtaccaccgcctgcccctgcccgagcaagggagtcccctggaggcccagttggacgcctttgtcagtgttctccgggagacccccagcctgctgcagctccgtgatgcccacgggcctcccccagccctcgtcttcagctgccagatgggcgtgggcaggaccaacctgggcatggtcctgggcaccctcatcctgcttcaccgcagtgggaccacctcccagccagaggctgcccccacgcaggccaagcccctgcctatggagcagttccaggtgatccagagctttctccgcatggtgccccagggaaggaggatggtggaagaggtggacagagccatcactgcctgtgccgagttgcatgacctgaaagaagtggtcttggaaaaccagaagaagttagaaggtatccgaccggagagcccagcccagggaagcggcagccgacacagcgtctggcagagggcgctgtggagcctggagcgatacttctacctgatcctgtttaactactaccttcatgagcagtacccgctggcctttgccctcagtttcagccgctggctgtgtgcccaccctgagctgtaccgcctgcccgtgacgctgagctcagcaggccctgtggctccgagggacctcatcgccaggggctccctacgggaggacgatctggtctccccggacgcgctcagcactgtcagagagatggatgtggccaacttccggcgggtgccccgcatgcccatctacggcacggcccagcccagcgccaaggccctggggagcatcctggcctacctgacggacgccaagaggaggctgcggaaggttgtctgggtgagccttcgggaggaggccgtgttggagtgtgacgggcacacctacagcctgcggtggcctgggccccctgtggctcctgaccagctggagaccctggaggcccagctgaaggcccatctaagcgagcctcccccaggcaaggagggccccctgacctacaggttccagacctgccttaccatgcaggaggtcttcagccagcaccgcagggcctgtcctggcctcacctaccaccgcatccccatgccggacttctgtgccccccgagaggaggactttgaccagctgctggaggccctgcgggccgccctctccaaggacccaggcactggcttcgtgttcagctgcctcagcggccagggccgtaccacaactgcgatggtggtggctgtcctggccttctggcacatccaagtagtaatgaaggtggtgcagctgctacccgatgggcaccgtgtgaagaaggaggtggacgcagcgctggacactgtcagcgagaccatgacgcccatgcactaccacctgcgggagatcatcatctgcacctaccgccaggcgaaggcagcgaaagaggcgcaagaaatgcggaggctgcagctgcggagcctgcagtacttggagcgctatgtctgcctgattctcttcaacgcgtacctccacctggagaaggccgactcctggcagaggcccttcagcacctggatgcaggaggtggcatcgaaggctggcatctacgagatccttaacgagctgggcttccccgagctggagagcggggaggaccagcccttctccaggctgcgctaccggtggcaggagcagagctgcagcctcgagccctctgcccccgaggacttgctgtagggggccttactccctgtccccccacccacagggccccacgcaggcctggggtgtctgaggtgctcttggctgggagcggccctgaggggtgctggccttgaaatgattcccccacttcctggagagactgagcggagttgggagcctttttagaaagaactttttataggacagggagacagcacagccatcccttgcaaaccaccaaggtgtgtggctgacctccagggaggagcactcactggagtgctcacaaggtgcacactgctgtgtgtaccttgcagacaggccggcgttcagcctccaaggggctcactcccccagttgccaaacactgtggatctctctgtcctcttctcccctctctcagattggcctggcagcccctggcacagagcagacccggccactggtagctccccacttccttactcctgctgctctgccattgccgctccccttgttgctgcccaagcactgccctcgggcgtctggcagcctgaggtgggtggaggggacagtgttctggatagatctattatgtgaaaggcagcttcacccagttttctggactctcatgcccccatctccgacctgggagacttcaggaatgacaacctacccagcctggtggggctggcaggatggtggaggtttctcaaggagctggagacttcagggagcccctctcatggggaggaaagagcttccagggggcgaacgcagcacagaggaagaggcctgctccacttgtctgggaacctgggcaggaggcacagaggaagccaaggcctggagctgcaggtcccccggcatctctctctgtcccggcagcccaggatggcctggtgcccccacctgctgcagcaggagccccaaggagtgctagctgagggtggttgctggggtggtcctcatggacagtgaggtgtgcaagggtgcactgagggtggtgggaggggatcacctgggttccaggccatccttgctgagcatctttgagcctgccttccggtgggagcagaaaaggccagaccctgctgagttagaggctgctgggatccactgtttccacacagcgggaaggctgctgggaacaggtggcagagaagtgccatgtttgcgttgagccttgcagctcttccagctggggactggtgcttgctgaaacccaggagctgaacagtgaggaggctgtccaccttgcttggctcactgggaccaggaaagcctgtctttggttaggctcgtgtacttctgcaggaaaaaaaaaaaaggatgtgtcattggtcatgatatttgaaaaggggaggaggccgaagttgttcccatttatccagtattggaaaatatttgacccccttggctgaattcttttgcagaactactgtgtgtctgttcactaccttttcaggtttattgtttttatttttgcatgaattaagacgttttaatttctttgcagacaaggtctagatgcggagtcagagatgggactgaatggggagggatcctttgtgttctcatggttggctctgactttcagctgtgttgggaccactggctgatcacatcacctctctgcctcagtttccccatctgtaaaatgggagaataatacttgcctacctacctcacaggggtgttgtgaggattcatttgtgattttttttttttttgtacagagcttttaagcattaaaaacagctaaatgtg

SEQ ID NO: 180038 - DNA, 867 bp, Artificial Sequence
  derived and/or modified sequence
cacctaccaccgcatccccatgccggacttctgtgccccccgagaggaggactttgaccagctgctggaggccctgcgggccgccctctccaaggacccaggcactggcttcgtgttcagctgcctcagcggccagggccgtaccacaactgcgatggtggtggctgtcctggccttctggcacatccaaggcttccccgaggtgggtgaggaggagctcgtgagtgtgcctgatgccaagttcactaagggtgaatttcaggtagtaatgaaggtggtgcagctgctacccgatgggcaccgtgtgaagaaggaggtggacgcagcgctggacactgtcagcgagaccatgacgcccatgcactaccacctgcgggagatcatcatctgcacctaccgccaggcgaaggcagcgaaagaggcgcaagaaatgcggaggctgcagctgcggagcctgcagtacttggagcgctatgtctgcctgattctcttcaacgcgtacctccacctggagaaggccgactcctggcagaggcccttcagcacctggatgcaggaggtggcatcgaaggctggcatctacgagatccttaacgagctgggcttccccgagctggagagcggggaggaccagcccttctccaggctgcgctaccggtggcaggagcagagctgcagcctcgagccctctgcccccgaggacttgctgtagggggccttactccctgtccccccacccacagggccccacgcaggcctggggtgtctgaggtgctcttggctgggagcggccctgaggggtgctggccttgaaatgattcccccacttcctggagagactgagcggagttgggagcctttttagaa

SEQ ID NO: 180039 - protein, 553 aa, Artificial Sequence
  derived and/or modified sequence
MRAPGRPALRPLPLPPLLLLLLAAPWGRAVPCVSGGLPKPANITFLSINMKNVLQWTPPEGLQGVKVTYTVQYFIYGQKKWLNKSECRNINRTYCDLSAETSDYEHQYYAKVKAIWGTKCSKWAESGRFYPFLETQIGPPEVALTTDEKSISVVLTAPEKWKRNPEDLPVSMQQIYSNLKYNVSVLNTKSNRTWSQCVTNHTLVLTWLEPNTLYCVHVESFVPGPPRRAQPSEKQCARTLKDQSSEFKAKIIFWYVLPVSITVFLFSVMGYSIYRYIHVGKEKHPANLILIYGNEFDKRFFVPAEKIVINFITLNISDDSKISHQDMSLLGKSSDVSSLNDPQPSGNLRPPQEEEEVKHLGYASHLMEIFCDSEENTEGTSLTQQESLSRTIPPDKTVIEYEYDVRTTDICAGPEEQELSLQEEVSTQGTLLESQAALAVLGPQTLQYSYTPQLQDLDPLAQEHTDSEEGPEEEPSTTLVDWDPQTGRLCIPSLSSFDQDSEGCEPSEGDGLGEEGLLSRLYEEPAPDRPPGENETYLMQFMEEWGLYVQMEN

SEQ ID NO: 180040 - protein, 209 aa, Artificial Sequence
  derived and/or modified sequence
MRAPGRPALRPLPLPPLLLLLLAAPWGRAVPCVSGGLPKPANITFLSINMKNVLQWTPPEGLQGVKVTYTVQYFIYGQKKWLNKSECRNINRTYCDLSAETSDYEHQYYAKVKAIWGTKCSKWAESGRFYPFLETQIGPPEVALTTDEKSISVVLTAPEKWKRNPEDLPVSMQQIYSNLKYNVSVLNTKSNRTVSLKWNGAYIHVPLCS

SEQ ID NO: 180041 - DNA, 1662 bp, Artificial Sequence
  derived and/or modified sequence
atgagggcacctgggcgacccgctctgcggccactgccactgccccctctcctgctgcttctgctcgcggccccttggggccgagcagtgccttgtgtgtccgggggtctccctaagcctgctaacattactttcctgagtattaatatgaaaaacgtcctccagtggacgccgcccgagggacttcaaggagtgaaagtgacctataccgtgcagtactttatctatggacagaagaaatggctgaacaagagtgaatgtcggaacatcaataggacttactgcgatcttagcgccgagacctcagactacgagcaccaatactatgccaaagttaaggctatttggggtacaaagtgttcaaagtgggcagagtcagggcgcttctatcctttcttggagacccagataggcccacccgaggtagccctgaccactgacgagaaaagtatctcagtggtcctcacagcacctgagaaatggaaaagaaaccccgaagatctgcccgtctcgatgcagcagatttattcgaatctgaagtataacgtaagcgtactgaatacaaagtcaaaccgcacctggtcccaatgcgttaccaatcacactctggtgttgacatggctggagccgaacacactatattgcgtgcatgtggagtcctttgtgcccggtcccccccgacgcgcccagcccagcgagaaacagtgcgcaaggaccctgaaagatcagtcaagtgagtttaaggctaagattatcttttggtatgtcctccctgtatctataactgtatttctgttttctgtgatgggatactccatttacaggtacatccatgttggcaaagagaagcaccccgccaatctgatccttatctacggcaatgagttcgacaagcggttttttgttcctgccgaaaagatcgttattaatttcataacgctgaacatcagcgatgacagcaaaatttcacaccaagatatgtcccttttgggtaagagtagcgatgtcagttcattaaacgacccccagcccagcgggaacctacgcccgccccaggaagaagaggaagtgaagcaccttggttacgcatcacacttgatggaaattttctgcgattccgaggaaaataccgagggcacaagcctgactcaacaggagtccctatctcgtaccataccccccgacaaaaccgttatcgagtacgaatacgatgtccggactactgacatctgtgcaggccccgaagagcaggagctcagtctgcaggaagaggtgtctacacagggtacccttttagaaagccaggctgcgttagctgtgctgggtccccaaacactgcaatactcgtacactccacagctccaggacttggatcctctcgcccaagagcatacggacagcgaagagggcccagaggaagaaccctcaaccacgttggtggactgggacccgcagacaggcagactctgtatcccctctctcagtagcttcgatcaggattccgaggggtgtgagccttccgaaggcgacggcctgggagaagaaggcctgttgagcaggctctatgaagaacctgccccagaccgaccacctggggaaaatgagacctacttgatgcaatttatggaggagtggggattgtacgtgcagatggagaactag

SEQ ID NO: 180042 - DNA, 630 bp, Artificial Sequence
  derived and/or modified sequence
atgagagcacctggaagacctgccttaagaccgctgccccttcccccattattattactactgttagccgccccctggggtcgggctgtcccttgcgtgagcggtgggttaccaaagcccgccaatatcacctttctgtccatcaatatgaagaacgtgttgcaatggacccctccagaaggactgcaaggtgtgaaagtcacatacactgtccagtattttatctacggccagaaaaagtggctaaataagagcgagtgccgcaatatcaaccgcacatactgtgatctttcagctgaaacttctgactacgagcaccagtactatgctaaggtgaaggctatatggggaacaaagtgctctaaatgggctgaatccggcagattctacccgttcctggagactcagatcggacctccagaagtggctctgactactgatgaaaagagcatctccgtcgttcttacggcccccgagaaatggaagcgcaaccccgaagatctgcccgtgtcaatgcagcagatctattctaacctaaaatataacgtgagtgtgcttaatacaaaaagtaataggaccgtttccctgaagtggaatggcgcctacatacacgtacctctatgctcctag

SEQ ID NO: 180043 - DNA, 1515 bp, Artificial Sequence
  derived and/or modified sequence
atgaagaatgtgctgcagtggacgccgccagagggactccagggggtaaaagtgacctataccgtccagtattttatttacggacagaaaaaatggttaaacaaatccgagtgccgcaatatcaatagaacctactgcgacctgagcgctgagaccagcgactacgaacatcagtattacgctaaggtgaaggctatttggggaactaagtgctccaagtgggctgaatccgggcggttctatcctttcttagagacccaaattggacctcccgaggtcgcactgacgacagatgaaaaatctatttctgtagttcttaccgctcccgaaaagtggaaacggaatcccgaagacctgccggtgtctatgcagcagatttatagcaatttgaaatacaacgtcagtgtgcttaatactaagtctaacaggacctggtctcaatgcgtcactaaccacaccttggttttaacatggctggagcccaatactctttattgtgtgcatgtggagtcattcgtgcccggcccccctcgccgagctcagcctagcgagaaacaatgcgccagaaccctcaaggatcagagcagtgaattcaaggcaaagataatcttctggtatgtcctccccgtgtctatcactgttttcctgttttccgtcatgggatattcaatttaccgctatatccatgtcggaaaggagaaacatccagccaacctgatcctgatttatgggaatgaattcgacaagcgcttctttgtgccagccgagaaaattgtgattaactttatcactctcaatatctcagacgattcaaagatttctcaccaggacatgtccttgttaggcaaaagttctgacgtaagcagcctgaatgacccccagccctccgggaatcttcgaccacctcaggaagaggaagaggtcaaacaccttgggtatgctagccacttgatggaaatcttttgcgatagtgaggaaaacactgaaggtacatctctgacccaacaggaatccctgagccgcacaatccctcctgacaaaactgtaattgagtacgagtatgacgtgcgcactactgacatctgtgcaggtccggaggaacaggaattgtccttacaagaggaggtcagcacgcagggaacgctgctggaatctcaagctgcactggcggttctcggcccccagaccctgcaatattcctatacacctcagctgcaggacctggaccccctggcccaggagcacaccgactcggaggaaggacccgaagaagagccgtctactactctggtagattgggatcctcaaactggccgcctgtgcatcccctccctgagttcctttgaccaggattcagagggctgtgaaccgtctgagggagatgggctgggggaagaaggtctgctgtcacggttatatgaggagccagcccctgatcgtccgcctggagagaatgagacctacttgatgcagtttatggaagagtgggggctctacgttcagatggagaactag

SEQ ID NO: 180044 - DNA, 3485 bp, Artificial Sequence
  derived and/or modified sequence
tccagctgggtagccgggggagcgcgcgtgggggctccgcgagtcgctcgcccttggtttctggggaagcctgggggacgcggctgtggcggaggcgccctgggactcaggtcgcctggagcgtggcacgcagagccccaggcgcggagctgaggccgcgcggccgcgcttggccccagcgggcgtgggactgagcagtctgctgccccccgacatgtgacccagccccgccgcccatgcgggctcccggccgcccggccctgcggccgctgccgctgccgccgctgctgctgttgctcctggcggcgccttggggacgggcagttccctgtgtctctggtggtttgcctaaacctgcaaacatcaccttcttatccatcaacatgaagaatgtcctacaatggactccaccagagggtcttcaaggagttaaagttacttacactgtgcagtatttcatatatgggcaaaagaaatggctgaataaatcagaatgcagaaatatcaatagaacctactgtgatctttctgctgaaacttctgactacgaacaccagtattatgccaaagttaaggccatttggggaacaaagtgttccaaatgggctgaaagtggacggttctatccttttttagaaacacaaattggcccaccagaggtggcactgactacagatgagaagtccatttctgttgtcctgacagctccagagaagtggaagagaaatccagaagaccttcctgtttccatgcaacaaatatactccaatctgaagtataacgtgtctgtgttgaatactaaatcaaacagaacgtggtcccagtgtgtgaccaaccacacgctggtgctcacctggctggagccgaacactctttactgcgtacacgtggagtccttcgtcccagggccccctcgccgtgctcagccttctgagaagcagtgtgccaggactttgaaagatcaatcatcagagttcaaggctaaaatcatcttctggtatgttttgcccgtatctattaccgtgtttcttttttctgtgatgggctattccatctaccgatatatccacgttggcaaagagaaacacccagcaaatttgattttgatttatggaaatgaatttgacaaaagattctttgtgcctgctgaaaaaatcgtgattaactttatcaccctcaatatctcggatgattctaaaatttctcatcaggatatgagtttactgggaaaaagcagtgatgtatccagccttaatgatcctcagcccagcgggaacctgaggccccctcaggaggaagaggaggtgaaacatttagggtatgcttcgcatttgatggaaattttttgtgactctgaagaaaacacggaaggtacttctctcacccagcaagagtccctcagcagaacaatacccccggataaaacagtcattgaatatgaatatgatgtcagaaccactgacatttgtgcggggcctgaagagcaggagctcagtttgcaggaggaggtgtccacacaaggaacattattggagtcgcaggcagcgttggcagtcttgggcccgcaaacgttacagtactcatacacccctcagctccaagacttagaccccctggcgcaggagcacacagactcggaggaggggccggaggaagagccatcgacgaccctggtcgactgggatccccaaactggcaggctgtgtattccttcgctgtccagcttcgaccaggattcagagggctgcgagccttctgagggggatgggctcggagaggagggtcttctatctagactctatgaggagccggctccagacaggccaccaggagaaaatgaaacctatctcatgcaattcatggaggaatgggggttatatgtgcagatggaaaactgatgccaacacttccttttgccttttgtttcctgtgcaaacaagtgagtcacccctttgatcccagccataaagtacctgggatgaaagaagttttttccagtttgtcagtgtctgtgagaattacttatttcttttctctattctcatagcacgtgtgtgattggttcatgcatgtaggtctcttaacaatgatggtgggcctctggagtccaggggctggccggttgttctatgcagagaaagcagtcaataaatgtttgccagactgggtgcagaatttattcaggtgggtgtactctggcctcttggttcattattttcaaacaagcacacttgtacaattattttctgggtacttcccatatgcacatagcactgtaaaaaatatttcccaaagatcactcattttataaataccactttttcagaattgggtttattgcgagcaggaggagatacttaaaacatgcacatataccaggttggtggtaagttggtcgcatgtgaaaacctcaactatttaatcatcatgattcatattttgagtgaatacatcaggcacagaccttcatgatatcacacactcttggctactttaagaggccatctttaatactttatgagtagttctggagtgtaaacataaacgagtattcttttgtagtcagaaaagtgtcctctcaataatttagtaggggcttattgtctctcaaaactaacctaaaagaaaatgacacattttataatagaatattacatttatttctggaagtgtgttttcaaaaagatatttacatagtctgtaaactagaaagtgttaggtaaagctctaggttactgtgttactattataatattaaacattcgaataggcagtcgttcaaagactctttggaatatctatgaatgaatatcctctattcttataatattaaaacccataagtaaatataggacatacaagagaaatgagttaaatgactatgtaagggagagtttattaaaatttgatgaaatttactgtaggaactaaactatgccataaaacaatagctttctagttcatttccagtaactgttcccatctcctttaccacttgttaagaaaattaaattcttcagtcacgctgctttaaaatgggacaaaatctattaagttgaaccatatataattgtggatatttggctgtttttaatctgacaagcagtaacttcatatggtttgccttaatatatatttgttttagtcatgaactcataatccattgatgctctttcatgagaagagatatcacccatatttccttattgatattattggtacaggcagacaaccctggtaggagagatggattctggggtcatgacctttcgtgattatccgcaaatgcaaacagtttcagatctaatggtttaatttagggagtaattatattaatcagagtgttctgttattctcaatctttatagaaacgattctgctggttttgaagaacagatgtattacactaactgtaaaagtagttcaagagtgagaaagaataaattgttattaagagcaaaagaaaaataaagtgattgatgata

SEQ ID NO: 180045 - DNA, 1244 bp, Artificial Sequence
  derived and/or modified sequence
tccagctgggtagccgggggagcgcgcgtgggggctccgcgagtcgctcgcccttggtttctggggaagcctgggggacgcggctgtggcggaggcgccctgggactcaggtcgcctggagcgtggcacgcagagccccaggcgcggagctgaggccgcgcggccgcgcttggccccagcgggcgtgggactgagcagtctgctgccccccgacatgtgacccagccccgccgcccatgcgggctcccggccgcccggccctgcggccgctgccgctgccgccgctgctgctgttgctcctggcggcgccttggggacgggcagttccctgtgtctctggtggtttgcctaaacctgcaaacatcaccttcttatccatcaacatgaagaatgtcctacaatggactccaccagagggtcttcaaggagttaaagttacttacactgtgcagtatttcatatatgggcaaaagaaatggctgaataaatcagaatgcagaaatatcaatagaacctactgtgatctttctgctgaaacttctgactacgaacaccagtattatgccaaagttaaggccatttggggaacaaagtgttccaaatgggctgaaagtggacggttctatccttttttagaaacacaaattggcccaccagaggtggcactgactacagatgagaagtccatttctgttgtcctgacagctccagagaagtggaagagaaatccagaagaccttcctgtttccatgcaacaaatatactccaatctgaagtataacgtgtctgtgttgaatactaaatcaaacagaacggtaagcctgaaatggaatggggcatacattcatgtaccactctgtagctaatgtgggaacaaacaaccctgatgcattgattctctgcatgtgaatctgggaagtcatgatgttcaaaagatacgccgcacaaaataaagttctatatacagaaattttacagaactaacttcagatcttctttacagaaactctgttgacaggatatggtgttgttattggagtgtagagagattgtacacttcactttgatgaagagctttcacttgcacagtctttctctgagaagaagaaaaaaatgtgagcaaggacccaggacaatgaataagaactctatccatgtgttgtttagaattgttctcagcattggtccagttcctgaccatgctctgctgagctaaaggaaaagagtatattgaaactgttgct

SEQ ID NO: 180046 - DNA, 2023 bp, Artificial Sequence
  derived and/or modified sequence
agtcccaggttcccgccaccaccgccgcggccgcgcggaggggcccctgtggatgccgcgtctcggccgccgggccccgcagtcctgcaagccgcgcgtcgcgagatccgcgctttaaaagccaaactccccgaaagggtcagccccgaaggaacatgatccagaaagacgcagcttcttaaattccctgtgtctctggtggtttgcctaaacctgcaaacatcaccttcttatccatcaacatgaagaatgtcctacaatggactccaccagagggtcttcaaggagttaaagttacttacactgtgcagtatttcatatatgggcaaaagaaatggctgaataaatcagaatgcagaaatatcaatagaacctactgtgatctttctgctgaaacttctgactacgaacaccagtattatgccaaagttaaggccatttggggaacaaagtgttccaaatgggctgaaagtggacggttctatccttttttagaaacacaaattggcccaccagaggtggcactgactacagatgagaagtccatttctgttgtcctgacagctccagagaagtggaagagaaatccagaagaccttcctgtttccatgcaacaaatatactccaatctgaagtataacgtgtctgtgttgaatactaaatcaaacagaacgtggtcccagtgtgtgaccaaccacacgctggtgctcacctggctggagccgaacactctttactgcgtacacgtggagtccttcgtcccagggccccctcgccgtgctcagccttctgagaagcagtgtgccaggactttgaaagatcaatcatcagagttcaaggctaaaatcatcttctggtatgttttgcccgtatctattaccgtgtttcttttttctgtgatgggctattccatctaccgatatatccacgttggcaaagagaaacacccagcaaatttgattttgatttatggaaatgaatttgacaaaagattctttgtgcctgctgaaaaaatcgtgattaactttatcaccctcaatatctcggatgattctaaaatttctcatcaggatatgagtttactgggaaaaagcagtgatgtatccagccttaatgatcctcagcccagcgggaacctgaggccccctcaggaggaagaggaggtgaaacatttagggtatgcttcgcatttgatggaaattttttgtgactctgaagaaaacacggaaggtacttctctcacccagcaagagtccctcagcagaacaatacccccggataaaacagtcattgaatatgaatatgatgtcagaaccactgacatttgtgcggggcctgaagagcaggagctcagtttgcaggaggaggtgtccacacaaggaacattattggagtcgcaggcagcgttggcagtcttgggcccgcaaacgttacagtactcatacacccctcagctccaagacttagaccccctggcgcaggagcacacagactcggaggaggggccggaggaagagccatcgacgaccctggtcgactgggatccccaaactggcaggctgtgtattccttcgctgtccagcttcgaccaggattcagagggctgcgagccttctgagggggatgggctcggagaggagggtcttctatctagactctatgaggagccggctccagacaggccaccaggagaaaatgaaacctatctcatgcaattcatggaggaatgggggttatatgtgcagatggaaaactgatgccaacacttccttttgccttttgtttcctgtgcaaacaagtgagtcacccctttgatcccagccataaagtacctgggatgaaagaagttttttccagtttgtcagtgtctgtgagaattacttatttcttttctctattctcatagcacgtgtgtgattggttcatgcatgtaggtctcttaacaatgatggtgggcctctggagtccaggggctggccggttgttctatgcagagaaagcagtcaataaatgtttgccagac

SEQ ID NO: 180047 - DNA, 1662 bp, Artificial Sequence
  derived and/or modified sequence
atgagggcccctggccgcccagccctgcggcccctgcccctgccccccctgctgctgctgctgctggccgccccctggggccgggctgtgccctgtgtgtctgggggcctgcccaagccagccaacatcaccttcctgagcatcaacatgaagaatgtgctgcagtggaccccacctgagggcctgcagggcgtgaaggtgacctacacagtgcagtacttcatctacggccagaagaagtggctgaacaagtctgagtgcaggaacatcaacagaacctactgtgacctgtctgctgagaccagtgactatgagcaccagtactatgccaaggtgaaggccatctggggcaccaagtgcagcaagtgggccgagagcggccgcttctaccccttcctggagacccagatcggccccccagaggtggccctgaccacagatgagaagagcatctctgtggtgctgacagcccctgagaagtggaagagaaatcctgaggacctgcctgtgtccatgcagcagatctacagcaacctgaagtacaacgtgtctgtgctgaacaccaagagcaacagaacctggagccagtgtgtgaccaaccacaccctggtgctgacctggctggagcccaacaccctgtactgtgtgcacgtggagagctttgtgcccggccccccaagaagagcccagcccagcgagaagcagtgtgcccggaccctgaaggaccagagcagcgagttcaaggccaagatcatcttctggtacgtgctgcctgtgtccatcaccgtcttcctgttctctgtgatgggctacagcatctaccgctacatccacgtgggcaaggagaagcacccagccaacctgatcctgatctatggaaatgaatttgacaagcgcttctttgtgcctgctgagaagatcgtcatcaacttcatcaccctgaacatcagtgatgacagcaagatcagccaccaggacatgagcctgctgggcaagagcagtgatgtgagcagcctgaatgacccccagcccagcggcaacctgcggcccccccaggaggaggaggaggtgaagcacctgggctacgccagccacctgatggagatcttctgtgacagtgaagaaaatacagagggcaccagcctgacccagcaggagagcctgagcaggaccatccccccagacaagacagtgattgaatatgaatatgatgtgaggaccacagacatctgtgccggccctgaggagcaggagctgagcctgcaggaggaggtgtccacccagggcaccctgctggagagccaggccgccctggccgtgctgggcccccagaccctgcagtacagctacaccccccagctgcaggacctggaccccctggcccaggagcacacagattctgaggagggccctgaggaggagcccagcaccaccctggtggactgggacccccagacaggccgcctgtgcatccccagcctgagcagctttgaccaggacagcgagggctgtgagcccagtgaaggagatggcctgggggaggagggcctgctgagccggctgtatgaggagcccgccccagaccggcccccaggagaaaatgagacctacctgatgcagttcatggaggagtggggcctgtatgtgcagatggagaactag

SEQ ID NO: 180048 - DNA, 630 bp, Artificial Sequence
  derived and/or modified sequence
atgagggcccctggccgcccagccctgcggcccctgcccctgccccccctgctgctgctgctgctggccgccccctggggccgggctgtgccctgtgtgtctgggggcctgcccaagccagccaacatcaccttcctgagcatcaacatgaagaatgtgctgcagtggaccccacctgagggcctgcagggcgtgaaggtgacctacacagtgcagtacttcatctacggccagaagaagtggctgaacaagtctgagtgcaggaacatcaacagaacctactgtgacctgtctgctgagaccagtgactatgagcaccagtactatgccaaggtgaaggccatctggggcaccaagtgcagcaagtgggccgagagcggccgcttctaccccttcctggagacccagatcggccccccagaggtggccctgaccacagatgagaagagcatctctgtggtgctgacagcccctgagaagtggaagagaaatcctgaggacctgcctgtgtccatgcagcagatctacagcaacctgaagtacaacgtgtctgtgctgaacaccaagagcaacagaacagtgtccctgaagtggaatggagcctacatccacgtgcccctgtgcagctag

SEQ ID NO: 180049 - DNA, 1515 bp, Artificial Sequence
  derived and/or modified sequence
atgaagaatgtgctgcagtggaccccacctgagggcctgcagggcgtgaaggtgacctacacagtgcagtacttcatctacggccagaagaagtggctgaacaagtcagaatgtagaaacatcaacagaacctactgtgacctgtctgctgagaccagtgactatgagcaccagtactatgccaaggtgaaggccatctggggcaccaagtgcagcaagtgggccgagagcggccgcttctaccccttcctggagacccagatcggccccccagaggtggccctgaccacagatgagaagagcatctctgtggtgctgacagcccctgagaagtggaagaggaaccctgaggacctgcctgtgtccatgcagcagatctacagcaacctgaagtacaacgtgtctgtgctgaacaccaagagcaacagaacctggagccagtgtgtgaccaaccacaccctggtgctgacctggctggagcccaacaccctgtactgtgtgcacgtggagagctttgtgcccggccccccccggcgggcccagcccagcgagaagcagtgtgcccggaccctgaaggaccagagcagcgagttcaaggccaagatcatcttctggtacgtgctgcctgtgtccatcaccgtcttcctgttctctgtgatgggctacagcatctaccgctacatccacgtgggcaaggagaagcacccagccaacctgatcctgatctatggaaatgaatttgacaagcgcttctttgtgcctgctgagaagatcgtcatcaacttcatcaccctgaacatcagtgatgacagcaagatcagccaccaggacatgagcctgctgggcaagagcagtgatgtgagcagcctgaatgacccccagcccagcggcaacctgcggcccccccaggaggaggaggaggtgaagcacctgggctacgccagccacctgatggagatcttctgtgacagcgaggagaacacagagggcaccagcctgacccagcaggagagcctgagcaggaccatccccccagacaagacagtcatcgagtatgaatatgatgtgaggaccacagacatctgtgccggccctgaggagcaggagctgagcctgcaggaggaggtgtccacccagggcaccctgctggagagccaggccgccctggccgtgctgggcccccagaccctgcagtacagctacaccccccagctgcaggacctggaccccctggcccaggagcacacagacagcgaggagggccctgaggaggagcccagcaccaccctggtggactgggacccccagacaggccgcctgtgcatccccagcctgagcagctttgaccaggacagcgagggctgtgagcccagtgaaggagatggcctgggggaggagggcctgctgagccggctgtatgaggagcccgccccagacaggcctcctggagaaaatgagacctacctgatgcagttcatggaggagtggggcctgtatgtgcagatggagaactag

SEQ ID NO: 180050 - DNA, 1662 bp, Artificial Sequence
  derived and/or modified sequence
atgcgggcccccggccggcccgccctgcggcccctgcccctgcccccactcctgctgttgctgctcgcggctccctggggacgcgccgtgccctgcgtgtccggagggctgcctaagcctgcaaatatcacattccttagtattaacatgaagaatgtcctccagtggacaccacctgagggcctgcagggcgtcaaagtgacgtatacagtccaatacttcatctatggccagaaaaaatggttgaacaagtccgagtgcagaaacattaatcgcacttactgtgatctgagtgctgagacctcagattacgagcaccagtactatgcaaaggtcaaggccatttgggggacaaagtgtagcaaatgggccgaaagcggccgattctatccatttctggagacccagatcggccctcccgaagttgccctgaccactgatgaaaaaagtatttcggtggtgctgactgcccctgagaagtggaaacgtaaccctgaagacctccccgtgtcaatgcagcagatctacagtaatctgaagtacaatgtatcagtgctaaacaccaaatccaatcgcacctggagtcagtgcgtcacaaaccacacactggtgttgacttggctggagcctaataccctgtactgcgttcatgtggaatctttcgtgccgggacctccccgccgagcacaaccgtccgaaaagcagtgcgccagaacgctcaaagatcagagctccgagttcaaggcaaaaatcattttctggtacgtgcttcccgtcagcattactgtgtttctgttttcagtgatgggttactccatctataggtacatccacgtgggcaaggaaaagcaccccgccaatctgatcctgatttatggcaacgagttcgataaaagattctttgttcccgcggaaaagatcgtaattaacttcattaccctgaatatctcggacgattctaagattagccaccaggatatgagtttgctcggaaaaagctctgatgtgtcaagtttaaatgatccccagcctagcggcaatctgcggcccccgcaggaagaagaggaggtgaaacacctgggctacgcctcccacttgatggagattttctgtgactccgaagagaataccgagggaacatcacttactcagcaagagtctctctctcggacaattcccccagacaaaaccgtaatagaatatgaatatgatgtgagaaccacagacatttgtgcaggaccggaagaacaggaactttccctgcaggaggaggtaagtacccaaggcacgttactcgaaagccaagcagcactagcagtgctcggtccccaaactctccagtatagctatacccctcaactgcaagacttagaccccctggcacaagagcataccgacagcgaggaggggcccgaggaagaaccaagtacgactctagtcgattgggatccccagactgggaggctctgcattccctccctatccagcttcgatcaagattccgagggctgcgaaccttctgaaggcgatggtctgggagaggaagggctcctgagtaggctgtatgaggaacccgccccggaccgacctcctggggaaaacgagacgtatctcatgcaatttatggaggagtggggactgtacgttcagatggaaaactag

SEQ ID NO: 180051 - DNA, 630 bp, Artificial Sequence
  derived and/or modified sequence
atgcgggcccccggccggcccgccctgcggcccctgcccctgcccccacttctcctgctgcttctggcagccccctggggccgagccgttccatgtgtctccggtggcttacctaagccagcgaatatcacatttctgagtatcaacatgaagaatgtcctgcagtggacgcctccagaaggccttcagggagtcaaggtgacctacactgtgcaatactttatttacgggcaaaagaagtggttgaacaagtccgagtgccggaacatcaatcgcacgtattgtgatctgtccgctgagacatccgattacgaacatcaatactatgctaaggtaaaagccatatgggggaccaagtgtagcaagtgggccgagagcgggcgattctatccatttctggagacccaaattgggccaccagaagtggcactgacaactgacgaaaaatccataagcgttgtgctgacggccccagaaaagtggaaacggaaccccgaggacctgccagtgtccatgcaacagatatacagcaatctgaagtataatgtaagtgtccttaatactaaatccaatcgcactgtgtctctcaagtggaacggtgcttacatccacgtgccactgtgcagttag

SEQ ID NO: 180052 - DNA, 1515 bp, Artificial Sequence
  derived and/or modified sequence
atgaagaacgtgctgcagtggaccccccccgagggcctgcagggcgtgaaagtcacctacacagtgcagtacttcatctacggacagaagaaatggcttaacaagagcgagtgccgtaatataaatcgtacctactgtgacctgagtgcggagacaagtgattacgaacaccagtattatgccaaagttaaggcaatatggggcaccaagtgcagcaaatgggccgagtctggtcgattttatcccttcctagaaacgcagatcggcccccctgaggtggccctcacaaccgacgagaaaagcatctccgtggtactcactgcacccgagaagtggaagcgcaatccagaagatcttcctgtctcgatgcagcagatctacagtaatcttaaatataatgtgagcgttctgaatacaaaatccaatcgaacctggtcgcagtgcgtgacaaatcataccctcgtgttgacatggcttgagcccaacaccctctattgtgtgcacgtagaaagctttgtgcccggacctccccgaagggctcagcccagcgagaaacagtgtgcacgaaccctaaaggatcaatcgtcagagttcaaggcaaaaattatattctggtacgtgcttcccgtgtccataacggtattcctattttcggtcatggggtacagtatctatagatacatccatgttgggaaagaaaagcatcctgctaatctcatcctcatttacggaaacgagtttgacaaaagattttttgtccctgcggagaagatcgtgattaacttcatcaccctgaatatttctgatgactccaagattagtcatcaggatatgtcactgctcggtaagtcatcagacgtgagtagtctcaacgacccgcaacctagcgggaacctgaggcctcctcaagaggaagaggaagtaaagcacctgggatacgccagccatctcatggagattttctgcgactccgaggagaacacggaggggacctccctgactcagcaggagtccctgtcccgcacaataccgcccgacaagacagttattgagtacgaatacgacgtgcggaccactgatatttgcgcaggtccagaagaacaggaactgagtctgcaggaggaagtgtctacccagggaacactgctcgaaagtcaggccgcactggcagtcctgggaccgcaaacccttcagtactcctacacccctcagttacaggacctcgatcctttggcgcaggagcacactgattctgaggagggacccgaggaggaaccctcaaccaccctggtagactgggacccccaaaccgggaggctttgcattccctcgctcagttccttcgaccaagactccgagggatgcgaaccgagcgaaggcgatgggcttggagaagagggattgctttctaggctgtacgaagagcccgcacccgatcggccgcctggggagaacgagacctatctgatgcagttcatggaggaatgggggttgtacgtgcaaatggagaattag

SEQ ID NO: 180053 - DNA, 1662 bp, Artificial Sequence
  derived and/or modified sequence
atgcgcgctcctgggaggcccgctctccgcccacttcccctgccgccactgctactacttctgctggctgcgccatgggggagagctgtaccctgtgtatccggcggtttacccaagcctgcgaatattacattcctctctataaatatgaagaatgtgctccagtggacccctccggaagggctgcagggggtgaaagtaacttataccgtgcagtatttcatttatggccagaagaaatggcttaacaagtcggagtgcagaaacatcaatcgaacctattgcgacctctccgctgagaccagcgactacgagcatcaatattacgcaaaagtcaaagccatctgggggacaaaatgcagtaaatgggccgaatccgggcgattttatccatttctggaaacccagatcggacctcctgaagttgctctaaccacggacgagaaaagcatatccgtggtgctcaccgctcctgagaagtggaagcgaaatcctgaggacctcccggttagcatgcagcagatttattccaatctaaagtacaacgtttcggttttgaacactaaatccaacagaacatggagccaatgcgtcaccaatcacacgttggtgttgacgtggctcgaaccgaatacactgtactgtgttcacgtggagagctttgtgcctggccctcctaggcgtgcacagccttccgaaaaacagtgtgcacggactctcaaggatcagtccagtgaattcaaagctaaaatcatcttctggtatgtcctgccggtgagcatcacagtgttcctcttctccgtaatggggtatagcatctatcgttacattcacgtcgggaaggaaaaacaccccgcaaacttaatcctgatttatggaaatgaatttgacaagaggttctttgtgccagccgaaaagattgtgatcaactttatcactctgaacatctcagatgattccaaaatctcacaccaggatatgagcttactcggcaaatccagtgacgtgtcctccctgaatgatcctcagccctcgggaaacctgcgacctccccaggaggaagaggaggtgaagcatctcggctatgcatctcatctcatggagatcttttgtgactccgaggagaatacagaaggcaccagtctgacacagcaggaatcactgagccggactataccaccagacaaaacggtgattgagtacgaatatgatgtcagaacaacggatatctgcgcaggccctgaggagcaagagttgagcctccaggaggaggtgagtacccaggggaccctcctggaatctcaggctgctcttgcagtgctgggccctcagactctgcagtattcgtacaccccacagctgcaagatttagatcctcttgctcaagaacatactgattctgaagaaggacctgaggaagaaccatctaccacactggtcgattgggacccgcagacgggacggctctgcatacccagtctatcgtcattcgaccaggacagtgaagggtgtgaaccctctgagggggacggattaggagaggaggggttactctctagactgtatgaagagcccgctccagatcgcccaccaggggagaatgaaacttatttgatgcagtttatggaggaatgggggctctacgtgcagatggaaaattag

SEQ ID NO: 180054 - DNA, 630 bp, Artificial Sequence
  derived and/or modified sequence
atgcgagcgcctggaagacccgctctgaggcctttgcctctgccccctctacttctcttgttactcgccgcaccttgggggcgtgccgtaccttgcgtgtcaggaggcctgccaaaacctgccaatatcactttcctcagtattaacatgaagaacgttctgcagtggacacctcccgaaggccttcaaggcgtcaaagtgacctacaccgtgcagtacttcatatatggtcagaaaaagtggctgaataaaagcgagtgcagaaatattaatcggacgtattgcgacctctcagccgagactagcgattacgagcaccaatattacgcaaaggttaaagcaatctggggcacaaaatgttcaaagtgggcagaatctgggcgtttttacccgttcctggaaactcaaattggaccccctgaggtggccctgactacagatgagaagagcatctcagtcgttctcacggccccagaaaagtggaagcgaaaccctgaagatctaccagtgagcatgcagcaaatctatagcaatctgaaatacaacgtgtccgtgctgaatacaaagtcaaatcggactgtgtccctcaaatggaatggagcatatattcacgtacccttgtgctcttag

SEQ ID NO: 180055 - DNA, 1515 bp, Artificial Sequence
  derived and/or modified sequence
atgaagaacgtgcttcagtggactccgcctgaaggcctccagggggtgaaggtgacatacacagtccaatacttcatttacggccagaagaaatggctgaacaagtccgagtgcagaaacataaatagaacttactgtgatctctctgccgagacttcagattacgaacatcaatattacgccaaagtgaaggcaatttggggcactaagtgctcaaagtgggcggagtccgggcgtttttacccgttccttgaaacccagattggccctcccgaagtggctttaaccactgacgagaaatccattagcgttgtgcttaccgcacctgagaaatggaaacggaacccggaagacctgcctgtcagcatgcaacaaatatactccaatctgaagtataatgtctcagtgctcaatactaaaagcaataggacttggtctcagtgcgtgactaaccacactttagttcttacctggctcgagcctaatacactctattgtgttcatgtcgaatctttcgtgcccggacccccaagacgagcccagccgagcgaaaagcagtgcgctagaacactgaaggatcagtcaagtgagttcaaggccaaaattatcttctggtatgtgttgcctgtgagtatcactgtgtttttgttctctgtcatgggttacagtatttaccggtacatccatgtggggaaggaaaaacaccctgctaatttgatccttatctatggtaatgaatttgataagcggttttttgtaccagcagagaagattgttataaatttcataacgttgaacatttctgatgattcaaaaatatctcaccaggacatgagtctgctcggcaagagtagcgacgtttctagtctgaatgacccacagccatcaggcaatctgcgtcctccacaggaagaagaagaggtgaagcacctcggatatgccagccacctgatggaaattttctgcgactctgaagagaataccgaggggacttccctcactcagcaggagagcctgagccgcacaataccacccgacaaaacggttattgaatatgaatacgatgttcgcacaaccgacatctgcgctggtcctgaggaacaagagctcagcctccaggaggaggtgtctactcaaggcacactgctggaatctcaggccgcactggcagtgctgggcccacagacactccagtatagttacacccctcagctgcaggacctcgatcctctggcccaggagcatactgattcggaagagggcccagaggaagagcctagtaccactctcgtggactgggacccacagaccggcaggctgtgcatcccatccttgtcttcgtttgatcaggattctgaaggctgtgaaccttccgaaggagacggcctgggagaagaaggtctgctttctcgcctgtatgaagagcctgcgcctgatagaccacccggtgaaaacgaaacttacctcatgcagtttatggaggaatggggtctttacgtacagatggagaattag

SEQ ID NO: 180056 - DNA, 1662 bp, Artificial Sequence
  derived and/or modified sequence
atgagagcccccggcagacccgccctgagacccctgcccctgccccccctgctgctgctgctgctggccgccccctggggcagagccgtgccctgcgtgagcggcggcctgcccaagcccgccaacatcaccttcctgagcatcaacatgaagaacgtgctgcagtggaccccccccgagggcctgcagggcgtgaaggtgacctacaccgtgcagtacttcatctacggccagaagaagtggctgaacaagagcgagtgcagaaacatcaacagaacctactgcgacctgagcgccgagaccagcgactacgagcaccagtactacgccaaggtgaaggccatctggggcaccaagtgcagcaagtgggccgagagcggcagattctaccccttcctggagacccagatcggcccccccgaggtggccctgaccaccgacgagaagagcatcagcgtggtgctgaccgcccccgagaagtggaagagaaaccccgaggacctgcccgtgagcatgcagcagatctacagcaacctgaagtacaacgtgagcgtgctgaacaccaagagcaacagaacctggagccagtgcgtgaccaaccacaccctggtgctgacctggctggagcccaacaccctgtactgcgtgcacgtggagagcttcgtgcccggcccccccagaagagcccagcccagcgagaagcagtgcgccagaaccctgaaggaccagagcagcgagttcaaggccaagatcatcttctggtacgtgctgcccgtgagcatcaccgtgttcctgttcagcgtgatgggctacagcatctacagatacatccacgtgggcaaggagaagcaccccgccaacctgatcctgatctacggcaacgagttcgacaagagattcttcgtgcccgccgagaagatcgtgatcaacttcatcaccctgaacatcagcgacgacagcaagatcagccaccaggacatgagcctgctgggcaagagcagcgacgtgagcagcctgaacgacccccagcccagcggcaacctgagacccccccaggaggaggaggaggtgaagcacctgggctacgccagccacctgatggagatcttctgcgacagcgaggagaacaccgagggcaccagcctgacccagcaggagagcctgagcagaaccatcccccccgacaagaccgtgatcgagtacgagtacgacgtgagaaccaccgacatctgcgccggccccgaggagcaggagctgagcctgcaggaggaggtgagcacccagggcaccctgctggagagccaggccgccctggccgtgctgggcccccagaccctgcagtacagctacaccccccagctgcaggacctggaccccctggcccaggagcacaccgacagcgaggagggccccgaggaggagcccagcaccaccctggtggactgggacccccagaccggcagactgtgcatccccagcctgagcagcttcgaccaggacagcgagggctgcgagcccagcgagggcgacggcctgggcgaggagggcctgctgagcagactgtacgaggagcccgcccccgacagaccccccggcgagaacgagacctacctgatgcagttcatggaggagtggggcctgtacgtgcagatggagaactag

SEQ ID NO: 180057 - DNA, 630 bp, Artificial Sequence
  derived and/or modified sequence
atgagagcccccggcagacccgccctgagacccctgcccctgccccccctgctgctgctgctgctggccgccccctggggcagagccgtgccctgcgtgagcggcggcctgcccaagcccgccaacatcaccttcctgagcatcaacatgaagaacgtgctgcagtggaccccccccgagggcctgcagggcgtgaaggtgacctacaccgtgcagtacttcatctacggccagaagaagtggctgaacaagagcgagtgcagaaacatcaacagaacctactgcgacctgagcgccgagaccagcgactacgagcaccagtactacgccaaggtgaaggccatctggggcaccaagtgcagcaagtgggccgagagcggcagattctaccccttcctggagacccagatcggcccccccgaggtggccctgaccaccgacgagaagagcatcagcgtggtgctgaccgcccccgagaagtggaagagaaaccccgaggacctgcccgtgagcatgcagcagatctacagcaacctgaagtacaacgtgagcgtgctgaacaccaagagcaacagaaccgtgagcctgaagtggaacggcgcctacatccacgtgcccctgtgcagctag

SEQ ID NO: 180058 - DNA, 1515 bp, Artificial Sequence
  derived and/or modified sequence
atgaagaacgtgctgcagtggaccccccccgagggcctgcagggcgtgaaggtgacctacaccgtgcagtacttcatctacggccagaagaagtggctgaacaagagcgagtgcagaaacatcaacagaacctactgcgacctgagcgccgagaccagcgactacgagcaccagtactacgccaaggtgaaggccatctggggcaccaagtgcagcaagtgggccgagagcggcagattctaccccttcctggagacccagatcggcccccccgaggtggccctgaccaccgacgagaagagcatcagcgtggtgctgaccgcccccgagaagtggaagagaaaccccgaggacctgcccgtgagcatgcagcagatctacagcaacctgaagtacaacgtgagcgtgctgaacaccaagagcaacagaacctggagccagtgcgtgaccaaccacaccctggtgctgacctggctggagcccaacaccctgtactgcgtgcacgtggagagcttcgtgcccggcccccccagaagagcccagcccagcgagaagcagtgcgccagaaccctgaaggaccagagcagcgagttcaaggccaagatcatcttctggtacgtgctgcccgtgagcatcaccgtgttcctgttcagcgtgatgggctacagcatctacagatacatccacgtgggcaaggagaagcaccccgccaacctgatcctgatctacggcaacgagttcgacaagagattcttcgtgcccgccgagaagatcgtgatcaacttcatcaccctgaacatcagcgacgacagcaagatcagccaccaggacatgagcctgctgggcaagagcagcgacgtgagcagcctgaacgacccccagcccagcggcaacctgagacccccccaggaggaggaggaggtgaagcacctgggctacgccagccacctgatggagatcttctgcgacagcgaggagaacaccgagggcaccagcctgacccagcaggagagcctgagcagaaccatcccccccgacaagaccgtgatcgagtacgagtacgacgtgagaaccaccgacatctgcgccggccccgaggagcaggagctgagcctgcaggaggaggtgagcacccagggcaccctgctggagagccaggccgccctggccgtgctgggcccccagaccctgcagtacagctacaccccccagctgcaggacctggaccccctggcccaggagcacaccgacagcgaggagggccccgaggaggagcccagcaccaccctggtggactgggacccccagaccggcagactgtgcatccccagcctgagcagcttcgaccaggacagcgagggctgcgagcccagcgagggcgacggcctgggcgaggagggcctgctgagcagactgtacgaggagcccgcccccgacagaccccccggcgagaacgagacctacctgatgcagttcatggaggagtggggcctgtacgtgcagatggagaactag

SEQ ID NO: 180059 - protein, 164 aa, Artificial Sequence
  derived and/or modified sequence
MNPQREAAPKSYAIRDSRQMVWVLSGNSLIAAPLSRSIKPVTLHLIACRDTEFSDKEKGNMVYLGIKGKDLCLFCAEIQGKPTLQLKLQGSQDNIGKDTCWKLVGIHTCINLDVRESCFMGTLDQWGIGVGRKKWKSSFQHHHLRKKDKDFSSMRTNIGMPGRM

SEQ ID NO: 180060 - DNA, 495 bp, Artificial Sequence
  derived and/or modified sequence
atgaacccccagagagaggccgcccccaagagctacgccatcagagacagcagacagatggtgtgggtgctgagcggcaacagcctgatcgccgcccccctgagcagaagcatcaagcccgtgaccctgcacctgatcgcctgcagagacaccgagttcagcgacaaggagaagggcaacatggtgtacctgggcatcaagggcaaggacctgtgcctgttctgcgccgagatccagggcaagcccaccctgcagctgaagctgcagggcagccaggacaacatcggcaaggacacctgctggaagctggtgggcatccacacctgcatcaacctggacgtgagagagagctgcttcatgggcaccctggaccagtggggcatcggcgtgggcagaaagaagtggaagagcagcttccagcaccaccacctgagaaagaaggacaaggacttcagcagcatgagaaccaacatcggcatgcccggcagaatgtag

SEQ ID NO: 180061 - DNA, 495 bp, Artificial Sequence
  derived and/or modified sequence
atgaatccgcaaagggaagcagcgccgaagtcctatgccatccgtgattctagacagatggtctgggtgctatctggaaatagtttaattgctgcacctctgtctagatctataaagcccgtcacactgcatttgattgcttgcagagacaccgagttttcagacaaggagaaggggaacatggtatacctgggtattaaaggtaaggatctttgccttttctgcgcagaaattcagggaaaacccactttgcagttaaagctgcaggggtcccaggacaatatcggcaaagatacctgctggaagctagtgggaattcatacttgcatcaaccttgacgtcagggaaagttgctttatgggcaccttggatcagtggggaataggcgtgggtcgtaaaaagtggaaatcgtccttccagcaccatcatttacgtaaaaaggacaaagacttcagttccatgcgaacgaatatcggtatgccgggacgcatgtag

SEQ ID NO: 180062 - DNA, 495 bp, Artificial Sequence
  derived and/or modified sequence
atgaacccccagcgggaggccgcccccaagagctatgccatccgggacagccggcagatggtgtgggtgctgagcggcaacagcctgattgctgcccccctgagccgcagcatcaagcctgtgaccctgcacctgattgcctgccgggacacagagttcagtgacaaggagaagggcaacatggtgtacctgggcatcaagggcaaggacctgtgcctcttctgtgccgagatccagggcaagcccaccctgcagctgaagctgcagggcagccaggacaacatcggcaaggacacctgctggaagctggtgggcatccacacctgcatcaacctggatgtgcgggagagctgcttcatgggcaccctggaccagtggggcatcggcgtgggcaggaagaagtggaagagcagcttccagcaccaccacctgaggaagaaggacaaggacttcagctccatgaggaccaacatcggcatgcctggccgcatgtag

SEQ ID NO: 180063 - DNA, 495 bp, Artificial Sequence
  derived and/or modified sequence
atgaacccccagcgggaggccgcccccaagagctacgccatccgggactcgcgacagatggtgtgggtgctgagtgggaacagcctgatagccgcgccccttagcaggagcattaagcccgtaacactacacttgatagcatgcagagacacagagttttcagataaggagaagggtaacatggtgtacctgggaattaagggcaaagacctctgcttattctgtgctgagatccaaggcaaacccacgctgcaactgaaactccagggctctcaggacaatatagggaaagatacttgctggaaactcgtgggtattcacacttgtattaaccttgacgttagggagagttgtttcatgggtactttagatcaatggggaataggcgttgggaggaaaaagtggaaatcatcattccagcatcaccacctgcgcaaaaaggacaaggatttctccagcatgcgtacgaatattgggatgcctgggagaatgtag

SEQ ID NO: 180064 - DNA, 495 bp, Artificial Sequence
  derived and/or modified sequence
atgaacccacaaagagaagccgctccgaaaagctatgctattcgagacagccgtcagatggtatgggtgttgagcggaaattccctgatcgccgcacccctcagccggtccatcaaacccgtgacactgcatctcatagcatgcagagataccgagttctctgataaggagaaagggaatatggtttacctgggaataaagggtaaggatctttgtttgttctgcgcggagatccaagggaagccgactctgcagctaaaactccagggatcccaggacaacataggaaaggacacttgttggaagctagtggggattcatacctgcataaatttggatgtacgggagtcctgcttcatgggcacgctagatcaatggggaattggcgtgggccgtaagaagtggaaatcatcctttcagcatcaccatctgcggaagaaagataaagatttttcaagcatgcgcaccaacattggaatgccgggacggatgtag

SEQ ID NO: 180065 - DNA, 1186 bp, Artificial Sequence
  derived and/or modified sequence
cacgggttcctccccactctgtctttctcacctctccttcacttttcctagcctcctcaccaccatctgatctatcttgttctcttcacaaaaggctctgaagacatcatgaacccacaacgggaggcagcacccaaatcctatgctattcgtgattctcgacagatggtgtgggtcctgagtggaaattctttaatagcagctcctcttagccgcagcattaagcctgtcactcttcatttaatagcctgtagagacacagaattcagtgacaaggaaaagggtaatatggtttacctgggaatcaagggaaaagatctctgtctcttctgtgcagaaattcagggcaagcctactttgcagcttaagcttcagggctcccaagataacatagggaaggacacttgctggaaactagttggaattcacacatgcataaacctggatgtgagagagagctgcttcatgggaacccttgaccaatggggaataggagtgggtagaaagaagtggaagagttcctttcaacatcaccatctcaggaagaaggacaaagatttctcatccatgcggaccaacataggaatgccaggaaggatgtagaaataaggggaggaagattcccatctctacaatctttgagtgggtttgctatcaatgaaatgctacaaatggaataagttgcagaaatttttctcttttcttgggttctggagagtttgtaaaacaaggacactatgtatttttaaagagttggtaaatcttacctgtaaagctagagaaggtcggagtctttttaggagtagatttggactacataacctgtaaatgtgttttgtccagtccttagagtgttttttaaaaaattgtaaagtcaaggttttcatgaaaaatgggaagatcagacaacattgctcctgaattcccacagagcagcaagctactagagctcaatctgttatttcttttcctgatgtacaggggttaagtcctatggaagaaacagcagaattattcaaaattatttacataatgtgcaattattcactagagcatgaggagtgaaacgctctgtttagtatgtataacttaaaaggaacacatacaattaaaagtaattgaaagacatttcttcttaaaaattctataatcttacactggtaaaataaactagtttttcccatgt

SEQ ID NO: 180066 - protein, 218 aa, Artificial Sequence
  derived and/or modified sequence
MSFVGENSGVKMGSEDWEKDEPQCCLEDPAGSPLEPGPSLPTMNFVHTSPKVKNLNPKKFSIHDQDHKVLVLDSGNLIAVPDKNYIRPEIFFALASSLSSASAEKGSPILLGVSKGEFCLYCDKDKGQSHPSLQLKKEKLMKLAAQKESARRPFIFYRAQVGSWNMLESAAHPGWFICTSCNCNEPVGVTDKFENRKHIEFSFQPVCKAEMSPSEVSD

SEQ ID NO: 180067 - DNA, 657 bp, Artificial Sequence
  derived and/or modified sequence
atgagcttcgtgggcgagaacagcggcgtgaagatgggcagcgaggactgggagaaggacgagccccagtgctgcctggaggaccccgccggcagccccctggagcccggccccagcctgcccaccatgaacttcgtgcacaccagccccaaggtgaagaacctgaaccccaagaagttcagcatccacgaccaggaccacaaggtgctggtgctggacagcggcaacctgatcgccgtgcccgacaagaactacatcagacccgagatcttcttcgccctggccagcagcctgagcagcgccagcgccgagaagggcagccccatcctgctgggcgtgagcaagggcgagttctgcctgtactgcgacaaggacaagggccagagccaccccagcctgcagctgaagaaggagaagctgatgaagctggccgcccagaaggagagcgccagaagacccttcatcttctacagagcccaggtgggcagctggaacatgctggagagcgccgcccaccccggctggttcatctgcaccagctgcaactgcaacgagcccgtgggcgtgaccgacaagttcgagaacagaaagcacatcgagttcagcttccagcccgtgtgcaaggccgagatgagccccagcgaggtgagcgactag

SEQ ID NO: 180068 - DNA, 657 bp, Artificial Sequence
  derived and/or modified sequence
atgtcttttgtgggggagaactccggtgtgaagatggggagcgaagactgggaaaaagacgagccgcagtgctgcttagaagacccagccggcagtccactggagcccggccccagcctgcctacaatgaatttcgtgcacactagcccaaaggtcaagaacttaaaccctaaaaaattttcgatccatgaccaggatcataaggtgctcgttctggactcgggtaatctgatcgcagtgcccgacaagaattatattcgtcccgaaattttctttgccctggccagcagcctgtctagcgcctccgcagaaaaggggagtcccattctgcttggggtgagcaaaggggaattttgcctgtattgcgacaaggacaagggacaaagtcacccttcactccagttaaagaaggaaaaactcatgaaattggctgcccaaaaggagtccgcgaggaggcctttcattttttaccgagcacaggtcggctcatggaatatgctggaaagtgccgctcatccgggctggttcatctgcacttcgtgtaattgcaacgaacccgtgggcgtaactgacaagttcgagaacagaaaacatattgaattttccttccagccagtatgcaaagccgaaatgagtccaagcgaagtgtctgattag

SEQ ID NO: 180069 - DNA, 657 bp, Artificial Sequence
  derived and/or modified sequence
atgagctttgtgggggagaacagcggcgtgaagatgggcagcgaggactgggagaaggatgagccccagtgctgcctggaggaccctgctggcagccccctggagcccggccccagcctgcccaccatgaactttgtgcacaccagccccaaggtgaagaacctgaaccccaagaagttcagcatccatgaccaggaccacaaggtgctggtgctggacagcggcaacctgattgctgtgcctgacaagaactacatccggcctgagatcttctttgccctggccagcagcctgagcagcgccagcgctgagaagggcagccccatcctgctgggcgtgtccaaaggagagttctgcctgtactgtgacaaggacaagggccagagccaccccagcctgcagctgaagaaggagaagctgatgaagctggccgcccagaaggagagcgcccggcggcccttcatcttctaccgggcccaggtgggctcctggaacatgctggagagcgctgcccaccctggctggttcatctgcaccagctgcaactgcaatgaacctgtgggcgtgacagacaagtttgagaacaggaagcacatcgagttctccttccagcctgtgtgcaaggccgagatgagccccagcgaggtgtctgactag

SEQ ID NO: 180070 - DNA, 657 bp, Artificial Sequence
  derived and/or modified sequence
atgagcttcgtgggcgagaacagcggcgtgaagatgggcagcgaggattgggaaaaggacgaacctcaatgttgtctggaggatccagcagggtcacctctggagcctggacccagcctcccaaccatgaacttcgtccacacgtcacccaaggtgaaaaacctcaatcccaagaagttttcgatccacgatcaggatcacaaggtcctggtgctcgattctggaaacctaatcgctgtccctgataagaactatattaggcccgaaatattttttgcactagccagcagtctgtcgtctgctagtgccgagaaaggatcccctattctcctcggagtgtccaagggagagttttgtctctactgtgataaggataagggtcagagtcatccgagtctacagctgaagaaagagaagctaatgaaactggcagctcaaaaagaaagcgcccggaggccatttatcttctatcgagcccaagtaggatcctggaacatgcttgagagcgcagcccaccccggctggttcatctgtaccagctgtaattgtaatgagccagtcggcgttactgataaatttgaaaatcgcaaacacattgagttttccttccagcctgtgtgtaaggccgaaatgtccccttccgaggtctcggactag

SEQ ID NO: 180071 - DNA, 657 bp, Artificial Sequence
  derived and/or modified sequence
atgagtttcgtaggggagaactcgggggtgaaaatgggaagcgaggactgggaaaaggacgaacctcagtgttgcttggaagatcccgcaggctccccactggagcctggaccatcactgcctactatgaattttgttcatacaagtccgaaagtcaaaaatcttaaccccaaaaagttctccatccatgaccaagaccacaaagtgctcgtgctggattcaggtaatctgatcgctgtcccagacaagaactatattcgtcctgagattttcttcgcccttgcctcttcgctctcatccgcaagcgccgaaaaagggagcccaattttactgggggtttccaaaggagagttttgtttatattgcgacaaggacaagggacagtcccacccatccttgcaactcaaaaaagaaaagctgatgaagcttgcggcacagaaggagtccgctcgcagaccattcatcttttatcgagcccaggtgggctcatggaacatgctggaatctgccgctcacccgggatggttcatctgcacgtcttgcaactgcaacgagccagtgggagtcacagacaagtttgagaatagaaagcatatcgagttcagctttcagcctgtgtgtaaagcggagatgtccccgagcgaggtgtctgactag

SEQ ID NO: 180072 - DNA, 772 bp, Artificial Sequence
  derived and/or modified sequence
cttcattccattttctgttgagtaataaactcaacgttgaaaatgtcctttgtgggggagaactcaggagtgaaaatgggctctgaggactgggaaaaagatgaaccccagtgctgcttagaagacccggctggaagccccctggaaccaggcccaagcctccccaccatgaattttgttcacacaagtccaaaggtgaagaacttaaacccgaagaaattcagcattcatgaccaggatcacaaagtactggtcctggactctgggaatctcatagcagttccagataaaaactacatacgcccagagatcttctttgcattagcctcatccttgagctcagcctctgcggagaaaggaagtccgattctcctgggggtctctaaaggggagttttgtctctactgtgacaaggataaaggacaaagtcatccatcccttcagctgaagaaggagaaactgatgaagctggctgcccaaaaggaatcagcacgccggcccttcatcttttatagggctcaggtgggctcctggaacatgctggagtcggcggctcaccccggatggttcatctgcacctcctgcaattgtaatgagcctgttggggtgacagataaatttgagaacaggaaacacattgaattttcatttcaaccagtttgcaaagctgaaatgagccccagtgaggtcagcgattaggaaactgccccattgaacgccttcctcgctaatttgaactaattgtataaaaacaccaaacctgctcactaaa

SEQ ID NO: 180073 - protein, 158 aa, Artificial Sequence
  derived and/or modified sequence
MEKALKIDTPQQGSIQDINHRVWVLQDQTLIAVPRKDRMSPVTIALISCRHVETLEKDRGNPIYLGLNGLNLCLMCAKVGDQPTLQLKEKDIMDLYNQPEPVKSFLFYHSQSGRNSTFESVAFPGWFIAVSSEGGCPLILTQELGKANTTDFGLTMLF

SEQ ID NO: 180074 - protein, 43 aa, Artificial Sequence
  derived and/or modified sequence
STFESVAFPGWFIAVSSEGGCPLILTQELGKANTTDFGLILVE

SEQ ID NO: 180075 - DNA, 477 bp, Artificial Sequence
  derived and/or modified sequence
atggagaaggccctgaagatcgacaccccccagcagggcagcatccaggacatcaaccacagagtgtgggtgctgcaggaccagaccctgatcgccgtgcccagaaaggacagaatgagccccgtgaccatcgccctgatcagctgcagacacgtggagaccctggagaaggacagaggcaaccccatctacctgggcctgaacggcctgaacctgtgcctgatgtgcgccaaggtgggcgaccagcccaccctgcagctgaaggagaaggacatcatggacctgtacaaccagcccgagcccgtgaagagcttcctgttctaccacagccagagcggcagaaacagcaccttcgagagcgtggccttccccggctggttcatcgccgtgagcagcgagggcggctgccccctgatcctgacccaggagctgggcaaggccaacaccaccgacttcggcctgaccatgctgttctag

SEQ ID NO: 180076 - DNA, 132 bp, Artificial Sequence
  derived and/or modified sequence
agcaccttcgagagcgtggccttccccggctggttcatcgccgtgagcagcgagggcggctgccccctgatcctgacccaggagctgggcaaggccaacaccaccgacttcggcctgatcctggtggagtag

SEQ ID NO: 180077 - DNA, 477 bp, Artificial Sequence
  derived and/or modified sequence
atggagaaggcacttaaaattgacacaccacagcagggctcaattcaggacatcaatcaccgcgtctgggtgctgcaggaccagaccctgatagctgtcccacgaaaggacagaatgtctcccgtgacgatagccctgatttcatgccgccatgttgagacgctcgaaaaggataggggcaacccaatctatctagggctgaatggccttaatctgtgtctgatgtgtgctaaagtcggagaccaacctacactgcagctgaaagagaaggacataatggatctgtacaaccagcctgaaccggtgaagtccttcctgttctaccacagccagtctgggaggaatagtacgtttgaatcggtcgctttccctggatggtttattgccgtgtcttccgagggtggttgtcccttgattctgacacaggagctgggcaaggccaatacaaccgacttcggtctgaccatgctgttctag

SEQ ID NO: 180078 - DNA, 132 bp, Artificial Sequence
  derived and/or modified sequence
tccactttcgagagtgttgccttcccaggctggttcatcgcagtgagttctgagggtgggtgccccttgatccttacacaagaattggggaaagctaacacaactgactttggcctgatcctggtggagtag

SEQ ID NO: 180079 - DNA, 477 bp, Artificial Sequence
  derived and/or modified sequence
atggagaaggccctgaagattgacaccccccagcagggcagcatccaggacatcaaccaccgggtgtgggtgctgcaggaccagaccctgattgctgtgcccaggaaggacaggatgagccctgtgaccatcgccctgatcagctgcagacatgtggagaccctggagaaggaccggggcaaccccatctacctgggcctgaatggcctgaacctgtgcctgatgtgtgccaaggtgggggaccagcccaccctgcagctgaaggagaaggacatcatggacctgtacaaccagcctgagcctgtgaagagcttcctgttctaccacagccagagcggcaggaacagcacctttgagagcgtggccttccctggctggttcatcgctgtgagcagcgagggcggctgccccctcatcctgacccaggagctgggcaaggccaacaccacagactttggcctgaccatgctgttctag

SEQ ID NO: 180080 - DNA, 132 bp, Artificial Sequence
  derived and/or modified sequence
agcacctttgaatctgtggccttccctggctggttcatcgctgtgtcctctgagggcggctgccccctcatcctgacccaggagctgggcaaggccaacaccacagactttggcctcatcctggtggagtag

SEQ ID NO: 180081 - DNA, 477 bp, Artificial Sequence
  derived and/or modified sequence
atggagaaggccctgaagatcgacaccccccagcagggcagcatccaggacataaatcaccgtgtatgggtcctacaggaccaaacactcatcgccgtcccacgaaaggatagaatgagcccagtgacaattgcactcatctcatgtagacatgtggagaccttggagaaggataggggcaacccaatatatctgggactgaacgggctaaatctatgccttatgtgtgccaaggtgggcgatcaacccacactccaacttaaggagaaagacattatggatttatacaaccagcccgagccagtgaaatcattcctgttctatcatagtcagagtgggagaaatagcacctttgaatctgtcgcattccctgggtggtttattgcagtgtcatccgagggcggctgcccacttatcctgacccaggaactgggtaaagcaaacactaccgacttcggactgacaatgctgttctag

SEQ ID NO: 180082 - DNA, 132 bp, Artificial Sequence
  derived and/or modified sequence
agcaccttcgagagcgtggccttccccggctggttcatcgccgtgagctcggaaggtgggtgtccactgatcctgacccaggagcttggaaaagcaaatacgactgacttcggactgattctggtggaatag

SEQ ID NO: 180083 - DNA, 477 bp, Artificial Sequence
  derived and/or modified sequence
atggagaaggccctgaagatcgacacaccgcagcaaggaagcatccaggacatcaaccatcgcgtgtgggtgcttcaggaccagacacttatcgcagtccccagaaaagaccggatgagtccggtgactatcgctcttatctcctgcaggcatgtggaaaccctagagaaggaccggggaaatcctatctacctgggactgaacggtctcaatttgtgcctgatgtgcgcaaaggtgggtgatcagcctaccttgcagctgaaagaaaaagacataatggatctctataaccagcctgaacctgtcaagtcttttctgttttaccactctcagtccggaagaaacagtacattcgagagtgtagcttttcccggatggttcatagccgtttccagcgagggagggtgccccctcatcctgacacaggaattggggaaggccaacaccacagatttcggcctaaccatgctgttttag

SEQ ID NO: 180084 - DNA, 132 bp, Artificial Sequence
  derived and/or modified sequence
tccacattcgaatccgtggcatttcccggatggttcattgccgtctctagcgaaggagggtgccccctgatcttgacacaggagttgggtaaggccaacacaaccgactttggcctgattctggtagagtag

SEQ ID NO: 180085 - DNA, 888 bp, Artificial Sequence
  derived and/or modified sequence
aaaacccaagtgcagtagaagccattgttcataatggtagggatacagggtccttcgtaacagattatcagtgtggcctatgctggaaagtctggtgacctctgattttttttgcttccaggtctttggccttggcactctttgtcatattagagttcctgggtctaggcctgggcaggattcataggtgcagctgcttctgctggaggtagactgcatccaacaaagtaagggtgctgggtgagttctgggagtatagattctgactggggtcactgctgggctggccgccagtctttcatctgacccagggttaaactgtggcttgggactgactcaggtcctctcttggggtcggtctgcacataaaaggactcctatccttggcagttctgaaacaacaccaccacaatggaaaaagcattgaaaattgacacacctcagcaggggagcattcaggatatcaatcatcgggtgtgggttcttcaggaccagacgctcatagcagtcccgaggaaggaccgtatgtctccagtcactattgccttaatctcatgccgacatgtggagacccttgagaaagacagagggaaccccatctacctgggcctgaatggactcaatctctgcctgatgtgtgctaaagtcggggaccagcccacactgcagctgaaggaaaaggatataatggatttgtacaaccaacccgagcctgtgaagtcctttctcttctaccacagccagagtggcaggaactccaccttcgagtctgtggctttccctggctggttcatcgctgtcagctctgaaggaggctgtcctctcatccttacccaagaactggggaaagccaacactactgactttgggttaactatgctgttttaa

SEQ ID NO: 180086 - DNA, 129 bp, Artificial Sequence
  derived and/or modified sequence
tccaccttcgagtctgtggctttccctggctggttcatcgctgtcagctctgaaggaggctgtcctctcatccttacccaagaactggggaaagccaacactactgactttgggttaattttagtagag

SEQ ID NO: 180087 - protein, 463 aa, Artificial Sequence
  derived and/or modified sequence
MLLLLLPLLWGRERAEGQTSKLLTMQSSVTVQEGLCVHVPCSFSYPSHGWIYPGPVVHGYWFREGANTDQDAPVATNNPARAVWEETRDRFHLLGDPHTKNCTLSIRDARRSDAGRYFFRMEKGSIKWNYKHHRLSVNVTALTHRPNILIPGTLESGCPQNLTCSVPWACEQGTPPMISWIGTSVSPLDPSTTRSSVLTLIPQPQDHGTSLTCQVTFPGASVTTNKTVHLNVSYPPQNLTMTVFQGDGTVSTVLGNGSSLSLPEGQSLRLVCAVDAVDSNPPARLSLSWRGLTLCPSQPSNPGVLELPWVHLRDAAEFTCRAQNPLGSQQVYLNVSLQSKATSGVTQGVVGGAGATALVFLSFCVIFVVVRSCRKKSARPAAGVGDTGIEDANAVRGSASQGPLTEPWAEDSPPDQPPPASARSSVGEGELQYASLSFQMVKPWDSRGQEATDTEYSEIKIHR

SEQ ID NO: 180088 - DNA, 1392 bp, Artificial Sequence
  derived and/or modified sequence
atgctgcttttactcttaccccttctatggggccgggagcgcgccgagggccagacctcaaaactcctcacaatgcaaagtagtgttacagtgcaggagggcttgtgtgtgcatgtaccttgctctttcagctaccctagtcatggctggatatatccaggtccggtggttcatgggtactggtttcgtgagggcgccaacacggaccaggacgcccccgtcgccacaaataatcccgctagagcagtttgggaggaaacccgcgacagatttcacctgctcggggacccgcacactaagaattgtactttaagtatcagagatgcacggcgttcggatgccggcaggtatttctttagaatggagaaggggtcaattaaatggaactataagcaccacaggttgtcggtgaacgttaccgcactgacccatcggcccaacatcttaattcctggaacccttgagagcgggtgccctcagaacctgacctgctcagtaccatgggcgtgcgaacaggggacaccaccaatgatctcatggatcgggacttctgtgagtcccctcgaccccagcacaacaagatctagtgttcttactctgataccgcagcctcaggatcacggcacatccctgacgtgtcaagtgaccttccctggggcctctgtgacaactaacaagaccgttcacctcaacgtctcttacccaccacagaatcttacgatgaccgtctttcagggagacggcaccgtgtccacggtcctcggtaacgggtcctccttgtctcttcctgaggggcaatcccttaggctcgtatgcgcagttgacgctgttgattctaaccccccagcccgcctgtctttaagttggagggggctcactctttgtccatctcagcccagcaaccccggagttctcgaactgccatgggtgcacctgcgcgacgcggcggaatttacgtgtagggcccagaatccgcttggatcccagcaggtatacctgaatgtgagtctgcagtctaaggctacatcgggcgtgacccaaggagtggtgggcggcgctggtgctaccgctctggttttcttgtcattttgtgtcatttttgtggtggtcaggtcctgccggaaaaaatctgcacgtcccgccgccggcgtcggcgacacaggtatagaggatgctaacgctgtgcgcggttctgcttctcaagggcctctgaccgagccctgggccgaggacagcccgcctgaccagccgccccccgccagcgccaggagctcggtcggtgagggcgagcttcaatacgcctcactctcattccagatggtcaagccttgggactcccgcggccaagaagccactgacaccgaatattccgagattaagatccacaggtag

SEQ ID NO: 180089 - DNA, 1392 bp, Artificial Sequence
  derived and/or modified sequence
atgctgctgctgctgctgcccctgctgtggggccgggagagagctgagggccagaccagcaagctgctgaccatgcagagctctgtgacagtgcaggagggcctgtgtgtgcacgtgccctgcagcttctcctaccccagccacggctggatctacccaggccctgtggtgcacggctactggttccgggagggcgccaacacagaccaggatgcccctgtggccaccaacaacccagcccgggctgtgtgggaggagacccgggaccgcttccacctgctgggggacccccacaccaagaactgcaccctgagcatcagagatgcccggcggagtgatgctggccgctacttcttcaggatggagaagggcagcatcaagtggaactacaagcaccaccggctgtctgtgaatgtgacagccctgacccaccggcccaacatcctgatccctggcaccctggagagcggctgcccccagaacctgacctgcagcgtgccctgggcctgtgagcagggcaccccacccatgatctcctggattggcacctctgtgagccccctggaccccagcaccaccaggagctctgtgctgaccctcatcccccagccccaggaccacggcaccagcctgacctgccaggtgaccttccctggggcctctgtgaccaccaacaagacagtgcacctgaatgtgtcctacccaccccagaacctgaccatgaccgtcttccagggagatggcaccgtgtccacagtgctgggcaatggcagcagcctgagcctgcctgagggccagagcctgcggctggtgtgtgctgtggatgctgtggacagcaaccccccagcccggctgagcctgtcctggaggggcctgaccctgtgccccagccagcccagcaaccctggggtgctggagctgccctgggtgcacctgagagatgctgctgagttcacctgccgggcccagaaccccctgggcagccagcaggtgtacctgaatgtgtccctgcagagcaaggccaccagcggcgtgacccagggcgtggtgggcggggccggggccacagccctggtgttcctgtccttctgtgtgatctttgtggtggtgcgcagctgcaggaagaagagcgcccggcctgctgctggggtgggggacacaggaattgaagatgccaatgctgtgcggggcagcgccagccagggccccctgacagagccctgggccgaggacagccccccagaccagcccccaccagccagcgcccggagctctgtgggggagggggagctgcagtatgccagcctgtccttccagatggtgaagccctgggacagccggggccaggaggccacagacacagagtacagcgagatcaagatccacaggtag

SEQ ID NO: 180090 - DNA, 1392 bp, Artificial Sequence
  derived and/or modified sequence
atgctgctgctgctgctgcccctgctgtggggccgggagcgggccgaaggtcagactagcaagctgctgacaatgcaaagcagcgtgacagttcaagaaggcctttgcgtgcacgtgccttgtagcttctcctaccccagccacgggtggatttatccgggccctgtggtgcacgggtactggtttcgagagggagccaatactgatcaggatgcaccggtggcaaccaacaatcctgctcgtgctgtttgggaggaaactagagaccggttccacctgctgggagacccccacactaagaactgcaccctttccatccgggatgctaggagaagcgacgcaggccgctatttttttagaatggagaagggctcgattaagtggaactataaacaccataggctctccgttaatgtcacagctctcactcacaggcctaatatcctgatccccgggacacttgagagcggttgtcctcagaatttaacgtgctctgtaccctgggcctgcgagcagggcacaccacctatgatttcttggatcggaacatcagtttccccactggaccctagcacgactagatcatcagttctgacattgataccccaaccgcaggatcacggcacttcgctgacgtgtcaggtgacctttcccggcgcctccgtgaccacaaataaaacagtccatctgaacgtgagctatccgcctcagaatctgaccatgaccgtgtttcagggcgacggcactgtgagcacagtcctgggcaatggcagcagccttagcttgcctgagggccagtcgctgagactggtttgtgccgtcgacgctgtggactcaaatcctcccgcccgcttgagtctgtcctggagaggccttactctctgtccgtcacaaccttcaaatccaggcgtattggagcttccctgggtgcacctgcgagatgctgctgagtttacttgtcgagcacaaaaccccctgggctctcagcaggtctatctgaacgtctcccttcagtccaaggccaccagtggcgttacccagggcgtggtggggggcgcaggagctacagccctggtgttcctgagtttttgcgtcatatttgtggtggtgaggtcctgtcggaagaagtctgctcggcccgcggccggggtgggcgacacggggatcgaagatgccaacgccgtgaggggatcagcctcacagggcccactgactgaaccttgggccgaagattcaccacctgatcagccgcctcctgcctccgcccggtcatcagttggagagggagagctgcagtacgcctcactgtccttccagatggtgaaaccttgggattccagaggccaagaggcgaccgacacagaatacagtgaaatcaaaattcaccgatag

SEQ ID NO: 180091 - DNA, 1392 bp, Artificial Sequence
  derived and/or modified sequence
atgctcctgctgttgctgccactgctgtgggggcgagagcgagcagaggggcagacttcaaagctcctcaccatgcaaagttcggttaccgtgcaggaaggcctgtgcgtgcatgtgccatgtagcttcagctacccctcccatggctggatctatcctggcccagtggtacacgggtactggttccgagagggagccaacaccgatcaggacgcacccgtggcaacaaataatcccgcacgggcagtttgggaggagactcgtgatcggtttcatcttttgggtgatcctcacacaaaaaactgtaccctgtccatccgtgatgcaaggcgttcagacgccggacgctatttttttcgaatggaaaaaggcagcatcaagtggaactacaaacaccacagactttccgtgaatgtgacggcactgacccatcgccctaacatactgatccccggtacgttagaaagcggttgccctcaaaacctcacgtgctcagtaccctgggcctgcgaacaaggcacgcccccaatgatctcctggatcgggacgagcgtctcgccactggaccccagcaccaccaggagcagcgttctgaccctgattccacagccccaggatcacgggacatcactgacttgtcaggtgacatttccgggagccagtgtaaccaccaacaagacggtccacctgaatgtgtcttatcctccgcaaaaccttacaatgaccgtttttcagggcgacggcaccgtgtctactgtacttggcaatgggtctagcctaagtctgccagaggggcagagtcttcgactagtgtgcgccgtcgacgctgtggacagcaatcctcctgccaggttgtctttatcgtggcggggtctgacactgtgtccctcacagccgtcaaaccctggagtgctggagttgccctgggtgcacctgagagacgccgcagagtttacttgcagggcacaaaatcctttgggaagccaacaagtttacctcaacgtgtctttgcagagcaaggccacgtccggggtgacgcaaggggtggtcgggggagccggtgctactgccctcgtgtttctatctttctgtgtgattttcgtagttgtccgatcttgccggaagaagagcgctaggcccgcagccggagttggcgacactggtatcgaagatgctaacgctgtgcggggatcagctagtcagggtccgctcacggagccatgggccgaggactcaccaccggaccagccaccacccgcatccgcaagatcctccgtgggggagggagagctccaatatgcgtcgctctcctttcagatggtcaagccttgggactctcgcggtcaggaagcaaccgacactgagtattcggagataaaaattcacaggtag

SEQ ID NO: 180092 - DNA, 1689 bp, Artificial Sequence
  derived and/or modified sequence
agttcctgagagaagaaccctgaggaacagacgttccctcgcggccctggcacctctaaccccagacatgctgctgctgctgctgcccctgctctgggggagggagagggcggaaggacagacaagtaaactgctgacgatgcagagttccgtgacggtgcaggaaggcctgtgtgtccatgtgccctgctccttctcctacccctcgcatggctggatttaccctggcccagtagttcatggctactggttccgggaaggggccaatacagaccaggatgctccagtggccacaaacaacccagctcgggcagtgtgggaggagactcgggaccgattccacctccttggggacccacataccaagaattgcaccctgagcatcagagatgccagaagaagtgatgcggggagatacttctttcgtatggagaaaggaagtataaaatggaattataaacatcaccggctctctgtgaatgtgacagccttgacccacaggcccaacatcctcatcccaggcaccctggagtccggctgcccccagaatctgacctgctctgtgccctgggcctgtgagcaggggacaccccctatgatctcctggatagggacctccgtgtcccccctggacccctccaccacccgctcctcggtgctcaccctcatcccacagccccaggaccatggcaccagcctcacctgtcaggtgaccttccctggggccagcgtgaccacgaacaagaccgtccatctcaacgtgtcctacccgcctcagaacttgaccatgactgtcttccaaggagacggcacagtatccacagtcttgggaaatggctcatctctgtcactcccagagggccagtctctgcgcctggtctgtgcagttgatgcagttgacagcaatccccctgccaggctgagcctgagctggagaggcctgaccctgtgcccctcacagccctcaaacccgggggtgctggagctgccttgggtgcacctgagggatgcagctgaattcacctgcagagctcagaaccctctcggctctcagcaggtctacctgaacgtctccctgcagagcaaagccacatcaggagtgactcagggggtggtcgggggagctggagccacagccctggtcttcctgtccttctgcgtcatcttcgttgtagtgaggtcctgcaggaagaaatcggcaaggccagcagcgggcgtgggagatacgggcatagaggatgcaaacgctgtcaggggttcagcctctcaggggcccctgactgaaccttgggcagaagacagtcccccagaccagcctcccccagcttctgcccgctcctcagtgggggaaggagagctccagtatgcatccctcagcttccagatggtgaagccttgggactcgcggggacaggaggccactgacaccgagtactcggagatcaagatccacagatgagaaactgcagagactcaccctgattgagggatcacagcccctccaggcaagggagaagtcagaggctgattcttgtagaattaacagccctcaacgtgatgagctatgataacactatgaattatgtgcagagtgaaaagcacacaggctttagagtcaaagtatctcaaacctgaatccacactgtgccctcccttttatttttttaactaaaagacagacaaattcct

SEQ ID NO: 180093 - DNA, 1392 bp, Artificial Sequence
  derived and/or modified sequence
atgctgctgctgctgctgcccctgctgtggggcagagagagagccgagggccagaccagcaagctgctgaccatgcagagcagcgtgaccgtgcaggagggcctgtgcgtgcacgtgccctgcagcttcagctaccccagccacggctggatctaccccggccccgtggtgcacggctactggttcagagagggcgccaacaccgaccaggacgcccccgtggccaccaacaaccccgccagagccgtgtgggaggagaccagagacagattccacctgctgggcgacccccacaccaagaactgcaccctgagcatcagagacgccagaagaagcgacgccggcagatacttcttcagaatggagaagggcagcatcaagtggaactacaagcaccacagactgagcgtgaacgtgaccgccctgacccacagacccaacatcctgatccccggcaccctggagagcggctgcccccagaacctgacctgcagcgtgccctgggcctgcgagcagggcaccccccccatgatcagctggatcggcaccagcgtgagccccctggaccccagcaccaccagaagcagcgtgctgaccctgatcccccagccccaggaccacggcaccagcctgacctgccaggtgaccttccccggcgccagcgtgaccaccaacaagaccgtgcacctgaacgtgagctaccccccccagaacctgaccatgaccgtgttccagggcgacggcaccgtgagcaccgtgctgggcaacggcagcagcctgagcctgcccgagggccagagcctgagactggtgtgcgccgtggacgccgtggacagcaacccccccgccagactgagcctgagctggagaggcctgaccctgtgccccagccagcccagcaaccccggcgtgctggagctgccctgggtgcacctgagagacgccgccgagttcacctgcagagcccagaaccccctgggcagccagcaggtgtacctgaacgtgagcctgcagagcaaggccaccagcggcgtgacccagggcgtggtgggcggcgccggcgccaccgccctggtgttcctgagcttctgcgtgatcttcgtggtggtgagaagctgcagaaagaagagcgccagacccgccgccggcgtgggcgacaccggcatcgaggacgccaacgccgtgagaggcagcgccagccagggccccctgaccgagccctgggccgaggacagcccccccgaccagcccccccccgccagcgccagaagcagcgtgggcgagggcgagctgcagtacgccagcctgagcttccagatggtgaagccctgggacagcagaggccaggaggccaccgacaccgagtacagcgagatcaagatccacagatag

SEQ ID NO: 180094 - protein, 499 aa, Artificial Sequence
  derived and/or modified sequence
MLLLLLLLPLLWGTKGMEGDRQYGDGYLLQVQELVTVQEGLCVHVPCSFSYPQDGWTDSDPVHGYWFRAGDRPYQDAPVATNNPDREVQAETQGRFQLLGDIWSNDCSLSIRDARKRDKGSYFFRLERGSMKWSYKSQLNYKTKQLSVFVTALTHRPDILILGTLESGHSRNLTCSVPWACKQGTPPMISWIGASVSSPGPTTARSSVLTLTPKPQDHGTSLTCQVTLPGTGVTTTSTVRLDVSYPPWNLTMTVFQGDATASTALGNGSSLSVLEGQSLRLVCAVNSNPPARLSWTRGSLTLCPSRSSNPGLLELPRVHVRDEGEFTCRAQNAQGSQHISLSLSLQNEGTGTSRPVSQVTLAAVGGAGATALAFLSFCIIFIIVRSCRKKSARPAAGVGDTGMEDAKAIRGSASQGPLTESWKDGNPLKKPPPAVAPSSGEEGELHYATLSFHKVKPQDPQGQEATDSEYSEIKIHKRETAETQACLRNHNPSSKEVRG

SEQ ID NO: 180095 - DNA, 1500 bp, Artificial Sequence
  derived and/or modified sequence
atgctcctcctcctcttgctattgcccctgttatggggcactaaaggtatggagggtgatcgacaatatggcgatggctacctgctgcaagtgcaagaattagtgacagtgcaggagggcctgtgcgttcatgtcccgtgctcctttagttacccacaggacggttggaccgattccgatcccgttcatggctattggttccgagccggtgaccggccttatcaggacgctccagttgcaacaaataaccctgatagagaggtgcaggccgagacgcagggaagatttcagctcctgggtgacatctggagcaacgactgttcattgagcatccgtgacgcacggaagcgtgataaagggagctacttctttcggttggaaagaggttccatgaagtggagctataaatcccagctgaattacaaaacaaagcagctcagcgtcttcgtgaccgcactcactcaccggcccgacatcctgatattagggactttggagtcaggacacagtagaaatctcacatgcagcgtaccatgggcgtgtaaacaaggtacgcctccaatgatatcttggattggtgcttctgtgagctctcccggccccactactgccagaagttcagtgcttactttgaccccaaaaccacaggaccatggaaccagcctcacctgtcaggtgacattgcccgggacaggagtgactactacaagtacggttagacttgacgtgtcttatcctccctggaacctgaccatgaccgtgtttcagggcgatgctacagccagcacggcccttggtaatggaagttcgctgtctgtcctggagggacagagtctcagacttgtttgcgccgtgaatagtaacccaccagcgcgcttgtcttggacacgaggcagcctgacattgtgtccttccaggagcagtaatcccggtctcctggagctgccaagggttcatgtgagagacgaaggagagttcacctgccgggcccagaatgcccagggctcccagcacatatctcttagtctcagtttgcagaacgagggaacagggacaagcagacctgtgtctcaagtgacactggccgctgtgggcggggctggagccaccgcattggcctttctgtctttttgtattatcttcattattgtacggtcctgtaggaaaaaatctgctcggcctgccgctggtgttggagatacaggaatggaagacgccaaggcaatcagaggctctgccagtcaaggtcctctgactgaatcgtggaaagatgggaatccactgaagaagccacccccagctgtcgcccccagctcaggagaagaaggagagctgcattatgcgacgctgtccttccataaagtcaagccacaagatcctcagggccaggaggctaccgacagcgagtactcagagattaagattcacaagcgtgagacggccgagacacaagcgtgtctccggaaccacaaccctagttctaaggaagtgcgcggatag

SEQ ID NO: 180096 - DNA, 1500 bp, Artificial Sequence
  derived and/or modified sequence
atgctgctgctgctgctgctgctgcccctgctgtggggcaccaagggcatggagggggaccggcagtatggagatggctacctgctgcaggtgcaggagctggtgacagtgcaggagggcctgtgtgtgcacgtgccctgcagcttctcctacccccaggacggctggacagacagcgaccctgtgcacggctactggttccgggccggggaccggccctaccaggatgcccctgtggccaccaacaacccagaccgggaggtgcaggccgagacccagggccgcttccagctgctgggggacatctggagcaatgactgcagcctgagcatcagagatgccaggaagagggacaagggcagctacttcttccggctggagcggggctccatgaagtggagctacaagagccagctgaactacaagaccaagcagctgtctgtgtttgtgacagccctgacccacaggccagacatcctgatcctgggcaccctggagagcggccacagcaggaacctgacctgcagcgtgccctgggcctgcaagcagggcaccccacccatgatctcctggattggagcctctgtgagcagccctggccccaccacagcccggagctctgtgctgaccctgacccccaagccccaggaccacggcaccagcctgacctgccaggtgaccctgcccggcactggagtgaccaccaccagcacagtgcggctggatgtgtcctacccaccctggaacctgaccatgacagtgttccagggagatgccacagccagcacagccctgggcaatggcagcagcctgtctgtgctggagggccagagcctgcggctggtgtgtgctgtgaacagcaaccccccagcccggctgtcctggacccggggcagcctgaccctgtgccccagccgcagcagcaaccctggcctgctggagctgccccgggtgcacgtgagagatgaaggagagttcacctgccgggcccagaatgcccagggcagccagcacatcagcctgagcctgagcctgcagaatgaaggcaccggcaccagcaggcctgtgtcccaggtgaccctggccgctgtgggcggggccggggccacagccctggccttcctgtccttctgcatcatcttcatcatcgtgcgcagctgcaggaagaagagcgcccggcctgctgctggggtgggggacaccggcatggaggatgccaaggccatccggggcagcgccagccagggccccctgacagagagctggaaggatggcaaccccctgaagaagcccccacctgctgtggcccccagcagtggagaggagggggagctgcactacgccaccctgtccttccacaaggtgaagccccaggacccccagggccaggaggccacagacagcgagtacagcgagatcaagatccacaagcgggagacagctgagacccaggcctgcctgaggaaccacaaccccagcagcaaggaggtgcggggctag

SEQ ID NO: 180097 - DNA, 1500 bp, Artificial Sequence
  derived and/or modified sequence
atgctgctgctgctgctgctgctgcccctgctgtggggcaccaaggggatggagggcgatcggcagtacggtgatgggtatctcctacaggtgcaggaactggtgactgtgcaagaaggcctgtgtgtgcatgtgccatgctcattttcatatcctcaggacggctggaccgatagcgatcctgtacacggctattggttcagggcgggtgatcgaccctatcaggacgcgccggtggctacaaataatccagacagagaggtgcaggcggaaacacagggacggttccaattgcttggggacatttggtccaatgactgcagcctgtccataagagatgcccgcaagcgcgataagggttcttacttctttcgcctggaaagggggagcatgaaatggagctacaagtcccagctcaactataaaaccaaacaactgagtgtgttcgtgacggcattgacccaccgacccgacattttgatcctcgggaccctggaatccggtcacagccgcaatctgacatgctcagttccttgggcatgtaagcagggaaccccacccatgatttcctggataggagcctcagtcagctctcccggccctactaccgcccgcagcagcgtgctgaccctcacaccaaagccacaagaccacggtacctccctcacgtgtcaggttaccctgcctggcaccggcgttacaacaacatctactgtcaggttggatgtgtcataccctccctggaatctcacaatgaccgtgtttcaaggcgatgctactgccagcactgccctgggcaatgggtctagtctgtccgttctggaaggccaatcattgcgtcttgtatgcgcggtaaacagcaatccccccgccaggctcagttggacacgcggctctctgaccctttgtccaagtagaagtagcaatcccgggctgttggaattgccgagggtacacgtgcgtgatgagggagagttcacttgtcgggcacaaaatgcccaaggatcacagcacatctccctgagcttgtctctgcagaatgaggggactggcacttcaaggcctgtgtcccaggtgaccctcgccgctgtgggcggggccggcgcaactgctttggcatttctcagcttttgtattatcttcataatcgttcgctcctgccggaagaagtctgccaggcccgccgctggcgttggcgacacaggcatggaagacgcgaaggccatccgaggaagcgcatcgcaggggcccctcacagagtcctggaaagacggaaacccactaaagaagccacctcctgcagtggcgcccagcagcggcgaggagggcgagctgcactatgctaccctctctttccacaaagttaaaccccaggatccccaggggcaggaggctaccgactctgaatattctgaaatcaaaatccacaaacgtgaaaccgctgaaacccaggcgtgtctgaggaaccacaatccaagcagcaaggaggtcagaggctag

SEQ ID NO: 180098 - DNA, 1500 bp, Artificial Sequence
  derived and/or modified sequence
atgttactattgctgctgctgctccccctcctgtggggaaccaagggtatggaaggtgataggcagtatggagatggctacctactgcaggtgcaagaactggttacagtgcaggagggactctgcgtgcacgttccatgctcgttttcttatccccaggatgggtggaccgatagcgaccccgtgcatggatattggtttagggcaggcgataggccataccaggatgcccctgttgcaactaacaatcctgaccgagaagtgcaggcggaaacccagggcaggtttcagttgctcggcgatatctggtccaatgattgctccctctccattagggacgcaaggaaacgggataagggttcatacttcttcagactggagcgagggagtatgaagtggtcctacaagtctcagcttaattataagactaagcagctttcggtcttcgtgactgccttgacacaccgcccagacattctcatcctcggaacactggagagcggccactctcggaatctaacttgcagcgtaccatgggcctgcaagcaggggaccccgcctatgatctcctggataggcgcttccgtgagcagccccggacctacaactgccagatcctcagtcctcaccttgactcctaagccgcaggaccatggtacgtccctcacatgtcaggtgacgctgcccggtactggagtgaccaccacttccaccgtgaggttggacgtgtcttatccgccatggaatcttacgatgaccgtctttcagggcgatgctaccgcatctaccgcattgggaaacggctcctcgctatccgttctggaggggcagtctctgagattagtgtgtgctgttaatagcaatccgccagccagactttcttggacccgagggtctcttacattgtgccctagcaggtcgagtaatcccggattactggagctgcctcgcgtgcacgtaagggacgaaggcgaatttacctgcagggcccagaatgcccagggcagtcagcacatctccctctctctgtcacttcaaaatgaaggcacagggaccagccggcctgtgtcacaggtgaccctggctgcggtcggaggagcaggtgccacagccctggcctttctttcattttgtataatctttataatcgtgcgctcctgccggaaaaaaagcgcacggcctgctgcaggggtgggggatacagggatggaggatgctaaagccattcgcggatctgctagtcagggccctctgacagagtcctggaaagatggtaacccattgaaaaagccaccacccgcagtggccccttcctccggcgaggagggagaactacattatgcgactttaagtttccataaggtcaaacctcaggatccccagggccaggaagctactgatagtgaatattcagagattaaaatccataagagggaaacggccgaaacacaagcatgtctgcgcaaccataatccatcttcaaaagaagtcaggggatag

SEQ ID NO: 180099 - DNA, 2948 bp, Artificial Sequence
  derived and/or modified sequence
agtttctgagagaagaaccctgaggaacagacgttccctggcggccctggcgccttcaaacccagacatgctgctgctgctgctgctgctgcccctgctctgggggacaaaggggatggagggagacagacaatatggggatggttacttgctgcaagtgcaggagctggtgacggtgcaggagggcctgtgtgtccatgtgccctgctccttctcctacccccaggatggctggactgactctgacccagttcatggctactggttccgggcaggagacagaccataccaagacgctccagtggccacaaacaacccagacagagaagtgcaggcagagacccagggccgattccaactccttggggacatttggagcaacgactgctccctgagcatcagagacgccaggaagagggataaggggtcatatttctttcggctagagagaggaagcatgaaatggagttacaaatcacagttgaattacaaaactaagcagctgtctgtgtttgtgacagccctgacccataggcctgacatcctcatcctagggaccctagagtctggccactccaggaacctgacctgctctgtgccctgggcctgtaagcaggggacaccccccatgatctcctggattggggcctccgtgtcctccccgggccccactactgcccgctcctcagtgctcacccttaccccaaagccccaggaccacggcaccagcctcacctgtcaggtgaccttgcctgggacaggtgtgaccacgaccagtaccgtccgcctcgatgtgtcctaccctccttggaacttgaccatgactgtcttccaaggagatgccacagcatccacagccctgggaaatggctcatctctttcagtccttgagggccagtctctgcgcctggtctgtgctgtcaacagcaatccccctgccaggctgagctggacccgggggagcctgaccctgtgcccctcacggtcctcaaaccctgggctgctggagctgcctcgagtgcacgtgagggatgaaggggaattcacctgccgagctcagaacgctcagggctcccagcacatttccctgagcctctccctgcagaatgagggcacaggcacctcaagacctgtatcacaagtgacactggcagcagtcgggggagctggagccacagccctggccttcctgtccttctgcatcatcttcatcatagtgaggtcctgcaggaagaaatcggcaaggccagcagcgggcgtgggggatacaggcatggaagatgcaaaggccatcaggggctcggcctctcagggacccctgactgaatcctggaaagatggcaaccccctgaagaagcctcccccagctgttgccccctcgtcaggggaggaaggagagctccattatgcaaccctcagcttccataaagtgaagcctcaggacccgcagggacaggaggccactgacagtgaatactcggagatcaagatccacaagcgagaaactgcagagactcaggcctgtttgaggaatcacaacccctccagcaaagaagtcagaggctgattctcatagaacaagaaccctctagagccccatgctatgcagtaggtcaccagggctccctcctcctgtctaaccaaaacttggaccaatgtctcccctttccccggctaccagggacccatccctgcctctagcttctactacccaccattctcctctcgacctctctgaggttgactattttagattccacatagagatgaggtcatgtggtacttgcctctctgtgtgtggctcattttacacaaaaaaatatcccctaggttcatccatgttctctcaaatgacagaatcaagcactgaatatttttttttctttgagagatggagtttcgctctgttgcccaggctggagtgcagtggttcaatctctgctcactgcaacctccacctcctgggttcaaacgattctcctgcctcagcttcccaagtagctggtactacaggcgtgtgtcaccacgcccagctaatttttgtattttttagtagagacggggtttcactataagtgggccaggctagtctcaaactcctgacctcaagtgatctgcctgccttggcctcccaaagtgctgggatttcaggcatgagccaccgcacccagcttgcattgaatattttcaaggagctaaaagaagattttaaatggtctcacaaaaacagataaatatttgcacagatgggtgtgctaatcattgtgccttgatggttccacgatgtatccgggtgtggaaatctcactgggtctctctcaaggccactcggctactcaggacagggctggaatttaaagcctgtccgattctgaggtctcttctctcatctagcactgagtcaagcaatcagcaggctgggcaccccttagccataagttttcaggaaataaattccttgagggcattgacttttacaaaagagggagcagcaatggcctagagtctcaggaacaagacaggtgcactgaggagatgaaggccgggaccccctgcccaacctgtatggcgggtctgtacttattttgtttacccccaatttaaaacgtttttttttattgcaggttgtttgtttgatatggtttggctgtgtccccacccaaatcttatctagaattgtaatcagaattataatccccatgtgttgggggagggacctggtgggaggtgataggatcatgggggtggttcccccatgctgttctgatagtgagtgagttatcacgagatctgatggttttgtaagtggtggtttcccctgctcttctctcttgcctgccaccatgtaagatgtgcctggttccccttccgccatgattgtaagtttcctgaggcctcccccgccatgtggaactgtgagtcaattacacctctttcatttataaatt

SEQ ID NO: 180100 - DNA, 1500 bp, Artificial Sequence
  derived and/or modified sequence
atgctgctgctgctgctgctgctgcccctgctgtggggcaccaagggcatggagggcgacagacagtacggcgacggctacctgctgcaggtgcaggagctggtgaccgtgcaggagggcctgtgcgtgcacgtgccctgcagcttcagctacccccaggacggctggaccgacagcgaccccgtgcacggctactggttcagagccggcgacagaccctaccaggacgcccccgtggccaccaacaaccccgacagagaggtgcaggccgagacccagggcagattccagctgctgggcgacatctggagcaacgactgcagcctgagcatcagagacgccagaaagagagacaagggcagctacttcttcagactggagagaggcagcatgaagtggagctacaagagccagctgaactacaagaccaagcagctgagcgtgttcgtgaccgccctgacccacagacccgacatcctgatcctgggcaccctggagagcggccacagcagaaacctgacctgcagcgtgccctgggcctgcaagcagggcaccccccccatgatcagctggatcggcgccagcgtgagcagccccggccccaccaccgccagaagcagcgtgctgaccctgacccccaagccccaggaccacggcaccagcctgacctgccaggtgaccctgcccggcaccggcgtgaccaccaccagcaccgtgagactggacgtgagctaccccccctggaacctgaccatgaccgtgttccagggcgacgccaccgccagcaccgccctgggcaacggcagcagcctgagcgtgctggagggccagagcctgagactggtgtgcgccgtgaacagcaacccccccgccagactgagctggaccagaggcagcctgaccctgtgccccagcagaagcagcaaccccggcctgctggagctgcccagagtgcacgtgagagacgagggcgagttcacctgcagagcccagaacgcccagggcagccagcacatcagcctgagcctgagcctgcagaacgagggcaccggcaccagcagacccgtgagccaggtgaccctggccgccgtgggcggcgccggcgccaccgccctggccttcctgagcttctgcatcatcttcatcatcgtgagaagctgcagaaagaagagcgccagacccgccgccggcgtgggcgacaccggcatggaggacgccaaggccatcagaggcagcgccagccagggccccctgaccgagagctggaaggacggcaaccccctgaagaagcccccccccgccgtggcccccagcagcggcgaggagggcgagctgcactacgccaccctgagcttccacaaggtgaagccccaggacccccagggccaggaggccaccgacagcgagtacagcgagatcaagatccacaagagagagaccgccgagacccaggcctgcctgagaaaccacaaccccagcagcaaggaggtgagaggctag

SEQ ID NO: 180101 - protein, 180 aa, Artificial Sequence
  derived and/or modified sequence
MDWPHNLLFLLTISIFLGLGQPRSPKSKRKGQGRPGPLAPGPHQVPLDLVSRMKPYARMEEYERNIEEMVAQLRNSSELAQRKCEVNLQLWMSNKRSLSPWGYSINHDPSRIPVDLPEARCLCLGCVNPFTMQEDRSMVSVPVFSQVPVRRRLCPPPPRTGPCRQRAVMETIAVGCTCIF

SEQ ID NO: 180102 - DNA, 543 bp, Artificial Sequence
  derived and/or modified sequence
atggactggccccacaacctgctgttcctgctgaccatcagcatcttcctgggcctgggccagcccagaagccccaagagcaagagaaagggccagggcagacccggccccctggcccccggcccccaccaggtgcccctggacctggtgagcagaatgaagccctacgccagaatggaggagtacgagagaaacatcgaggagatggtggcccagctgagaaacagcagcgagctggcccagagaaagtgcgaggtgaacctgcagctgtggatgagcaacaagagaagcctgagcccctggggctacagcatcaaccacgaccccagcagaatccccgtggacctgcccgaggccagatgcctgtgcctgggctgcgtgaaccccttcaccatgcaggaggacagaagcatggtgagcgtgcccgtgttcagccaggtgcccgtgagaagaagactgtgcccccccccccccagaaccggcccctgcagacagagagccgtgatggagaccatcgccgtgggctgcacctgcatcttctag

SEQ ID NO: 180103 - DNA, 543 bp, Artificial Sequence
  derived and/or modified sequence
atggactggccacataatttactgtttctgttgacaattagtatatttctcggattggggcagcccaggagtcctaaaagcaagaggaaaggccaaggccggccaggacccctggcccctggcccccaccaggtgcccctcgaccttgtatcccgcatgaagccttacgctcgcatggaggaatatgagagaaacattgaggaaatggtagctcagcttcgcaatagctccgagctagcccagagaaaatgcgaagtgaacttgcagctgtggatgtctaataagaggtccctgagtccttggggctattcgattaatcacgatccttccaggatccccgtcgacctgcctgaggcaaggtgcctctgcctcggttgcgtgaatccatttaccatgcaagaggaccggtctatggtgtccgtcccggttttttcgcaggtgcctgtccggagacggctgtgtcctccccccccccggactgggccatgccgccagcgggcagtgatggagaccatagcggtcgggtgcacgtgcatcttctag

SEQ ID NO: 180104 - DNA, 543 bp, Artificial Sequence
  derived and/or modified sequence
atggactggccccacaacctgctcttcctgctgaccatcagcatcttcctgggcctgggccagcccaggagccccaagagcaagaggaagggccagggccggcccggccccctggcccctggcccccaccaggtgcccctggacctggtgtccaggatgaagccctatgccaggatggaggagtatgaaagaaacatcgaggagatggtggcccagctgaggaacagcagcgagctggcccagaggaaatgtgaggtgaacctgcagctgtggatgagcaacaagaggagcctgagcccctggggctacagcatcaaccacgaccccagccgcatccctgtggacctgcctgaggcccgctgcctgtgcctgggctgtgtgaaccccttcaccatgcaggaggaccgctccatggtgtctgtgcctgtgttcagccaggtgcctgtgagaagaaggctgtgccccccaccacccaggacaggcccctgccggcagagagctgtgatggagaccatcgctgtgggctgcacctgcatcttctag

SEQ ID NO: 180105 - DNA, 543 bp, Artificial Sequence
  derived and/or modified sequence
atggactggccccacaacctgctgttcctgctgaccatcagcatctttctcggccttggtcagccacggtcaccaaagtcaaaacgtaagggacagggacgcccgggtccactcgctccaggcccccatcaggtcccccttgacctggtgtcacgcatgaaaccatatgctaggatggaggagtatgagcggaacatcgaggaaatggttgcccagctcagaaacagcagtgagctggcccagcggaaatgcgaggttaacctgcagctgtggatgtcgaacaaaagatctctaagcccttgggggtactccattaatcacgatccttcaaggatccccgttgatcttccagaggcaagatgcctgtgtctgggatgcgtcaatccatttaccatgcaggaagatcggtcaatggtgtcggtgccagtcttctcccaggtacctgtgagaagaagactgtgtccgcctccacctaggaccggcccttgccgtcaaagagccgtgatggaaacgattgcagtgggctgtacttgtatcttttag

SEQ ID NO: 180106 - DNA, 543 bp, Artificial Sequence
  derived and/or modified sequence
atggattggccccacaatctccttttcctcctcaccataagcatatttttgggattgggtcagccccgatcacctaaaagcaaacgaaaaggccagggcagacccggaccattagcgcctgggcctcatcaggtcccactcgacctcgtgtcacggatgaagccatatgccagaatggaagaatacgagagaaatatcgaggagatggtcgcacaactgcgaaactcttcagaactagcccagagaaagtgcgaagtgaacctacagctctggatgagcaataagagatctttaagcccttggggatactccattaaccacgaccccagtcggatccccgtcgaccttccagaagccagatgcctgtgcttaggctgtgtgaacccctttaccatgcaagaagaccgatccatggttagcgtccccgtgttttctcaagtcccagtgagacgtcgcctctgcccacctccacccagaaccggaccctgccgtcagcgcgctgttatggagacaattgcagtcggatgcacctgtattttttag

SEQ ID NO: 180107 - DNA, 696 bp, Artificial Sequence
  derived and/or modified sequence
ctggggttccaggcgggcagcagctgcaggctgaccttgcagcttggcggaatggactggcctcacaacctgctgtttcttcttaccatttccatcttcctggggctgggccagcccaggagccccaaaagcaagaggaaggggcaagggcggcctgggcccctggcccctggccctcaccaggtgccactggacctggtgtcacggatgaaaccgtatgcccgcatggaggagtatgagaggaacatcgaggagatggtggcccagctgaggaacagctcagagctggcccagagaaagtgtgaggtcaacttgcagctgtggatgtccaacaagaggagcctgtctccctggggctacagcatcaaccacgaccccagccgtatccccgtggacctgccggaggcacggtgcctgtgtctgggctgtgtgaaccccttcaccatgcaggaggaccgcagcatggtgagcgtgccggtgttcagccaggttcctgtgcgccgccgcctctgcccgccaccgccccgcacagggccttgccgccagcgcgcagtcatggagaccatcgctgtgggctgcacctgcatcttctgaatcacctggcccagaagccaggccagcagcccgagaccatcctccttgcacctttgtgccaagaaaggcctatgaaaagtaaacactgacttttgaaagcaa

SEQ ID NO: 180108 - protein, 666 aa, Artificial Sequence
  derived and/or modified sequence
MIHELLLALSGYPGSIFTWNKRSGLQVSQDFPFLHPSETSVLNRLCRLGTDYIRFTEFIEQYTGHVQQQDHHPSQQGQGGLHGIYLRAFCTGLDSVLQPYRQALLDLEQEFLGDPHLSISHVNYFLDQFQLLFPSVMVVVEQIKSQKIHGCQILETVYKHSCGGLPPVRSALEKILAVCHGVMYKQLSAWMLHGLLLDQHEEFFIKQGPSSGNVSAQPEEDEEDLGIGGLTGKQLRELQDLRLIEEENMLAPSLKQFSLRVEILPSYIPVRVAEKILFVGESVQMFENQNVNLTRKGSILKNQEDTFAAELHRLKQQPLFSLVDFEQVVDRIRSTVAEHLWKLMVEESDLLGQLKIIKDFYLLGRGELFQAFIDTAQHMLKTPPTAVTEHDVNVAFQQSAHKVLLDDDNLLPLLHLTIEYHGKEHKDATQAREGPSRETSPREAPASGWAALGLSYKVQWPLHILFTPAVLEKYNVVFKYLLSVRRVQAELQHCWALQMQRKHLKSNQTDAIKWRLRNHMAFLVDNLQYYLQVDVLESQFSQLLHQINSTRDFESIRLAHDHFLSNLLAQSFILLKPVFHCLNEILDLCHSFCSLVSQNLGPLDERGAAQLSILVKGFSRQSSLLFKILSSVRNHQINSDLAQLLLRLDYNKYYTQAGGTLGSFGM

SEQ ID NO: 180109 - DNA, 2001 bp, Artificial Sequence
  derived and/or modified sequence
atgatccacgagctgctgctggccctgagcggctaccccggcagcatcttcacctggaacaagagaagcggcctgcaggtgagccaggacttccccttcctgcaccccagcgagaccagcgtgctgaacagactgtgcagactgggcaccgactacatcagattcaccgagttcatcgagcagtacaccggccacgtgcagcagcaggaccaccaccccagccagcagggccagggcggcctgcacggcatctacctgagagccttctgcaccggcctggacagcgtgctgcagccctacagacaggccctgctggacctggagcaggagttcctgggcgacccccacctgagcatcagccacgtgaactacttcctggaccagttccagctgctgttccccagcgtgatggtggtggtggagcagatcaagagccagaagatccacggctgccagatcctggagaccgtgtacaagcacagctgcggcggcctgccccccgtgagaagcgccctggagaagatcctggccgtgtgccacggcgtgatgtacaagcagctgagcgcctggatgctgcacggcctgctgctggaccagcacgaggagttcttcatcaagcagggccccagcagcggcaacgtgagcgcccagcccgaggaggacgaggaggacctgggcatcggcggcctgaccggcaagcagctgagagagctgcaggacctgagactgatcgaggaggagaacatgctggcccccagcctgaagcagttcagcctgagagtggagatcctgcccagctacatccccgtgagagtggccgagaagatcctgttcgtgggcgagagcgtgcagatgttcgagaaccagaacgtgaacctgaccagaaagggcagcatcctgaagaaccaggaggacaccttcgccgccgagctgcacagactgaagcagcagcccctgttcagcctggtggacttcgagcaggtggtggacagaatcagaagcaccgtggccgagcacctgtggaagctgatggtggaggagagcgacctgctgggccagctgaagatcatcaaggacttctacctgctgggcagaggcgagctgttccaggccttcatcgacaccgcccagcacatgctgaagaccccccccaccgccgtgaccgagcacgacgtgaacgtggccttccagcagagcgcccacaaggtgctgctggacgacgacaacctgctgcccctgctgcacctgaccatcgagtaccacggcaaggagcacaaggacgccacccaggccagagagggccccagcagagagaccagccccagagaggcccccgccagcggctgggccgccctgggcctgagctacaaggtgcagtggcccctgcacatcctgttcacccccgccgtgctggagaagtacaacgtggtgttcaagtacctgctgagcgtgagaagagtgcaggccgagctgcagcactgctgggccctgcagatgcagagaaagcacctgaagagcaaccagaccgacgccatcaagtggagactgagaaaccacatggccttcctggtggacaacctgcagtactacctgcaggtggacgtgctggagagccagttcagccagctgctgcaccagatcaacagcaccagagacttcgagagcatcagactggcccacgaccacttcctgagcaacctgctggcccagagcttcatcctgctgaagcccgtgttccactgcctgaacgagatcctggacctgtgccacagcttctgcagcctggtgagccagaacctgggccccctggacgagagaggcgccgcccagctgagcatcctggtgaagggcttcagcagacagagcagcctgctgttcaagatcctgagcagcgtgagaaaccaccagatcaacagcgacctggcccagctgctgctgagactggactacaacaagtactacacccaggccggcggcaccctgggcagcttcggcatgtag

SEQ ID NO: 180110 - DNA, 2001 bp, Artificial Sequence
  derived and/or modified sequence
atgatccacgaacttttattggctctgtcaggctacccaggatccatctttacttggaacaaacggagtgggttgcaagtgagtcaggacttcccttttctccacccgtccgaaacaagcgtgcttaaccggctgtgccgcttggggaccgattatattcgctttacggagtttattgaacagtatactggacatgtccagcaacaggatcaccatccaagtcagcagggacagggcggactgcacggcatctacctgcgggccttctgcactgggttggactctgtattacaaccgtaccggcaggcactgctcgatcttgagcaagaattcttaggcgaccctcacctttcaatctcccacgttaactattttctggaccagtttcagcttttgtttccatcagtaatggttgtggtcgagcaaattaaatcacagaagatccatggatgccagattttagaaaccgtttacaagcactcttgcggtggactgccaccagtgagaagtgctctggagaagatcttggccgtgtgtcacggcgtgatgtacaagcaactctccgcatggatgctgcatgggttgctgcttgaccagcacgaagagttctttattaagcaggggccctcctctgggaatgtctccgctcaacccgaggaggatgaggaagacctggggattgggggtctgacaggtaagcaacttagagaactgcaagacctccgtctgatcgaggaggagaatatgcttgcaccatccctaaagcagtttagtctcagggtggaaatcctcccatcatatatacccgtaagagttgctgagaaaatcctgtttgtgggcgagagcgttcagatgttcgaaaaccaaaacgtcaatctgacgcgcaaaggcagcattctgaagaatcaggaggacacattcgccgccgagctgcatcggctaaagcagcagcctttgttcagccttgtcgatttcgaacaggtagtcgacaggatcaggtcgacagtcgcggaacacctatggaagctcatggtcgaggagagcgacctgctcggccagctcaagatcataaaggacttctaccttctgggccgaggcgagctgtttcaggcctttatcgacacagcgcagcacatgcttaagactcctcccacagcagtgacggaacacgacgttaatgttgctttccagcagagcgcacacaaggtcttacttgacgacgataatttactacccctccttcacctgaccatagagtaccatggcaaagagcataaggatgccactcaggcacgcgaaggcccttcacgagaaacatctcctagggaagctcccgcttcaggctgggcagctcttggactgtcgtacaaagtccagtggcctctccatattttgtttacacccgctgtgcttgagaagtacaatgttgtcttcaaatacctgcttagtgtgaggcgcgttcaggccgagttacagcactgctgggccttgcagatgcagaggaaacatctgaaaagtaatcaaaccgatgcgattaagtggagactgagaaaccacatggcatttctggtggacaatttgcagtattacctgcaggtcgatgtgctggagtcacagttctcccagctcctgcatcagattaattcaacaagggacttcgagagcatccgattggctcatgatcacttcctgtcaaatctcctagcccagagcttcattcttctgaaaccagtgttccattgcttgaatgagatcctggacctctgtcactctttttgtagtttggtgagtcagaatctgggcccattagatgagaggggggcagcccagctatcaatattagtgaaaggattttccagacaaagctccttgctgttcaagattttgagttcagtcaggaatcaccagatcaatagtgatctggcccaactactgctgcgactcgattacaataaatattacacccaggccggcggcactcttgggtctttcggcatgtag

SEQ ID NO: 180111 - DNA, 2001 bp, Artificial Sequence
  derived and/or modified sequence
atgatacacgaactgctactcgccctgtctggctatccaggatccatcttcacctggaacaaaagatctgggctgcaggtgtcacaagattttccattcctgcacccatccgagactagcgtcctgaaccgcctctgccggttgggcacggactatatccggtttaccgagttcatagagcagtatacgggacacgttcagcagcaggatcatcacccctcccagcagggtcaagggggcctccacggaatttacttgcgagccttttgtactggactggactcagtgctgcaaccctacagacaggcgctgctcgatctggaacaagagttcttaggtgatccccacctgtctatcagccacgttaattatttcctagatcagtttcaactcctgttcccctccgtaatggtagttgtcgagcagattaagagccagaagatccatggctgtcagattcttgaaacagtatataagcactcttgcggcggactgcccccagttcgtagcgctctggagaaaatcctggcagtgtgccatggcgtgatgtacaaacagctgtccgcctggatgttgcatggactcttgctagaccagcatgaagaattctttattaaacagggtccaagctcaggaaatgtgtcagcccagccagaagaagatgaggaggatcttggcatcggaggcctgactggcaagcagctcagagagctgcaggacttaaggctcattgaagaggagaacatgttagcccctagcctaaagcagttttccctaagagttgaaatcctgccatcttacatccccgtacgcgtagctgagaagatcctcttcgtcggtgagagcgtccagatgtttgagaatcagaatgtgaacttgacccggaagggatcaattctgaaaaaccaggaggatacctttgcagctgagcttcaccgtttgaagcagcagccgttgttctctcttgtggactttgaacaggttgttgataggattagaagcactgttgccgaacacctctggaaattgatggtcgaggagtccgatctcctcggtcagttgaaaatcatcaaggacttctatttgctgggccgtggagaactgttccaggcctttattgacaccgctcagcacatgctgaagacccccccaacagccgtgacagagcatgacgtgaatgtggcatttcagcaatccgcacataaggttttactggatgacgacaatctcctccccctactccacctgaccattgagtaccacgggaaggaacataaggatgcaactcaggccagagaaggccccagccgcgagacgagcccaagggaggcacccgctagcgggtgggcggcccttggtctgagctacaaagttcagtggcctcttcatatcctgttcacacctgccgttctggaaaagtacaatgtcgtcttcaagtacctcctctccgtccgcagagtgcaagctgaattgcagcactgttgggcgttgcagatgcaacggaaacacttaaagtccaaccagactgacgccatcaagtggaggcttcgtaatcacatggctttcctggttgacaacctccaatactacctgcaagtagacgtgttagagtcacagttttcccagcttctgcatcagatcaacagcaccagggactttgagtcaatccgccttgcccacgaccacttcctgtcaaacttgctggctcaaagtttcatcttactgaaacctgtgtttcactgcctgaatgagatcctcgatttgtgccacagcttctgctccctggtgagccaaaatcttgggcctctcgatgagcggggcgccgctcagctgagtatcttagtgaagggtttcagtaggcagagtagcttgttgtttaagatcctctctagcgtgagaaatcaccagattaactccgatctggctcagctcctgttacggctggattacaacaaatactatacccaggccggggggactctggggtcattcggcatgtag

SEQ ID NO: 180112 - DNA, 2001 bp, Artificial Sequence
  derived and/or modified sequence
atgattcatgagctgctgctggccctgagcggctacccaggcagcatcttcacctggaacaagaggagcggcctgcaggtgtcccaggacttccccttcctgcaccccagcgagacctctgtgctgaaccggctgtgccgcctgggcacagactacatccgcttcacagagttcatcgagcagtacacaggccacgtgcagcagcaggaccaccaccccagccagcagggccagggcggcctgcacggcatctacctgcgggccttctgcaccggcctggacagcgtgctgcagccctaccggcaggccctgctggacctggagcaggagttcctgggggacccccacctgagcatcagccacgtgaactacttcctggaccagttccagctgctcttccccagcgtgatggtggtggtggagcagatcaagagccagaagatccacggctgccagatcctggagaccgtgtacaagcacagctgtggcggcctgccccctgtgcgcagcgccctggagaagatcctggccgtgtgccacggcgtgatgtacaagcagctgagcgcctggatgctgcacggcctgctgctggaccagcacgaggagttcttcatcaagcagggccccagcagtggaaatgtgtctgcccagcctgaggaggatgaggaggacctgggcattggaggcctgaccgggaagcagctgcgggagctgcaggacctgcggctcatcgaggaggagaacatgctggcccccagcctgaagcagttcagcctgcgggtggagatcctgcccagctacatccctgtgcgggtggccgagaagatcctgtttgtgggggagagcgtgcagatgtttgagaaccagaatgtgaacctgaccaggaagggcagcatcctgaagaaccaggaggacacctttgctgctgagctgcaccggctgaagcagcagcccctcttcagcctggtggactttgagcaggtggtggaccgcatccgcagcacagtggccgagcacctgtggaagctgatggtggaggagagtgacctgctgggccagctgaagatcatcaaggacttctacctgctgggccgcggggagctgttccaggccttcatcgacacagcccagcacatgctgaagaccccacccacagctgtgacagaacatgatgtgaatgtggccttccagcagagcgcccacaaggtgctgctggatgatgacaacctgctgcccctgctgcacctgaccatcgagtaccacggcaaggagcacaaggatgccacccaggcccgggagggccccagccgggagaccagcccccgggaggccccagccagcggctgggccgccctgggcctgagctacaaggtgcagtggcccctgcacatcctcttcaccccagctgtgctggagaagtacaacgtggtgttcaagtacctgctgtctgtgagaagagtgcaggccgagctgcagcactgctgggccctgcagatgcagaggaagcacctgaagagcaaccagacagatgccatcaagtggaggctgaggaaccacatggccttcctggtggacaacctgcagtactacctgcaggtggatgtgctggagagccagttcagccagctgctgcaccagatcaacagcacccgggactttgagagcatccggctggcccatgaccacttcctgagcaacctgctggcccagagcttcatcctgctgaagcctgtgttccactgcctgaatgagatcctggacctgtgccacagcttctgcagcctggtgtcccagaacctgggccccctggatgagcggggggccgcccagctgagcatcctggtgaagggcttcagccggcagagcagcctgctcttcaagatcctgagctctgtgaggaaccaccagatcaacagcgacctggcccagctgctgctgcggctggactacaacaagtactacacccaggccggcggcaccctgggcagctttggcatgtag

SEQ ID NO: 180113 - DNA, 2001 bp, Artificial Sequence
  derived and/or modified sequence
atgatccacgagctgctgctggccctgagcggctaccccggcagcatttttacatggaataagagatctggattacaggtttctcaggacttcccattcctccaccccagcgaaacctctgttctgaacagactgtgtagattgggcactgattatatacgctttacagagttcatcgaacagtacaccgggcacgtgcaacaacaagaccaccatccctcccagcaggggcagggaggactgcacggaatttacttacgtgcattctgcaccggcttggattctgtcctccagccctatcggcaggcactgttggaccttgagcaggaattcctgggcgatccccacttatcgatctcacacgtgaattattttcttgatcaatttcagttgctgttcccttcagtgatggtcgtggtggagcagatcaaatcccagaaaatccatggttgtcagatattagaaaccgtgtacaagcacagctgcggcggcctcccaccagtgcgatcagcgcttgaaaaaatcctggccgtttgtcatggcgtgatgtacaagcagctgtctgcctggatgctgcacggcctgctccttgatcaacacgaggaattttttataaagcagggaccttcctcaggcaacgtctctgctcagcccgaagaggacgaggaggaccttgggatcggcgggctgaccgggaaacagctcagggagttgcaggaccttcggctgattgaagaggaaaatatgcttgcaccttctttaaagcaattctcgctaagggtggagatcctgccctcttatattcctgtccgggtggccgagaagattttattcgtgggtgagagtgtccagatgtttgagaatcagaacgtcaacttgactaggaagggctctattcttaagaatcaggaggataccttcgccgcagaactacaccgacttaagcagcagcctcttttcagcctggtcgactttgagcaggtcgttgatcggatcagaagtacagttgcagaacatctatggaaactcatggttgaggagtctgatcttttaggccagctaaagatcattaaggatttttacctgcttgggcgaggggagctatttcaggcttttattgatacagcacagcacatgctgaagacccctccgaccgccgtgactgaacacgacgtcaatgtagcctttcagcaatcagctcacaaggtccttctcgatgatgataacctccttcctctgctccacttaaccatcgagtatcacggcaaagaacataaagatgccacccaggcccgggaaggcccctctagggaaacctccccaagggaggcacccgcctcggggtgggcagctcttggcctttcttacaaagtacagtggcctttgcatattctattcacaccggcggtcctggagaagtacaacgttgtctttaagtacttactgagtgtcagacgggtccaggccgagctccagcactgttgggctttacaaatgcagaggaagcatcttaaatccaatcagacggacgctatcaagtggcgcttgagaaatcatatggcgtttctagtggataatctgcaatactacttgcaggtggatgttctggaatctcaatttagtcaactacttcatcagattaattcaacacgggattttgaatctatccgacttgcccatgaccacttcttgagtaatcttctcgcccagagctttatcctcctgaaacccgtgtttcactgcctgaatgaaattcttgacttatgtcactcattttgcagccttgtgtctcagaacctgggtccgctcgatgagagaggcgccgcacaactctcaatcctggtgaagggattttcccgacagtcaagcctgctattcaagatactttcttccgtgcgaaaccatcagattaattccgatcttgcgcagctcctgctccgactagattacaacaaatattatactcaagctggcggcactctcggttcattcgggatgtag

SEQ ID NO: 180114 - DNA, 2001 bp, Artificial Sequence
  derived and/or modified sequence
atgatccacgagctgctgctggccctgagcggctaccccggcagcatcttcacatggaataaaagaagcggcctgcaggtctcccaggacttccctttccttcacccgtcagagacatcagttctcaacaggctgtgtcgcctgggaaccgactatattcggtttactgagttcattgaacagtacactggccatgtgcaacagcaggatcatcacccttcccaacagggtcaaggaggcctacacggcatttacctgagggcattctgtaccggattggattctgtactgcaaccttaccgacaagctctgctcgatcttgaacaggagttcctgggagacccgcacttatccatcagtcatgttaactactttctagaccaatttcagctgttgttcccatcagtgatggtggttgtggagcagataaagagtcagaaaattcacggctgccagatcctcgaaactgtgtataagcattcctgcgggggtttgccacctgtgcgctcagcgttggaaaaaattctggccgtgtgtcacggagtgatgtacaagcaactgtctgcttggatgctgcacggattacttctggaccagcatgaggagttcttcatcaagcagggccctagcagcggtaacgtgtcagcccaacctgaggaggacgaggaggatctgggcatcggaggcctcaccgggaaacagctccgggaactgcaggacctacggctgattgaggaggaaaacatgcttgcaccttctctgaaacagttctcccttagggtggaaatcctgccttcttatataccagtgcgggttgccgagaagatcttgttcgtaggggagagtgtgcagatgttcgagaatcaaaatgtgaaccttaccagaaagggatcaatcctgaaaaaccaagaagataccttcgccgctgagctccaccgtctgaaacagcaacctctgtttagtctcgtagactttgagcaggtggtggacaggatccggagcacagtcgcagaacatctgtggaaactcatggttgaagagagcgatctgctgggacagcttaagattattaaggacttttatctccttggacggggcgagctcttccaggcttttatcgacacggctcagcacatgctgaaaactcctcccacggcagtgactgagcacgacgtgaacgtggcattccaacagtccgcacataaagtcctcttggatgacgacaatcttttgcccctcctgcacttaaccattgagtatcatgggaaggagcacaaggatgcaacgcaggctagagaggggccatcacgcgaaacatctccccgggaggctcccgcttctgggtgggcagcactcggcctgagttataaggttcagtggcccttgcatatattattcacccctgccgtcttggagaaatacaatgtcgtttttaaatacctcttgtccgtgcgccgagtccaggccgaactccagcactgctgggcgctgcagatgcaacgtaagcacttgaagagcaatcaaactgatgctatcaaatggagactcaggaaccatatggctttcctcgtcgataatcttcaatactatttacaggtggacgtactggagtctcagttttcccagctgctgcaccagattaactcgactagagacttcgaaagcattaggcttgcgcacgaccatttcctgtcaaatctgcttgctcagagcttcatcctcctcaagcccgtttttcactgtctgaacgaaatcttggacctgtgccactcgttctgctccctggtttcacagaacctgggcccattggatgagcggggagctgcccaactgtccatcttggtaaagggattttctcgccagtcctctctgcttttcaagatcctctcttctgtgaggaatcaccaaatcaattcagacttggcccagctgctcctgcgactcgactataacaagtattatactcaggccggcgggacgctggggtcttttgggatgtag

SEQ ID NO: 180115 - DNA, 2001 bp, Artificial Sequence
  derived and/or modified sequence
atgatccacgaacttctcttagctctgtccggttatcctggctccatctttacatggaacaaacgttccggcctgcaagtgtcccaggacttccctttccttcatccgagcgaaactagcgttctcaatagattgtgcagactcggaaccgattacatccggttcaccgagttcattgaacaatacacagggcatgtccagcagcaggatcaccatccctctcagcagggccaagggggtctgcacggcatctacttgagggcattttgtaccggactcgactcagtgctgcagccctacaggcaggccctgctcgatctcgaacaagagttcttgggggatcctcacctgtctatctcccatgtgaattatttcttggaccagtttcagcttctgtttcccagcgttatggtggttgtcgagcagattaaatcacagaagattcatggatgtcagattctcgagactgtctacaagcacagttgtggaggcctccccccagtgagatcagctctggaaaagattttggccgtatgtcacggtgttatgtacaagcagttgagcgcatggatgttacatggtctcttgctcgaccagcacgaagaatttttcataaaacagggacccagtagcggcaatgtctctgctcaaccagaggaagatgaggaagaccttggtatcggcggattgaccgggaaacagctgcgcgagctgcaggacctgcggctgatcgaagaggagaacatgctggccccttccctgaagcagttcagtcttagggtggagatcctcccgagttatatacctgtcagggtggccgagaagatcctgtttgtgggagagagtgtacagatgttcgagaaccagaatgtcaatctgacacgcaaagggtccatccttaaaaaccaggaggatacttttgccgctgaactgcacagactgaagcaacaaccacttttctctctcgtagacttcgaacaggtcgttgatcgcatacgttcaactgtggccgagcacttatggaaactcatggtggaggagtctgatttacttggacagctcaaaatcatcaaagatttctacctcctgggacggggtgagctttttcaggcatttatagataccgctcagcatatgttaaagacacctcctactgctgtcaccgagcacgacgtgaatgttgcgtttcagcaatcagctcacaaggtcctactcgacgacgataacctgctgccactgcttcatctgaccattgaatatcacggcaaagaacataaggacgctacccaggccagagagggcccaagccgagaaactagccctcgcgaggctcctgcctcagggtgggccgctctagggttaagctataaggtacaatggccgctccatatccttttcacgcctgccgtgctggaaaaatacaatgtcgtgtttaaatatcttttaagcgtccggagggtccaagctgagttgcagcattgttgggctctccagatgcagcgcaaacatctgaaaagcaatcaaacagatgcaattaaatggcgcctccgcaaccacatggcattcctggttgacaatctacagtactatttgcaggtcgatgtcctggagtcacagttcagccagcttttgcatcaaatcaactcaacacgtgacttcgaaagtatccgactggcccatgatcattttctgtctaatttgcttgcccagtcgttcatcttactgaaacccgtgttccactgcctcaatgagatcttagatctgtgccacagtttctgttccttggtgtctcaaaatctgggacccctggatgaacgaggcgcagcacagcttagcatcctcgtgaagggtttctcccgacagtcgagcttattgtttaaaattttatcttctgttaggaaccaccagatcaattcagacttagcacagctgctgctcagacttgactataataaatattatacacaggctggcggaacactagggtcctttggcatgtag

SEQ ID NO: 180116 - DNA, 2001 bp, Artificial Sequence
  derived and/or modified sequence
atgatccatgaactgctgcttgcattgtccggataccccggtagcatctttacctggaataagaggagcggactgcaggtttcccaggattttcccttcctccacccttctgaaacgtccgtgctgaacaggctatgtcgcctgggcaccgactatatccgcttcaccgagttcatcgagcagtatacaggccatgtacagcagcaggatcaccacccgtcccagcagggacagggaggcctgcacggaatttatttacgggcattttgcaccggcctggacagcgtgcttcagccttatcgccaggctctccttgacctggagcaggagttcctgggagacccgcatctttcaatcagccacgtgaactacttcctggatcagtttcagttgctgtttccatctgttatggtggtcgtcgagcagattaagagccaaaaaatccatggttgtcagatccttgagactgtctataagcactcttgtggaggactgcctccggtccgtagcgctctggagaaaatcctggccgtctgccatggggtgatgtacaagcagctttcggcttggatgttgcatgggctacttctggaccagcacgaggagttctttataaagcaggggccatcatccggcaatgtgtctgcccagcccgaggaagacgaggaggatctgggaatcgggggacttaccgggaaacagctccgggaactgcaggacctccgtctgatagaggaggagaatatgctcgcacctagcctgaaacagttttctttgagggtagagattctgccaagctatattccagtgagagtcgccgagaaaatcctttttgtcggcgaaagcgtgcaaatgttcgaaaatcagaacgttaatctgacaaggaagggcagcatactgaagaaccaggaggacacttttgcggctgagttacatcgcttgaagcagcaaccactcttctctctggtggactttgaacaggttgtggacagaattcgctcaacggtggcggagcatctgtggaagttaatggtggaagaaagtgacctcctcggacagcttaaaatcataaaggatttctacctcctaggcaggggtgagttattccaagcattcatcgatacggctcagcatatgctgaaaacccctccaaccgccgtgacagaacatgacgtgaatgtggccttccaacagtcggcccataaagtgctcttggacgatgataatctgttacctcttttacacctgactattgaatatcacgggaaagagcataaggatgcaacccaggcccgagaaggaccttctcgtgaaaccagtccacgtgaagctcctgcctctgggtgggccgctcttggcctgagctacaaagtgcagtggcccttacatattttgtttacccccgctgtcctggagaaatacaatgtggtattcaaatacctcctttcagtgcgcagggtgcaagccgagctacagcactgctgggccctccagatgcagcgcaagcatctgaagtctaatcagacagatgctataaaatggagactgcgtaaccacatggccttccttgtggacaaccttcagtactacctgcaagtggatgtgctggagtcacagttctctcagctgcttcatcagatcaatagtacacgagatttcgagagtatcagactcgcccatgatcattttttgtccaatctgctggcacagagcttcattttacttaaacctgttttccactgccttaacgaaattttggacctgtgccatagtttttgttccctggtgagccaaaacctgggaccgttggacgaacggggtgccgctcaactttccattctggttaagggcttctcccgtcaatcctctctactcttcaagatcttatccagtgtgagaaaccaccagatcaacagcgatctggctcagctattgttaagacttgactacaataagtactacacccaggccggagggactctggggagctttgggatgtag

SEQ ID NO: 180117 - DNA, 4122 bp, Artificial Sequence
  derived and/or modified sequence
ccgggcgggagtagctggtggaccccgttgagctgccgaacttccgggactcccccgcgaccccttcccagcttcccgtccgctccgccgcagcgattgtctcggtgggttgattcggcacaaaccgcccgacccaggggccggtgcgcgtgtggaaggggaagcactcccctcgtggtcgcctggaggtgcgctggaggagggggtgacataaccagggactcgaggtccgccgtgggaatgatccacgaactgctcttggctctgagcgggtaccctgggtccattttcacctggaacaagcggagtggcctgcaggtatcgcaggacttccctttcctccaccccagtgagaccagtgtcctgaatcgactctgccggctcggcacagactatattcgcttcactgagttcattgaacagtacacgggccatgtgcaacagcaggatcaccatccatctcaacagggccaaggtgggttacatggaatctacctgcgggccttctgcacagggctggattctgttttgcagccttatcgccaagcactgcttgatttggaacaagagttcctgggtgatccccatctctccatatcacatgtcaactacttcctagaccagttccagcttctttttccctctgtgatggttgtagtagaacaaattaaaagtcaaaagattcatggttgtcaaatcctggaaacagtctacaaacacagctgtggggggttgcctcctgttcgaagtgcactggaaaaaatcctggccgtttgtcatggggtcatgtataaacagctctcagcctggatgctccatggactcctcttggaccagcatgaagaattctttatcaaacaggggccatcttctggtaatgtcagtgcccagccagaagaggacgaggaggatctgggcattgggggactgacaggaaaacaactgagagaactgcaggacttgcgcctgattgaggaagagaacatgctggcaccatctctgaagcagttttccctacgagtggagattttgccatcctacattccagtgagggttgctgaaaaaatcctatttgttggagaatctgtccagatgtttgagaatcaaaatgtgaacctgactagaaaaggatccattttgaaaaaccaggaagacacttttgctgcagagctgcaccgtctcaagcagcagccactcttcagcttggtggactttgaacaggtggtggatcgcattcgcagcactgtggctgagcatctctggaagttgatggtagaagaatccgatttactgggtcagctgaagatcattaaagacttttaccttctgggacgtggagaactgtttcaggccttcattgacacagctcaacacatgttgaaaacaccacccactgcagtaactgagcatgatgtgaatgtggcctttcaacagtcagcacacaaggtattgctagatgatgacaaccttctccctctgttgcacttgacaatcgagtatcacggaaaggagcacaaagatgctactcaggcaagagaagggccttctcgggaaacttctccccgggaagcccctgcatctggctgggcagccctaggtctttcctacaaagtacagtggccactacatattctcttcaccccagctgtcctggaaaagtacaatgttgtttttaagtacttactgagtgtgcgccgggtgcaagctgagctgcagcactgctgggccctacaaatgcagcgcaagcacctcaagtcgaaccagactgatgcaatcaagtggcgcctaagaaatcacatggcatttttggtggataatcttcagtactatctccaggtagatgtgttggagtctcagttctcccagctgcttcatcagatcaattctacccgagactttgaaagcatccgattggctcatgaccacttcctgagcaatttgctggctcaatcctttatcctattgaaacctgtgtttcactgcctgaatgaaatcctagatctctgtcacagtttttgttcgctggtcagtcagaacctaggcccactggatgagcgtggagccgcccagctgagcattctcgtgaagggctttagccgccagtcttcactcctgttcaagattctctccagtgttcggaatcatcagatcaactcagatttggctcaactactgttacgactagattataacaaatactatacccaggctggtggaactctgggcagtttcgggatgtgaaaatttctggctcataaattgaaataacagccacgttcccaaggttgtaacagaagattcaaaacatcccattctagccacacacaaataaatatctgcggcttagtgataggactctaccttttctcctagaagcagttactgaacatccaggagtacaactccttcccatcattcccatgtggaagggtctctcccatcaaggagaacatgtggcatctctgatcctttacattgagaacatttgttggatatgttcatttattcaatagtcatttattgagcacctactacgtaccttggtactgttcaagctgtgggagatacagcggtaaacaaacaatatagagcagaaagttaaatattttatggttcatatgtgaaaaagtaattatgtttataaatagactaactgctggatgttaccaccaagtaagaaagcaacaggtaagataggctttctctctccctataccaagtaatttatacctacacagattgggcaattctagctaatgaaaatatacttaaaagtatttcttaggccgggcatggtggctcacacctgtaatcccagcactttgggaggccgaggcgggcggatcacctgaagtcaggagtttgagaccagcctgaccaacatgatgaaacctcgattctactaaaaatacaaaaattagccaggtgtggtggcatgtgcctgtaatcccagctactcaggaggctgagacaggagaattgcttgaacctgggaagcagacgctgcagtgagctgagattgtgccattgcattccagcccgggcaacaagagcgaaattccgtctcaaaaaaaaaaaaaaaaaaaaaaaaagtattattctccaagaaaaaggtccttaagaaaaaattgagatcaagttgttagatttttaaatactgaagattgcaggcccaattacccatcttacacaaaccataggggttgaagttatcttaatatggcccagccatcactggtaatcaatattcatatcagtgtaagtaaaaagaaatattcactgaacaacgccctccaaactgaaaaagaatgcagtgttctggcatcaggttatagtcactgcatctggttttcatcactacatattctacacacactgggaagctctgacaacttattccctgctattatcaactaaagatcaccctttctactgctgtctctggagcaggagctggcaaactatggcctgctgtctgtttttgtacagttttactgaaacacagccatgcccatttgtttactcattgtctatggttgctttcatgccctcacagcaaaggcgagtagttgtgatggatcaaatggcccacaaagcctgaaatatttactctttgaccctttacagaaaaaaaccttgttgacccctgctttagagaatgagaagccatgcagggatcagtgatgccagaggaagggaaggaactgcttccagctattgtgacaataataataataataatattgggtctttgactagaacgtgtaacatttccaggtgttctcacttgtgcttcccatgtttatcttacggaaggtcattccatcaagcttatggtcactgtcccttcatggcagttggtcctttcgttctccctttagctctaagagttggggagtacccacaggtgagctgtgatctcagctcagagagagagcatgaggtcttttttaactgtcaggaaacagagctgtgcccaattccactcaacttttggcacaactgttaatctgggccttcacctaccttaaactgagtttctgcaagcatagcattttagacaccctggaataaccttttgggaatgatgccacagaataaagttcactcttaacttttcaa

SEQ ID NO: 180118 - DNA, 3067 bp, Artificial Sequence
  derived and/or modified sequence
ccgggcgggagtagctggtggaccccgttgagctgccgaacttccgggactcccccgcgaccccttcccagcttcccgtccgctccgccgcagcgattgtctcggtgggttgattcggcacaaaccgcccgacccaggggccggtgcgcgtgtggaaggggaagcactcccctcgtggtcgcctggaggtgcgctggaggagggggtgacataaccagggactcgaggtccgccgtgggaatgatccacgaactgctcttggctctgagcgggtaccctgggtccattttcacctggaacaagcggagtggcctgcaggtatcgcaggacttccctttcctccaccccagtgagaccagtgtcctgaatcgactctgccggctcggcacagactatattcgcttcactgagttcattgaacagtacacgggccatgtgcaacagcaggatcaccatccatctcaacagggccaaggtgggttacatggaatctacctgcgggccttctgcacagggctggattctgttttgcagccttatcgccaagcactgcttgatttggaacaagagttcctgggtgatccccatctctccatatcacatgtcaactacttcctagaccagttccagcttctttttccctctgtgatggttgtagtagaacaaattaaaagtcaaaagattcatggttgtcaaatcctggaaacagtctacaaacacagctgtggggggttgcctcctgttcgaagtgcactggaaaaaatcctggccgtttgtcatggggtcatgtataaacagctctcagcctggatgctccatggactcctcttggaccagcatgaagaattctttatcaaacaggggccatcttctggtaatgtcagtgcccagccagaagaggacgaggaggatctgggcattgggggactgacaggaaaacaactgagagaactgcaggacttgcgcctgattgaggaagagaacatgctggcaccatctctgaagcagttttccctacgagtggagattttgccatcctacattccagtgagggttgctgaaaaaatcctatttgttggagaatctgtccagatgtttgagaatcaaaatgtgaacctgactagaaaaggatccattttgaaaaaccaggaagacacttttgctgcagagctgcaccgtctcaagcagcagccactcttcagcttggtggactttgaacaggtggtggatcgcattcgcagcactgtggctgagcatctctggaagttgatggtagaagaatccgatttactgggtcagctgaagatcattaaagacttttaccttctgggacgtggagaactgtttcaggccttcattgacacagctcaacacatgttgaaaacaccacccactgcagtaactgagcatgatgtgaatgtggcctttcaacagtcagcacacaaggtattgctagatgatgacaaccttctccctctgttgcacttgacaatcgagtatcacggaaaggagcacaaagatgctactcaggcaagagaagggccttctcgggaaacttctccccgggaagcccctgcatctggctgggcagccctaggtctttcctacaaagtacagtggccactacatattctcttcaccccagctgtcctggaaaagtacaatgttgtttttaagtacttactgagtgtgcgccgggtgcaagctgagctgcagcactgctgggccctacaaatgcagcgcaagcacctcaagtcgaaccagactgatgcaatcaagtggcgcctaagaaatcacatggcatttttggtggataatcttcagtactatctccaggtagatgtgttggagtctcagttctcccagctgcttcatcagatcaattctacccgagactttgaaagcatccgattggctcatgaccacttcctgagcaatttgctggctcaatcctttatcctattgaaacctgtgtttcactgcctgaatgaaatcctagatctctgtcacagtttttgttcgctggtcagtcagaacctaggcccactggatgagcgtggagccgcccagctgagcattctcgtgaagggctttagccgccagtcttcactcctgttcaagattctctccagtgttcggaatcatcagatcaactcagatttggctcaactactgttacgactagattataacaaatactatacccaggctggtggaactctgggcagtttcgggatgtgaaaatttctggctcataaattgaaataacagccacgttcccaaggttgtaacagaagattcaaaacatcccattctagccacacacaaataaatatctgcggcttagtgataggactctaccttttctcctagaagcagttactgaacatccaggagtacaactccttcccatcattcccatgtggaagggtctctcccatcaaggagaacatgtggcatctctgatcctttacattgagaacatttgttggatatgttcatttattcaatagtcatttattgagcacctactacgtaccttggtactgttcaagctgtgggagatacagcggtaaacaaacaatatagagcagaaagttaaatattttatggttcatatgtgaaaaagtaattatgtttataaatagactaactgctggatgttaccaccaagtaagaaagcaacaggtaagataggctttctctctccctataccaagtaatttatacctacacagattgggcaattctagctaatgaaaatatacttaaaagtatttcttaggccgggcatggtggctcacacctgtaatcccagcactttgggaggccgaggcgggcggatcacctgaagtcaggagtttgagaccagcctgaccaacatgatgaaacctcgattctactaaaaatacaaaaattagccaggtgtggtggcatgtgcctgtaatcccagctactcaggaggctgagacaggagaattgcttgaacctgggaagcagacgctgcagtgagctgagattgtgccattgcattccagcccgggcaacaagagcgaaattccgtctc

SEQ ID NO: 180119 - protein, 66 aa, Artificial Sequence
  derived and/or modified sequence
MVAKQRIRMANEKHSKNITQRGNVAKTSRNAPEEKASVGPWLLALFIFVVCGSAIFQIIQSIRMGM

SEQ ID NO: 180120 - DNA, 201 bp, Artificial Sequence
  derived and/or modified sequence
atggtggccaagcagagaatcagaatggccaacgagaagcacagcaagaacatcacccagagaggcaacgtggccaagaccagcagaaacgcccccgaggagaaggccagcgtgggcccctggctgctggccctgttcatcttcgtggtgtgcggcagcgccatcttccagatcatccagagcatcagaatgggcatgtag

SEQ ID NO: 180121 - DNA, 201 bp, Artificial Sequence
  derived and/or modified sequence
atggttgcgaagcagaggatacggatggccaacgagaagcactctaagaacattacccaaagagggaatgttgctaaaacttcaaggaacgccccagaagagaaggcgtccgtgggaccttggctgctcgccttgttcatcttcgtggtttgtgggagcgctatttttcagatcattcagtcaatacgcatggggatgtag

SEQ ID NO: 180122 - DNA, 201 bp, Artificial Sequence
  derived and/or modified sequence
atggtggctaagcagagaatacggatggccaacgaaaagcactctaagaacatcacacagcgcggaaacgttgccaaaacgagcaggaatgcccctgaagaaaaggcctctgtgggcccatggttgcttgccctattcatcttcgtagtgtgtggctcggccattttccaaattatccagtctattcgaatgggcatgtag

SEQ ID NO: 180123 - DNA, 201 bp, Artificial Sequence
  derived and/or modified sequence
atggtggccaagcagaggatccgcatggccaatgagaagcacagcaagaacatcacccagagaggaaatgtggccaagaccagcagaaatgcccctgaggagaaggcctctgtgggcccctggctgctggccctcttcatctttgtggtgtgtggcagcgccatcttccagatcatccagagcatccgcatgggcatgtag

SEQ ID NO: 180124 - DNA, 201 bp, Artificial Sequence
  derived and/or modified sequence
atggtggccaagcagcggatccggatggccaacgagaagcacagcaagaacattacacagcgagggaacgttgccaaaacatcacgtaatgcccccgaggagaaggcctccgtcggtccatggttgctggcactgttcattttcgttgtgtgcggttccgccatttttcaaataattcagtcgatccgcatgggcatgtag

SEQ ID NO: 180125 - DNA, 201 bp, Artificial Sequence
  derived and/or modified sequence
atggtggccaagcagcggatccggatggccaacgagaagcacagcaaaaatattacccagcggggaaacgtggctaaaacaagcaggaatgctcctgaggagaaggcctcagtaggcccttggctgctggcccttttcattttcgtggtatgtggtagcgctatcttccagataattcagtccatccgcatggggatgtag

SEQ ID NO: 180126 - DNA, 201 bp, Artificial Sequence
  derived and/or modified sequence
atggtggctaagcagcgaattcggatggccaacgaaaagcacagcaaaaacattacccagcggggaaatgtggcaaaaactagccgcaatgctcccgaggaaaaagcgagtgtggggccttggttattagcactgtttattttcgtagtctgcggctccgccattttccagatcattcagagtatccgtatggggatgtag

SEQ ID NO: 180127 - DNA, 201 bp, Artificial Sequence
  derived and/or modified sequence
atggtagccaaacagcgcattcgtatggcaaatgagaagcactccaagaacattacgcaacgaggaaacgtagctaaaacaagcaggaacgctcccgaggaaaaagcttcagtgggaccttggttgttggctctgttcatcttcgtcgtctgtggctctgctatcttccaaattatccagagcatccgaatgggcatgtag

SEQ ID NO: 180128 - DNA, 3171 bp, Artificial Sequence
  derived and/or modified sequence
aaacgcgcacgcgcaaatctagggcgacgcttgacagagcttgggagggtgcgcctgctttcgccctccttctccagcgggaggggcgcgcacttccgcggggcggagtccgtctagtgctgacgttggcagccgaacccaaagtagatcgaggcggcgggctgcacattcccgttgttgcgttgcgtttccttcctctttcactccgcgctcacggcggcggccaaagcggcggcgacggcggcgcgagaacgacccggcggccagttctcttcctcctgcgcacctgccccgctcggtcagtcagtcggcggccggcgcccggcttgtgctcagacctcgcgcttgcggcgcccaggcccagcggccgtagctagcgtctggcctgagaacctcggcgctccggcggcgcgggcaccacgagccgagcctcgcagcggctccagaggaggcaggcgagtgagcgagtccgaggggtggccggggcaggtggtggcgccgcgaagatggtcgccaagcaaaggatccgtatggccaacgagaagcacagcaagaacatcacccagcgcggcaacgtcgccaagacctcgagaaatgcccccgaagagaaggcgtctgtaggaccctggttattggctctcttcatttttgttgtctgtggttctgcaattttccagattattcaaagtatcaggatgggcatgtgaagtgactgaccttaagatgtttccattctcctgtgaattttaacttgaactcattcctgatgtttgataccctggttgaaaacaattcagtaaagcatcctgcctcagaatgactttcctatcatgcttcatgtgtcattccaaggtttcttcatgagtcattccaagttttctagtccataccacagtgccttgcaaaaaacaccacatgaataaagcaataaaatttgattgttaagatacagtagtggaccctacttattcagtcaattaagagtaagtttttttatgtggttattaaaacagtatgaacaattagtctaactctgcatagacagggtctagattttgttaacccaaatgtataactgcagttagcttaaattacaatttgaagtcttgtggtttttatatagctaggcactttattactcttttgaactgaaagcacactcccttataggttcatgtaactgtcctgtaataaggtgcttataaatggaacaactacacagcctagttttgccacaacctttagcatctaaaaagttttaaaagcttctaaatgtctaatataaagggagatgcttatagccacaacatctattttaccaatattgtttccattacactaccttggattttgcatgagtgagtatagtaacccaagatgccataaaaaaaaaacttgatcgttttctgacttaatcagttactgtggtttcactaaaagctaccgtggtggagtgaagtcagtcagggaaggtttgtttatgttacatttatttcaccagaactattttaatatatcaaaggggtttactatgccaaacaaaattctagggaaaaatactgctaaaaatggatgcctcatcagaacatgctgttgagtccaatgtgccataagacattttagcatgttaaatagcacttttaatagcaaaaaaaggcacatcaactgcgaagttatccttagtttgcaaatgctttttctagattaatgatttttcaatcattagggtactagacacatcagcctaaagtggcatctggaattgaatggatttactgataatgatcagtctttagtcttccctttgttatatgactttataggttatgattgatcaaatttacgttttactaatggtaagggtgagggtcatagggcaggttttgggttttctagtactgttgaaaactgcaagtattggctatttgtatacttagccataacttggtgaaaaaaaacctgagcagtgtctatgtattaatgcgttggaaagaaagctgcttgtgtttgctttgttaattgcctcaggatatttcttttaaaataagctgttttaagaggaacagaagggaaatctgctacctagtctatacacagcgtgaacctcacagggggcttctgataccctcaaacatggagaacagtaagggagcagagtggttaaggactttcaggaacttaactattctggaataaggaatgaatcaactgaccttgggccagcaggtttttaactaaattgttacttgcctttctcacccagttaatcagtctctgtacttgtttccctttttgaaacaagtgtcttggttaactaattctgttttatggttgtgctaaattcatagcaggtgccttattctttgcttttagtcaaaccattccatatcagaattttccttggtttactatagatatttggctttaagttgttgtttgtgttttttaatgtacaatgttctgataaatttgactgttaaattgctatagctagcaatcattttacatatgtaaaattgcattccctttgtatttcatgtgtaattcaccaattaagtgcagtttatattcaggttggattatgcatgtttaggtaaacgaaagctgtgtcttacttgatttattctttaaaaataaagttccctgaatatttgatgcttttcttctaaacggaaatgattttacagttatctgagtgtaccttttatagttagtagaaaatgattttaaagaatgtttagtattgtacttaaatggtatgcagaggcacagatgtaaggtttataactggaaataggtggtaagaaaaatatatagaaagcacaatgatttgaatatttttccacttaggatttcctaatctccttgtcatccaattcaagctcaagatgaagcacaattctttgatctccctttgccagttgaattttatagatcatctaatgttgagcacagtatgagaataaatattggggttgtcaacattactcagttactctttgtggtttaactctaacatttcaacaagttgtcaattaattgtatctgttgggttgtatataatgttgctcaaaataattaagtggacttccaaaaataagatttccattgtaacaggatgcattgtgatgggctttgacttacattaaagaaatgtggatagtcaactgc

SEQ ID NO: 180129 - DNA, 3934 bp, Artificial Sequence
  derived and/or modified sequence
actcaccaccatcttggtagtgtgcaagactctgggacggcatgagaaaggcagaaagggagcaaaggagctggtggggtgtcacagggcctatgtatgaggcagatgtgagttctgcatccagttttgcaatttatccatttacctgcctgagacttggaaacacctactttatagtcctgattcaagtgttggcggatggaagggaggagactcctgaccctcagaatgacctaaatgacttcacaagggcccgtgtaacaccagtattgcagacccatgtgtcacaaattcaactagcacattgtttttctcccccttcttctatttctgtagaagatgaatccgcaggcaagaatgatggatgggtgaaagggagggggaatacgaaagcccagaggcggagacttcacttccgattgccacgctatatcaagaaagccaacagtctggcctttccgcaagccacaagaaaaggcagatcagactccccggctcctcgggtagttctcaaaggcaaagacaaaaataagaaactagtctgaagaaagagagtccctcgcttcttcagaactcacctgtcaagagcggcgtggacggcgccatgttgtcccggaaagagaaaccgctcgggtgagagttcaccagggccgaacccggcccctacacgtctcctcatgcgtggagacagcgaattggtgtttccggagccatcagcctcggggccaattcacttccggttacggagtgacgcggaaaaggcgcccaaacgcgcacgcgcaaatctagggcgacgcttgacagagcttgggagggtgcgcctgctttcgccctccttctccagcgggaggggcgcgcacttccgcggggcggagtccgtctagtgctgacgttggcagccgaacccaaagtagatcgaggcggcgggctgcacattcccgttgttgcgttgcgtttccttcctctttcactccgcgctcacggcggcggccaaagcggcggcgacggcggcgcgagaacgacccggcggccagttctcttcctcctgcgcacctgccccgctcggtcagtcagtcggcggccggcgcccggcttgtgctcagacctcgcgcttgcggcgcccaggcccagcggccgtagctagcgtctggcctgagaacctcggcgctccggcggcgcgggcaccacgagccgagcctcgcagcggctccagaggaggcaggcgagtgagcgagtccgaggggtggccggggcaggtggtggcgccgcgaagatggtcgccaagcaaaggatccgtatggccaacgagaagcacagcaagaacatcacccagcgcggcaacgtcgccaagacctcgagaaatgcccccgaagagaaggcgtctgtaggaccctggttattggctctcttcatttttgttgtctgtggttctgcaattttccagattattcaaagtatcaggatgggcatgtgaagtgactgaccttaagatgtttccattctcctgtgaattttaacttgaactcattcctgatgtttgataccctggttgaaaacaattcagtaaagcatcctgcctcagaatgactttcctatcatgcttcatgtgtcattccaaggtttcttcatgagtcattccaagttttctagtccataccacagtgccttgcaaaaaacaccacatgaataaagcaataaaatttgattgttaagatacagtagtggaccctacttattcagtcaattaagagtaagtttttttatgtggttattaaaacagtatgaacaattagtctaactctgcatagacagggtctagattttgttaacccaaatgtataactgcagttagcttaaattacaatttgaagtcttgtggtttttatatagctaggcactttattactcttttgaactgaaagcacactcccttataggttcatgtaactgtcctgtaataaggtgcttataaatggaacaactacacagcctagttttgccacaacctttagcatctaaaaagttttaaaagcttctaaatgtctaatataaagggagatgcttatagccacaacatctattttaccaatattgtttccattacactaccttggattttgcatgagtgagtatagtaacccaagatgccataaaaaaaaaacttgatcgttttctgacttaatcagttactgtggtttcactaaaagctaccgtggtggagtgaagtcagtcagggaaggtttgtttatgttacatttatttcaccagaactattttaatatatcaaaggggtttactatgccaaacaaaattctagggaaaaatactgctaaaaatggatgcctcatcagaacatgctgttgagtccaatgtgccataagacattttagcatgttaaatagcacttttaatagcaaaaaaaggcacatcaactgcgaagttatccttagtttgcaaatgctttttctagattaatgatttttcaatcattagggtactagacacatcagcctaaagtggcatctggaattgaatggatttactgataatgatcagtctttagtcttccctttgttatatgactttataggttatgattgatcaaatttacgttttactaatggtaagggtgagggtcatagggcaggttttgggttttctagtactgttgaaaactgcaagtattggctatttgtatacttagccataacttggtgaaaaaaaacctgagcagtgtctatgtattaatgcgttggaaagaaagctgcttgtgtttgctttgttaattgcctcaggatatttcttttaaaataagctgttttaagaggaacagaagggaaatctgctacctagtctatacacagcgtgaacctcacagggggcttctgataccctcaaacatggagaacagtaagggagcagagtggttaaggactttcaggaacttaactattctggaataaggaatgaatcaactgaccttgggccagcaggtttttaactaaattgttacttgcctttctcacccagttaatcagtctctgtacttgtttccctttttgaaacaagtgtcttggttaactaattctgttttatggttgtgctaaattcatagcaggtgccttattctttgcttttagtcaaaccattccatatcagaattttccttggtttactatagatatttggctttaagttgttgtttgtgttttttaatgtacaatgttctgataaatttgactgttaaattgctatagctagcaatcattttacatatgtaaaattgcattccctttgtatttcatgtgtaattcaccaattaagtgcagtttatattcaggttggattatgcatgtttaggtaaacgaaagctgtgtcttacttgatttattctttaaaaataaagttccctgaatatttgatgcttttcttctaaacggaaatgattttacagttatctgagtgtaccttttatagttagtagaaaatgattttaaagaatgtttagtattgtacttaaatggtatgcagaggcacagatgtaaggtttataactggaaataggtggtaagaaaaatatatagaaagcacaatgatttgaatatttttccacttaggatttcctaatctccttgtcatccaattcaagctcaagatgaagcacaattctttgatctccctttgccagttgaattttatagatcatctaatgttgagcacagtatgagaataaatattggggttgtcaacattactcagttactctttgtggtttaactctaacatttcaacaagttgtcaattaattgtatctgttgggttgtatataatgttgctcaaaataattaagtggacttccaaaaataagatttccattgtaacaggatgcattgtgatgggctttgacttacattaaagaaatgtggatagtcaa

SEQ ID NO: 180130 - protein, 341 aa, Artificial Sequence
  derived and/or modified sequence
MAQESPKNSAAEIPVTSNGEVDDSREHSFNRDLKHSLPSGLGLSETQITSHGFDNTKEGVIEAGAFQGGQRTQTKSGPVILADEIKNPAMEKLELVRKWSLNTYKCTRQIISEKLGRGSRTVDLELEAQIDILRDNKKKYENILKLAQTLSTQLFQMVHTQRQLGDAFADLSLKSLELHEEFGYNADTQKLLAKNGETLLGAINFFIASVNTLVNKTIEDTLMTVKQYESARIEYDAYRTDLEELNLGPRDANTLPKIEQSQHLFQAHKEKYDKMRNDVSVKLKFLEENKVKVLHNQLVLFHNAIAAYFAGNQKQLEQTLKQFHIKLKTPGVDAPSWLEEQ

SEQ ID NO: 180131 - DNA, 1026 bp, Artificial Sequence
  derived and/or modified sequence
atggcccaggagagccccaagaacagcgccgccgagatccccgtgaccagcaacggcgaggtggacgacagcagagagcacagcttcaacagagacctgaagcacagcctgcccagcggcctgggcctgagcgagacccagatcaccagccacggcttcgacaacaccaaggagggcgtgatcgaggccggcgccttccagggcggccagagaacccagaccaagagcggccccgtgatcctggccgacgagatcaagaaccccgccatggagaagctggagctggtgagaaagtggagcctgaacacctacaagtgcaccagacagatcatcagcgagaagctgggcagaggcagcagaaccgtggacctggagctggaggcccagatcgacatcctgagagacaacaagaagaagtacgagaacatcctgaagctggcccagaccctgagcacccagctgttccagatggtgcacacccagagacagctgggcgacgccttcgccgacctgagcctgaagagcctggagctgcacgaggagttcggctacaacgccgacacccagaagctgctggccaagaacggcgagaccctgctgggcgccatcaacttcttcatcgccagcgtgaacaccctggtgaacaagaccatcgaggacaccctgatgaccgtgaagcagtacgagagcgccagaatcgagtacgacgcctacagaaccgacctggaggagctgaacctgggccccagagacgccaacaccctgcccaagatcgagcagagccagcacctgttccaggcccacaaggagaagtacgacaagatgagaaacgacgtgagcgtgaagctgaagttcctggaggagaacaaggtgaaggtgctgcacaaccagctggtgctgttccacaacgccatcgccgcctacttcgccggcaaccagaagcagctggagcagaccctgaagcagttccacatcaagctgaagacccccggcgtggacgcccccagctggctggaggagcagtag

SEQ ID NO: 180132 - DNA, 1302 bp, Artificial Sequence
  derived and/or modified sequence
ctggttctggaggctgggttgagaggtcgccggtccgactgtcctcggcggttggtcagtgtgaatttgtgacagctgcagttgctccccgcccccgagcagccgaggtgcgtgggggaaggggaagaaggaaaaggtccgggtcgcgtttccgctcagtttttgccagggttgaggcgattccagagagcggcggaaaggataagcctcgacttagaagctaccgagttaccctaagaaaggagtctaccatggctcaagaatctcccaaaaattcagcagcagaaattccagtgactagtaatggagaagttgatgactctcgtgaacatagctttaatagggatttgaagcattcattaccatctggacttggtctctcagaaacccaaattacatctcatggctttgacaataccaaagagggtgttattgaagcaggagcatttcaaggtggccagagaacacagacaaaaagtggaccagttattctagcagatgaaattaaaaatcctgcaatggaaaagttagaacttgttagaaaatggagtctaaacacctataagtgtactcgacagattatctctgagaagctaggccgtggctcaagaactgtggaccttgaacttgaagctcagattgatatattaagggataacaagaaaaaatatgaaaatattttaaaactggctcaaacattgtcgacccagcttttccagatggtacatacccaaaggcaacttggagatgcatttgctgacctgagtttgaagtcactagaacttcatgaagaatttggctataatgccgatacccagaaactgctggctaaaaatggagagactcttcttggggccattaattttttcattgctagtgtgaacactttggtgaataaaaccattgaagatacattaatgactgtgaaacagtatgaaagtgccaggattgaatatgatgcatatcgcactgatttggaagaactgaatcttggaccacgtgacgcaaacactctgccaaagattgagcagtcacagcatctcttccaagcacataaggaaaaatatgataaaatgcgcaatgatgtttctgtcaaattgaaatttctagaagaaaataaggttaaagtattgcacaatcagctggtccttttccacaatgccattgccgcttactttgctgggaatcagaagcagcttgaacagacacttaaacagttccatatcaaattgaaaacccctggagtggatgccccatcttggcttgaagaacagtaaaatcacagcggaaaataaaaagaaa

SEQ ID NO: 180133 - DNA, 1026 bp, Artificial Sequence
  derived and/or modified sequence
atggcacaggagtcccctaagaatagtgccgcagaaatcccagtcacaagcaacggtgaagtggatgattcccgcgaacactcatttaacagggacttaaaacactctctgcctagcggtcttggcttgagcgaaacccaaatcacatcgcatggattcgataataccaaggagggagtcattgaggctggcgcttttcaggggggccagaggacccagacgaagtcaggccctgtaatcctcgcagacgaaatcaaaaatccggctatggagaagctggagctagtgagaaagtggagcttaaatacctataagtgcacaagacagattattagcgagaaactcggccgaggatctaggacagtcgacctagagttggaagcccagattgatatcctccgtgacaataagaagaagtacgaaaatattctgaaactcgctcagaccttaagcacgcaactgtttcagatggtgcatacacagaggcagctcggggacgccttcgctgatctgtcactcaaatctctagagctgcacgaggagtttgggtacaacgccgatactcagaagcttttagccaagaacggggaaacactgctcggcgcgattaacttttttatcgcttctgtgaacactctggttaacaagaccatcgaggacaccctcatgacagtcaagcagtacgaatccgcaaggatcgaatatgacgcttatcgaacagaccttgaggaacttaacctgggccccagagatgcgaacaccctacctaagatcgagcagtcccagcacctgttccaggcacacaaggagaagtacgacaagatgaggaacgatgtttcagttaagcttaaattcctggaggaaaacaaagtaaaagtgctgcacaatcagctggtgctgttccataatgctatcgccgcttacttcgccggcaaccagaaacagctggagcagacactcaagcaattccatatcaagctgaagacccctggagtcgacgccccttcttggttggaagaacagtag

SEQ ID NO: 180134 - DNA, 1026 bp, Artificial Sequence
  derived and/or modified sequence
atggcacaggagagtcccaagaattctgccgcagaaatcccagtgacaagtaacggcgaggtggacgattcacgggaacattccttcaatcgcgacctcaagcacagcctgcctagcgggctgggtctgtcggaaacccagatcacgtcccacggattcgacaacaccaaagaaggcgttattgaagccggggccttccagggcggtcaacggacgcagaccaagtccgggcctgtgatcttagctgatgagattaagaaccctgccatggagaaactggaactggtgcgaaaatggtcattaaacacctataaatgcacacggcaaattatttcagaaaagctgggccgtggctctaggaccgtggacctggaactcgaagcgcaaatcgatatcctgcgcgacaacaagaagaaatacgagaacattcttaaattagcacagacactgtctacacagctgttccagatggtgcacactcaacggcagctgggggatgcatttgccgatctgtctctcaagtctttggagctgcatgaggagttcggttacaatgcagacactcagaagttgctggcgaaaaacggcgagacacttctgggggcgatcaacttttttatagctagcgtgaataccctggtaaacaagactatcgaggatacactgatgaccgtcaagcagtatgaatcagcgcgcattgagtacgatgcatacaggactgatctagaggaattgaacctcggccctagagatgccaatactcttcctaagattgagcagtctcagcacctttttcaggcccacaaggaaaagtacgataagatgagaaatgacgtgtccgtgaagctgaaattcttagaagaaaacaaggtgaaggtgttgcacaatcagctggtccttttccacaatgccattgcggcgtattttgcgggcaatcagaaacagttggagcagaccctgaagcagttccacataaaactaaaaacgccaggcgtagacgccccgtcatggctcgaggagcagtag

SEQ ID NO: 180135 - DNA, 1026 bp, Artificial Sequence
  derived and/or modified sequence
atggcccaggagagccccaagaacagcgctgctgagatccctgtgaccagcaatggagaggtggatgacagccgggagcacagcttcaacagagacctgaagcacagcctgcccagcggcctgggcctgtctgagacccagatcaccagccacggctttgacaacaccaaggagggcgtgattgaagctggggccttccagggcggccagaggacccagaccaagagcggccctgtgatcctggctgatgagatcaagaacccagccatggagaagctggagctggtgaggaagtggagcctgaacacctacaagtgcacccggcagatcatcagcgagaagctgggccggggcagcaggacagtggacctggagctggaggcccagattgacatcctgcgggacaacaagaagaagtatgagaacatcctgaagctggcccagaccctgagcacccagctgttccagatggtgcacacccagaggcagctgggagatgcctttgctgacctgagcctgaagagcctggagctgcacgaggagtttggctacaatgctgacacccagaagctgctggccaagaatggagagaccctgctgggcgccatcaacttcttcatcgcctctgtgaacaccctggtgaacaagaccatcgaggacaccctgatgacagtgaagcagtatgagagcgccagaattgaatatgatgcctacagaacagacctggaggagctgaacctgggccccagagatgccaacaccctgcccaagattgagcagagccagcacctgttccaggcccacaaggagaagtatgacaagatgagaaatgatgtgtctgtgaagctgaagttcctggaggagaacaaggtgaaggtgctgcacaaccagctggtgctcttccacaatgccatcgccgcctactttgctggcaaccagaagcagctggagcagaccctgaagcagttccacatcaagctgaagaccccaggagtggatgcccccagctggctggaggagcagtag

SEQ ID NO: 180136 - DNA, 1026 bp, Artificial Sequence
  derived and/or modified sequence
atggcccaggagagccccaagaacagcgccgccgagatccccgtgacaagcaatggagaggttgatgattcaagggaacattcttttaaccgcgatctcaaacatagtctcccgtccgggctgggattatctgagactcaaataacttcccatggattcgataatacaaaggagggggtcatcgaggccggagcctttcagggcgggcagaggacccagacgaaatccggtcccgtgattcttgcggacgagattaaaaatccggccatggagaaactggagctggttagaaaatggtctcttaacacctataaatgcacgagacagataatttcggagaaattaggcaggggatccagaaccgtagatcttgaactggaagcccagatcgatatcctgcgcgacaataagaaaaagtacgaaaatatcctgaaattggcccagacgctatccacacaactgtttcagatggtacatacccaaaggcaactgggagacgctttcgccgatcttagtttaaaatccctagaactccacgaggaatttggatataacgccgacacgcagaaactgctcgccaaaaatggcgaaactctcttaggtgcaatcaatttcttcattgccagcgttaatacacttgtaaacaaaaccatagaagatacactgatgaccgttaaacagtacgagtcagctcgcattgagtacgacgcctatcgcactgatctcgaggaactcaacctcggtcccagagacgcaaatacgttgccaaaaatagagcagagccagcatctgttccaagcacacaaggaaaagtacgataaaatgcgaaacgatgtgagcgtcaaactcaaattcctcgaggagaacaaagtgaaggtccttcacaaccagctggtcttatttcacaatgccatcgccgcctattttgctggcaaccagaagcagctggagcagactctgaagcagttccatattaaactcaagactccaggagtggatgctccatcctggctcgaagagcagtag

SEQ ID NO: 180137 - DNA, 1026 bp, Artificial Sequence
  derived and/or modified sequence
atggcccaggagagccccaagaacagcgccgccgagatccccgtgacaagcaatggcgaagtggatgatagtagagaacactcatttaatcgagacctcaagcattccctgccctcagggcttggcctttctgaaacacagattacctcccacgggttcgacaataccaaagaaggagtcatcgaggccggggccttccaggggggccagagaactcagaccaagtccgggcccgtcatcctcgctgacgaaattaagaacccagccatggaaaaattggagttggtgcggaagtggtctcttaacacctacaagtgcacgagacagattatcagcgaaaagctaggcagaggatcaaggaccgtggaccttgaattggaggcacagattgacatcttgcgagacaacaagaagaagtatgaaaacattcttaagcttgcccagacactttctacccaactttttcagatggtccacacacagcgtcagctgggtgacgcctttgccgacctgagtttaaagagtcttgagctgcatgaggagtttgggtataacgctgacacccagaaacttcttgctaaaaacggtgagactctgttgggcgcaatcaattttttcattgcatccgttaacacactggtgaataagaccatcgaggatacattgatgaccgtcaagcagtatgagtctgcacgtattgagtacgatgcatacaggaccgatctggaggagctgaatcttgggccaagggacgcaaacaccctgccaaagatcgaacagagccagcacctatttcaggcccacaaggaaaagtacgacaaaatgcgcaatgacgtctctgtgaaactgaagttccttgaggagaacaaggtcaaagtgctacataaccagcttgtcttatttcataacgccattgctgcttatttcgctggaaaccagaagcagttggagcagacactaaagcagtttcatattaagctgaagacccctggggtcgacgcaccgtcatggctcgaagaacagtag

SEQ ID NO: 180138 - DNA, 1601 bp, Artificial Sequence
  derived and/or modified sequence
cgctgctcttggttctggttctggaggctgggttgagaggtcgccggtccgactgtcctcggcggttggtcagtgtgaatttgtgacagctgcagttgctccccgcccccgagcagccgaggagtctaccatggctcaagaatctcccaaaaattcagcagcagaaattccagtgactagtaatggagaagttgatgactctcgtgaacatagctttaatagggatttgaagcattcattaccatctggacttggtctctcagaaacccaaattacatctcatggctttgacaataccaaagagggtgttattgaagcaggagcatttcaaggtggccagagaacacagacaaaaagtggaccagttattctagcagatgaaattaaaaatcctgcaatggaaaagttagaacttgttagaaaatggagtctaaacacctataagtgtactcgacagattatctctgagaagctaggccgtggctcaagaactgtggaccttgaacttgaagctcagattgatatattaagggataacaagaaaaaatatgaaaatattttaaaactggctcaaacattgtcgacccagcttttccagatggtacatacccaaaggcaacttggagatgcatttgctgacctgagtttgaagtcactagaacttcatgaagaatttggctataatgccgatacccagaaactgctggctaaaaatggagagactcttcttggggccattaattttttcattgctagtgtgaacactttggtgaataaaaccattgaagatacattaatgactgtgaaacagtatgaaagtgccaggattgaatatgatgcatatcgcactgatttggaagaactgaatcttggaccacgtgacgcaaacactctgccaaagattgagcagtcacagcatctcttccaagcacataaggaaaaatatgataaaatgcgcaatgatgtttctgtcaaattgaaatttctagaagaaaataaggttaaagtattgcacaatcagctggtccttttccacaatgccattgccgcttactttgctgggaatcagaagcagcttgaacagacacttaaacagttccatatcaaattgaaaacccctggagtggatgccccatcttggcttgaagaacagtaaaatcacagcggaaaataaaaagaaagtcgcgttgttatatttctaaaccaacctaacaagaattaagcagagttgggggaagtgggaggggtgacaagcattatagtgattcttgcacaaacagctttaatttttccctttttcatactttaacaattgaactgttaagggtggttttaatgtaaacatagtttctataatctgaacacaataattttcctttttgagaaatccttttgtattgtgagggttgatggctatttctgtagtttgaaaacatctaatagagatttgcactgacaagataaaaattcaaggtttttggtcctggaaatgagggccgattgtaacttttccaaagggaggtttacatgatttgtatcaacatcagatattttatatgtgaatatattaaacatctttaagagattcattttcatgtatt

SEQ ID NO: 180139 - DNA, 1026 bp, Artificial Sequence
  derived and/or modified sequence
atggcacaggagtcccctaagaattctgccgcagaaattcctgtcaccagcaacggagaggtggacgattctagggaacactcctttaaccgagacctgaagcactctctcccgagcgggctcgggttatctgagacccaaatcacttcccatggctttgacaacactaaggagggggtgatcgaggcaggagccttccaaggaggtcagagaacacaaacaaagagcggacctgttatcttggcagatgagatcaaaaatcccgcaatggaaaaactggagctcgtgagaaaatggtctctgaatacttacaagtgtacacgtcagattatctcagaaaagctcgggcgaggctctcggaccgtcgatctcgagttggaggctcagattgacattctgcgtgacaacaaaaaaaagtacgaaaatattctgaagctggcccaaacccttagcacgcagttgtttcagatggtgcacacccaacgacagttgggcgatgcttttgctgacctcagcttaaagtccctggaactgcacgaggagtttggctacaatgcggacactcaaaagctcttggcaaagaacggcgagaccttactgggtgctattaacttctttatagcttcagtcaatacgctggtcaataagacaatcgaggacactttgatgacagttaaacagtacgagtctgcacgcatcgagtacgatgcataccggacggacctggaagagttgaacttaggacctagggacgctaacacattgcccaaaatagagcaaagccagcatctctttcaggcccataaagagaagtatgataagatgcgaaatgacgtgtccgtcaagctaaaatttcttgaggaaaacaaggtgaaagtacttcataatcagctcgtgttatttcacaacgccattgcagcgtactttgctggaaatcagaagcaattggaacagactctgaagcagttccacattaaactgaaaacacccggtgttgacgctccaagttggctcgaggaacagtag

SEQ ID NO: 180140 - DNA, 1026 bp, Artificial Sequence
  derived and/or modified sequence
atggcccaggaatcccccaagaacagcgcagccgagattcccgtcactagcaacggtgaagtagacgattccagagagcacagtttcaatagggatttaaagcacagtcttcccagtggattgggtctctcagaaacacaaattaccagccacggatttgacaacacgaaagaaggagttatcgaggccggagcctttcagggcggacaaagaacgcagaccaagagcggacccgtaatactagccgatgaaatcaagaacccagcaatggaaaagcttgaactggtacgtaagtggtctttaaacacctacaaatgcacacgccagatcatttccgaaaagttgggcaggggctctagaactgttgatctagaactcgaagctcagatagatatcctgcgagacaacaagaaaaaatacgaaaatatattgaaactggcacagacgctgtcaacgcaactgtttcagatggtgcacacacaaaggcagttaggagacgcctttgccgatctgtcacttaaaagcttagaactgcatgaagaattcgggtacaacgccgacacacagaagttgcttgccaagaacggagaaaccctactcggggcaatcaatttcttcatcgcaagcgtcaatacactggttaataaaaccatcgaggacactcttatgacggtgaaacagtatgagtctgcacgcattgaatacgacgcatatagaacggacctggaggaactgaatttgggacccagggacgctaataccttgcctaagattgagcagtcccaacatctgtttcaggcccataaggagaaatacgacaaaatgagaaatgatgtgtccgttaagttaaagttccttgaagagaataaggtcaaagtcctgcataaccaactcgttctgttccacaatgcaatcgcagcatactttgcgggtaatcaaaagcaactggagcagacgctgaagcaattccatatcaagttgaaaacacccggagttgatgcccctagctggttagaagaacagtag

SEQ ID NO: 180141 - DNA, 915 bp, Artificial Sequence
  derived and/or modified sequence
atgctgagcaccggcgtggtgagcttcttcagcctgaagagcgacagcgcccccccctggatggtgctggccgtgctgtggtgcagcatggcccagaccctgctgctgcccagcttcatctggagctgcgagagatacagagccgacgtgagaaccgtgtgggagcagtgcgtggccatcatgagcgaggaggacggcgacgacgacggcggctgcgacgactacgccgagggcagagtgtgcaaggtgagattcgacgccaacggcgccaccggccccggcagcagagaccccgcccaggtgaagctgctgcccggcagacacatgctgttcccccccctggagagagtgcactacctgcaggtgcccctgagcagaagactgagccacgacgagaccaacatcttcagcacccccagagagcccggcagcttcctgcacaagtggagcagcagcgacgacatcagagtgctgcccgcccagagcagagccctgggcggcccccccgagtacctgggccagagacacagactggaggacgaggaggacgaggaggaggccgagggcggcggcctggccagcctgagacagttcctggagagcggcgtgctgggcagcggcggcggcccccccagaggccccggcttcttcagagaggagatcaccaccttcatcgacgagacccccctgcccagccccaccgccagccccggccacagccccagaagacccagacccctgggcctgagccccagaagactgagcctgggcagccccgagagcagagccgtgggcctgcccctgggcctgagcgccggcagaagatgcagcctgaccggcggcgaggagagcgccagagcctggggcggcagctggggccccggcaaccccatcttcccccagctgaccctgtag

SEQ ID NO: 180142 - DNA, 1610 bp, Artificial Sequence
  derived and/or modified sequence
cagagaccgagtgagccgtgggctgagcctgggaggccgggactgagggggaggagggaggcccgggggaagggagggagggagagagggaaggagggaggagggcgggcgagctggagccggcaggcagcgggagcccgagagagccgcgtcgggagtgcggtctccatggcagtgctgggcgcagccggagagagcctgtccagggggctgagccccacccccaaatccctggggcatccagaagattcctgactggtcaagaaccagaggcaaaagagacctggaagtcccagcatggggaccagaaccccccagccagcctcatagttgggaaagtagccagcttgcctgccccatcaattgcagggatgcttaaggaaggccccgcccagtatgaaagctgaggattgcctctgctgaccctcagtctcctcccctgccctctacatctgccctcagctgggtccatcatgcaatgctgagcactggggtggtgagcttcttctccctcaagtcggactcggcgcccccctggatggtgctggctgtgctgtggtgctccatggcacagacgctgctgctgccctccttcatctggtcctgcgagcgctaccgcgccgacgtgcgcacagtgtgggagcaatgcgtggccatcatgtctgaggaggatggagatgacgatgggggctgtgacgactatgcagagggccgagtttgcaaagttcgctttgatgctaacggagccacaggaccagggagccgggaccccgcccaggtgaagctgctgcctggaaggcacatgctcttccctcctcttgagagagtccactacttacaggtccccctatcccggcgtctgtcccatgatgagacaaacatcttctctacccctcgggaaccaggctccttcctgcacaagtggtcatcctctgatgacatccgggtcctcccagcccagagccgggccctcgggggtcctcctgagtacctgggacaaagacacaggttggaggacgaggaggacgaggaagaggctgaaggtggggggctggccagccttcgccaattcttggagagtggggttctggggtcaggtgggggacccccacggggtcctggcttcttccgggaggagatcaccaccttcatcgatgagacacctctgccttctccgactgcctcaccagggcactctcctcgtcggccccggccactgggcctctcaccccgccgactctcccttgggtcccctgagagcagagccgttggacttcctttgggactaagcgcagggagacgctgctccctgacggggggtgaagaaagtgcaagggcttggggaggatcctggggcccaggcaaccccatctttccccagctgaccctgtgagcccaagcaggcctgctgaactcagaggagaaagcctgagtgagtaacacctcattctggccgagagtagggcagctgcctccagactctggggagacgggcgctagatttggggctcagaaggccctgctctctcccatccaagtgaccagatgccctactcagcttccatcacccctagcaatatgtattaaagtctgaagtgttgccatggaaa

SEQ ID NO: 180143 - DNA, 915 bp, Artificial Sequence
  derived and/or modified sequence
atgcttagcaccggcgtggtgagtttcttttcattgaagtctgatagcgctccaccgtggatggtgctggccgtgttgtggtgctctatggcgcagactctcctgctgccctcctttatctggagctgtgaaaggtatagagcggacgtgcgcaccgtatgggagcaatgtgttgcaataatgtccgaggaagatggcgacgatgatgggggatgcgacgactatgcagaagggagggtctgcaaagtgcgctttgacgccaacggtgcaaccggacctgggagcagggatccagctcaagtaaagctgctgccaggccgtcatatgttgttcccccccctcgagcgggtacactatctccaggtgcccctgtctcggaggcttagccacgatgagactaacatattctccacccctcgggagccaggtagttttctgcataaatggtcttcttcagacgacattagggttctgccagctcagtcccgggccctggggggaccaccggaatacctggggcaacgccaccggctagaggatgaagaggacgaagaagaggccgaaggtggtggccttgctagcctgagacagtttctggagagcggagtgctgggcagcggcggcggccccccacgcggccctgggtttttcagagaggaaattaccaccttcattgatgagacccccctgccgagccctaccgcctccccagggcactcaccccgaagaccgcgaccactaggcttatcaccccgtagactgtctctcgggtctcctgagtctagagctgtcggcctgcccttgggcctgagtgcaggaaggcgttgcagcctgactgggggcgaagaatcggcacgggcctggggagggagctggggaccaggaaatcccatttttccccagctgactctctag

SEQ ID NO: 180144 - DNA, 915 bp, Artificial Sequence
  derived and/or modified sequence
atgctgagcactggagtggtgtccttcttcagcctgaagagtgacagcgccccaccctggatggtgctggccgtgctgtggtgcagcatggcccagaccctgctgctgcccagcttcatctggagctgtgagcgctacagagcagatgtgaggacagtgtgggagcagtgtgtggccatcatgtctgaggaggatggagatgatgatggcggctgtgatgattatgcagagggccgggtgtgcaaggtgcgctttgatgccaacggggccactggacctggcagccgggaccctgcccaggtgaagctgctgcccggccgccacatgctgttcccccccctggagcgggtgcactacctgcaggtgcccctgagccggcggctgagccatgatgagaccaacatcttcagcaccccccgggagcccggcagcttcctgcacaagtggagcagcagtgatgacatccgggtgctgcctgcccagagccgggccctgggcggccccccagagtacctgggccagaggcaccggctggaggatgaggaggatgaggaggaggccgagggcggcggcctggccagcctgcggcagttcctggagagcggcgtgctgggcagcggcggcggccccccccggggccctggcttcttccgggaggagatcaccaccttcattgatgagacccccctgcccagccccacagccagccctggccacagcccccggcggccccggcccctgggcctgagcccccggcggctgagcctgggcagccctgagagcagagctgtgggcctgcccctgggcctgtctgctggccgccgctgcagcctgactggaggagaggagagcgcccgggcctggggcggctcctggggccctggcaaccccatcttcccccagctgaccctgtag

SEQ ID NO: 180145 - DNA, 915 bp, Artificial Sequence
  derived and/or modified sequence
atgctgagcaccggcgtggtgagcttcttcagcctgaagagcgactccgcacccccttggatggttctggccgtgttgtggtgttccatggcccagacgctcctgctcccatccttcatctggagctgcgagagataccgggctgatgttcgaaccgtttgggagcagtgtgtggccatcatgtccgaagaggatggcgacgacgacggcggatgcgatgactacgcagagggtcgggtatgtaaagtgcggtttgacgcaaacggggcaaccggccctggttcccgggatcctgcccaggtgaaactgcttccgggacgacacatgctgtttccaccgctggaaagggtgcactatctgcaagttccactgtccaggcggttatcccatgacgaaacgaacatattttctactccccgcgaaccgggcagcttcctgcacaagtggtcttcctctgacgacatacgcgtgttgcctgcccagtctagggcgttgggcggacctcccgaatatctcggccaacgccacaggctggaagatgaagaagacgaagaggaagccgaggggggaggactggctagtctcagacaattcctggagagcggagtgctgggtagtggcggtggaccccctagagggcccggattctttcgtgaagagatcaccacctttatcgatgaaacaccactaccttctcccacagcatcccctggccattcaccacggagaccaagaccacttggactgagcccaaggcggctgagtctggggagccctgaatccagggcagttggtttgcccctggggctgagcgccgggagacggtgctcgctcacaggaggcgaagagtcagcccgggcctggggtggttcttgggggccggggaaccctatctttccgcagctgacactttag

SEQ ID NO: 180146 - DNA, 915 bp, Artificial Sequence
  derived and/or modified sequence
atgctgagtaccggtgtggttagcttctttagccttaaatcagacagcgctcccccatggatggtcctggctgtcttgtggtgttctatggcccagaccctgctgctcccatcattcatctggtcatgcgaaaggtacagagccgacgttcgcaccgtttgggagcagtgtgtggcgattatgtccgaggaggatggggatgacgatggcggatgtgacgactatgccgagggccgtgtttgcaaggtgcgcttcgacgcaaacggggctacagggccaggttccagagaccccgcacaggtcaagctgctccccggtcgacatatgctgtttcctccattagaaagggtccactatctgcaggtgccactatctaggcggctctctcatgatgaaaccaacatattcagcacccccagagagccaggctcttttctgcacaaatggtcttctagtgatgatatacgggttcttccagcccagtctagggcgcttgggggacctcccgaatacctcggacagcgtcaccgcctcgaagatgaggaagacgaggaggaagccgagggagggggactggcaagcctgcggcagttcctcgaatccggcgtcctagggagcgggggaggaccccctcgagggccaggttttttcagggaggaaattacaacctttatcgacgagacaccgctccccagtcccactgcctctcccggacattctccccgtcggcctagaccgctgggactgtccccaagacgactctccctcgggagtcctgaatcccgagcggtcggccttccactgggtctgtccgccggtcggcgatgtagcctgaccgggggtgaagaatccgctcgcgcttggggcggaagttgggggcctgggaatccaatttttccacagctgacactttag

SEQ ID NO: 180147 - protein, 196 aa, Artificial Sequence
  derived and/or modified sequence
MNQADPRLRAVCLWTLTSAAMSRGDNCTDLLALGIPSITQAWGLWVLLGAVTLLFLISLAAHLSQWTRGRSRSHPGQGRSGESVEEVPLYGNLHYLQTGRLSQDPEPDQQDPTLGGPARAAEEVMCYTSLQLRPPQGRIPGPGTPVKYSEVVLDSEPKSQASGPEPELYASVCAQTRRARASFPDQAYANSQPAAS

SEQ ID NO: 180148 - DNA, 591 bp, Artificial Sequence
  derived and/or modified sequence
atgaaccaggccgaccccagactgagagccgtgtgcctgtggaccctgaccagcgccgccatgagcagaggcgacaactgcaccgacctgctggccctgggcatccccagcatcacccaggcctggggcctgtgggtgctgctgggcgccgtgaccctgctgttcctgatcagcctggccgcccacctgagccagtggaccagaggcagaagcagaagccaccccggccagggcagaagcggcgagagcgtggaggaggtgcccctgtacggcaacctgcactacctgcagaccggcagactgagccaggaccccgagcccgaccagcaggaccccaccctgggcggccccgccagagccgccgaggaggtgatgtgctacaccagcctgcagctgagacccccccagggcagaatccccggccccggcacccccgtgaagtacagcgaggtggtgctggacagcgagcccaagagccaggccagcggccccgagcccgagctgtacgccagcgtgtgcgcccagaccagaagagccagagccagcttccccgaccaggcctacgccaacagccagcccgccgccagctag

SEQ ID NO: 180149 - DNA, 591 bp, Artificial Sequence
  derived and/or modified sequence
atgaatcaggctgatcctcgactccgcgcagtgtgtctttggacacttacttctgcagcaatgagcagaggcgataactgcactgatctccttgcacttgggatacccagcatcacacaggcttgggggctgtgggtactacttggtgctgtcacgctcctattcctgatctctctcgctgcccatctgtctcagtggactcgggggcggagccgaagtcaccctggccagggcaggtccggggaaagtgtggaagaggtccctctctacggcaacctgcactatttgcagaccggcaggcttagtcaggatccagagccagatcagcaggatccaacattgggtggtcccgctcgcgccgccgaagaagtgatgtgttataccagtctgcagctgcggccaccccagggtagaattcctggtcctgggacaccagtcaaatattcggaggttgttctggattctgagccgaaaagccaagccagtggtcccgagcctgaactctacgcatccgtgtgtgctcagacacggcgcgcacgggccagcttcccagatcaggcatacgccaatagccagccagcagcaagttag

SEQ ID NO: 180150 - DNA, 591 bp, Artificial Sequence
  derived and/or modified sequence
atgaaccaggccgacccccggctgcgggctgtgtgcctgtggaccctgaccagcgctgccatgagcagaggagacaactgcacagacctgctggccctgggcatccccagcatcacccaggcctggggcctgtgggtgctgctgggcgctgtgaccctgctcttcctgatcagcctggccgcccacctgagccagtggacccggggccgcagccgcagccaccctggccagggccgcagcggggagagcgtggaggaggtgcccctgtatggcaacctgcactacctgcagacaggccgcctgagccaggaccctgagccagaccagcaggaccccaccctgggcggccctgcccgggctgctgaggaggtgatgtgctacaccagcctgcagctgcggcccccccagggccgcatccctggccctggcacccctgtgaagtacagcgaggtggtgctggacagcgagcccaagagccaggccagcggccctgagcctgagctgtatgcctctgtgtgtgcccagacccggcgggcccgggccagcttcccagaccaggcctatgccaacagccagcctgctgccagctag

SEQ ID NO: 180151 - DNA, 591 bp, Artificial Sequence
  derived and/or modified sequence
atgaaccaggccgacccccggctgcgggccgtgtgcctgtggaccctgaccagtgctgcaatgtctcggggcgataactgcaccgatctccttgcactgggtatcccttctattacacaggcatggggactgtgggtactccttggcgccgtgacactccttttcctgatctccctagcagcccatcttagtcaatggacccgtggacgctcacgctcccatccgggccagggtaggtcaggtgaatccgtcgaggaagttccactgtatggcaatttgcattacctccagactgggcgcctgagtcaagatccggagcctgatcaacaggatccgactttaggaggtcccgcccgggcagccgaggaagtgatgtgttatacctccctccagctgcgaccccctcagggccggatccctggacccgggacccctgtcaagtacagcgaggtggtgctcgactccgagcccaaatctcaagctagtgggccagagcctgaactgtacgcatcggtctgtgcacagactaggcgtgcacgagcttcatttcccgatcaggcctatgcgaattcccagccagccgcctcgtag

SEQ ID NO: 180152 - DNA, 591 bp, Artificial Sequence
  derived and/or modified sequence
atgaaccaagcagaccctagactgagagctgtctgcttatggacactgacttctgccgcaatgagccggggtgacaattgcacagatctactggcactcggtattcctagcataacacaagcctggggtctgtgggtgttgctgggagccgtgaccctcctattcctgatatctttagcggctcacctcagtcaatggactagaggtagatctaggtcccacccaggccaaggacgatccggggagagtgtggaggaagtgcctttatatggaaatctgcactacctacagactggcagactctcccaagatcctgagccggatcagcaggacccaacactgggtggtcccgcaagggccgcagaggaggtgatgtgctatacttcccttcagctgagaccccctcaggggaggatcccagggcctggcactccagtgaaatatagtgaggtcgtgctcgacagtgagcccaaatcacaggccagtggccctgaacccgagctgtacgcatctgtctgtgcccagactcgtcgagcgagggccagctttccagatcaagcttatgccaactctcaaccagctgcctcctag

SEQ ID NO: 180153 - DNA, 1231 bp, Artificial Sequence
  derived and/or modified sequence
gccaccaccagtattggggatgctgagctgcggggtacgggcctgaggagggatgggagtaagaagtgctgtggaaaccgtcaggccatgaaccaggctgaccctcggctcagagcagtgtgcttgtggactctcacatctgcagccatgagcagaggcgacaactgcacggatctactcgcactgggaatcccctccataacccaggcctggggactgtgggtcctcttaggggctgtgacgctgctatttctcatctcgctggctgcacacttgtcccagtggaccaggggccggagcaggagccatccggggcagggacgctctggagagtctgtggaagaggtcccgctgtatgggaacctgcattatctacagacaggacggctgtctcaagacccagagccagaccagcaggatccaactcttggaggccctgccagggctgcagaggaggtgatgtgctataccagcctgcagctgcggcctcctcagggtcggatccccggtcctggaacccccgtcaagtactcggaggtggtgctggactctgagccaaagtcccaggcctcgggccccgagccggagctctatgcctcagtatgtgcccagacccgcagggcccgggcctccttcccggatcaggcctatgccaacagccagcctgcagccagctgagatggagggcctggcacagcggggcgtgcactgccccagccccccgtagcaggggcatgactgtttcccaaccagcacccaaagacgggcgccattgccaagtcacaggatgtgatctaccccggacttcctatctgagcttcaagggagacatctcagggcaaagctttcgtgatggaggaggcaaagacagtagccccctccttatttcttttttctatctgttcctcttagcccccaaactcccaggttctcacttccttcttctggagtttaaccagatcctccccacccccgctccctcatagtctacccccacgcctcagtgtctcctcaggcacaggaagtgggcggtgggggaggggtaagggcctgacagtgggtgggtgggtatattcctcaggagtccacagactggagtggacctggaacttagagacgggagggacccgagcctggcttttgacctaagaaccctagcaggagaatacagtctccatcctgctgtctctgtcctgtccccaagttttcaaataaaactttccaaaaagtg

SEQ ID NO: 180154 - protein, 847 aa, Artificial Sequence
  derived and/or modified sequence
MSLFKARDWWSTILGDKEEFDQGCLCLANVDNSGNGQDKIIVGSFMGYLRIFSPHPAKTGDGAQAEDLLLEVDLRDPVLQVEVGKFVSGTEMLHLAVLHSRKLCVYSVSGTLGNVEHGNQCQMKLMYEHNLQRTACNMTYGSFGGVKGRDLICIQSMDGMLMVFEQESYAFGRFLPGFLLPGPLAYSSRTDSFLTVSSCQQVESYKYQVLAFATDADKRQETEQQKLGSGKRLVVDWTLNIGEQALDICIVSFNQSASSVFVLGERNFFCLKDNGQIRFMKKLDWSPSCFLPYCSVSEGTINTLIGNHNNMLHIYQDVTLKWATQLPHIPVAVRVGCLHDLKGVIVTLSDDGHLQCSYLGTDPSLFQAPNVQSRELNYDELDVEMKELQKIIKDVNKSQGVWPMTEREDDLNVSVVVSPNFDSVSQATDVEVGTDLVPSVTVKVTLQNRVILQKAKLSVYVQPPLELTCDQFTFEFMSIPRVIQCKFRLPLKLICLPGQPSKTASHKITIDTNKSPVSLLSLFPGFASQSDDDQVNVMGFHFLGGARITVLASKTSQRYRIQSEQFEDLWLITNELILRLQEYFEKQGVKDFACSFSGSIPLQEYFELIDHHFELRINGEKLEELLSERAVQFRAIQRRLLARFKDKTPAPLQHLDTLLDGTYKQVIALADAVEENQGNLFQSFTRLKSATHLVILLIALWQKLSADQVAILEAAFLPLQEDTQELGWEETVDAAISHLLKTCLSKSSKEQALNLNSQLNIPKDTSQLKKHITLLCDRLSKGGRLCLSTDAAAPQTMVMPGGCTTIPESDLEERSVEQDSTELFTNHRHLTAETPRPEVSPLQGVSE

SEQ ID NO: 180155 - protein, 481 aa, Artificial Sequence
  derived and/or modified sequence
MSLFKARDWWSTILGDKEEFDQGCLCLANVDNSGNGQDKIIVGSFMGYLRIFSPHPAKTGDGAQAEDLLLEVDLRDPVLQVEVGKFVSGTEMLHLAVLHSRKLCVYSVSGTLGNVEHGNQCQMKLMYEHNLQRTACNMTYGSFGGVKGRDLICIQSMDGMLMVFEQESYAFGRFLPGFLLPGPLAYSSRTDSFLTVSSCQQVESYKYQVLAFATDADKRQETEQQKLGSGKRLVVDWTLNIGEQALDICIVSFNQSASSVFVLGERNFFCLKDNGQIRFMKKLDWSPSCFLPYCSVSEGTINTLIGNHNNMLHIYQDVTLKWATQLPHIPVAVRVGCLHDLKGVIVTLSDDGHLQCSYLGTDPSLFQAPNVQSRELNYDELDVEMKELQKIIKDVNKSQGVWPMTEREDDLNVSVVVSPNFDSVSQATDVEVGTDLVPSVTVKVTLQNRVILQKAKLSVYVQPPLELTCDQFTFEFMNFPS

SEQ ID NO: 180156 - DNA, 2544 bp, Artificial Sequence
  derived and/or modified sequence
atgtccttattcaaggcccgcgattggtggtcaacaattctcggcgataaagaagaattcgatcaaggctgcctttgcctggccaatgttgataacagcggaaacggacaggacaaaattatcgtcgggtccttcatgggctatctgcggattttctccccgcacccagccaagaccggcgatggagcccaggctgaggatctgctgctcgaggtagatttgcgcgaccctgtgctgcaggtagaggtcggcaagtttgtgagcggaaccgagatgcttcacctagcggtgctgcactctcgcaagctgtgcgtgtactccgtgtcaggaactctggggaatgtcgaacatggtaatcaatgtcagatgaaattaatgtatgaacacaatctgcagagaaccgcttgcaacatgacatacgggtcctttggaggtgtcaagggaagggatctgatctgcatccagagtatggacggtatgttaatggtcttcgagcaggaaagctatgcatttgggcgcttcctccccggtttcctgctgcctggcccattggcatactcatcccggaccgactcgtttctcacagtgagcagttgccagcaggtcgagtcctacaagtatcaggtgttagcattcgctacagacgctgacaaaaggcaggagaccgagcaacagaaactgggctcaggaaaacggctggtagtggactggaccctgaatattggggagcaggcattagatatctgcatagtgtcattcaaccagtccgccagctcggtgttcgtgctcggggagcgtaattttttctgtctcaaagataacgggcagatccgcttcatgaaaaaactggactggtctcccagctgttttttgccttactgcagtgtgtcagaggggacaatcaacacgttgataggtaatcacaacaatatgctgcacatctatcaggacgtcaccttgaagtgggcaacacagctcccacacatccccgtggccgtcagggtcggctgtttacacgatctgaaaggcgttatcgtcacccttagcgacgatggtcatctgcagtgctcatacctggggactgacccatctctgttccaagcacctaatgttcagtcccgggagctgaattacgatgaactcgacgttgagatgaaggagcttcagaaaataattaaagacgtcaacaagtctcagggcgtgtggccgatgacagaaagagaggacgacctcaacgtgagcgtggtggtctccccaaactttgattccgtttcccaagctacagatgtggaggtcggaaccgacttggtgccatcggtcactgttaaagtcactctgcagaacagagtaatcctgcagaaagccaagctctcagtgtatgtacagcctcccttagaactaacctgtgaccaatttactttcgagttcatgtctattccacgcgttatccagtgtaagtttcgtctccccctgaagttgatttgcctcccaggacagccatccaagaccgccagtcacaaaatcacgatcgacaccaataagagtcccgtcagcctcctctcactgttcccaggtttcgcgagccaatcagacgacgatcaggtcaacgtgatgggcttccatttcctgggtggggctaggatcaccgtgctggcctccaagacgtcccaaagatatcggattcagtccgaacagtttgaggacttatggctgatcaccaacgagctgatcctcagactccaggagtatttcgaaaagcaaggggttaaggactttgcctgcagtttcagcgggagcattccgctgcaagaatactttgaactgattgaccaccacttcgagctgcgcattaacggcgaaaagcttgaagaactcctttctgagagagctgtccagtttagggcgatccagagacgcctgctcgctcgcttcaaggacaaaactcctgcaccgctccagcaccttgacactctgttagacggtacttataagcaagtgatcgccctggcagacgctgtcgaggagaaccaaggcaacttgttccagtccttcaccaggttgaaaagtgccacccacctcgtgattctgcttatcgcactctggcaaaagctgagcgctgaccaagtggctattctcgaagctgctttcctgccactgcaggaggacacacaggagctcggatgggaggagaccgtggatgctgccatcagccatctgctgaagacctgtttgtctaaatcctctaaggagcaggccctcaacctgaatagccagctgaatatccccaaagacaccagccaacttaaaaaacacattacattgctgtgcgatcgcttgtccaaaggtggccgactatgtctttccaccgacgcagccgctccacagactatggttatgcccggaggatgtacaactattcctgaatctgacttggaagaacgctctgtcgagcaggacagtactgagcttttcactaaccaccggcacttaacagccgagactccccgaccagaggttagccccctacagggggtgagtgagtag

SEQ ID NO: 180157 - DNA, 1446 bp, Artificial Sequence
  derived and/or modified sequence
atgagcctgtttaaggcacgcgactggtggtccactatactgggagataaagaggagtttgatcagggctgcctttgtctggctaatgtggacaactccggcaacgggcaggacaaaattatagtgggatcattcatgggctacctgagaattttttccccccaccccgcgaagaccggcgatggagcacaggccgaggacctcctgttggaggtagacctccgcgaccccgttcttcaggtcgaggtcgggaagtttgtgtctggcacagagatgttacaccttgccgtgctccactctcggaagctctgcgtgtattcagtgtccggcacactgggaaatgtggaacacggcaatcagtgccagatgaaacttatgtacgagcacaatttgcagaggactgcctgtaatatgacttacggatctttcggaggcgtcaagggccgcgatcttatttgtattcaatctatggacgggatgctcatggtgtttgagcaggagtcttacgcattcggaaggtttctccccggcttccttcttcctggccctttggcctattcctccagaaccgattcttttctgacagtctccagttgtcagcaagttgagagctacaaataccaggtcctggcgtttgcaactgacgctgacaaaaggcaggagaccgagcagcagaagttggggtctgggaagcgactggtggtggactggacgctgaatataggggaacaggctctagacatctgcatcgtttcttttaaccagagcgccagctctgtctttgtgctcggcgaacgtaatttcttttgcctgaaggataacggacaaataagattcatgaaaaagcttgattggagcccctcctgcttcctgccctattgtagtgtcagcgagggcaccatcaatacgcttattggtaatcacaacaatatgcttcacatataccaagacgtcactctaaaatgggctacccaactgccgcatatcccagttgctgttcgcgtaggatgcctgcacgatcttaaaggggtgatagtaactctgtccgatgatggacatctccagtgttcctatctaggcaccgatcctagccttttccaagcacccaatgtgcagtcccgagagttaaactatgacgaactagatgtcgaaatgaaagagctgcagaaaattatcaaggacgtgaacaagtcgcagggggtgtggccgatgacggagagggaagatgatctaaatgtgagtgtggtcgtgagcccaaattttgattctgtgagtcaagcaacggacgttgaagtcggcaccgacctggttcctagcgtgacagtgaaggtcaccctccagaacagagtaatcctgcagaaggcgaagttaagcgtttacgtgcagcccccgctggaacttacctgcgatcagtttacgttcgagttcatgaactttccgtcatag

SEQ ID NO: 180158 - DNA, 2544 bp, Artificial Sequence
  derived and/or modified sequence
atgagcctcttcaaggcccgggactggtggagcaccatcctgggggacaaggaggagtttgaccagggctgcctgtgcctggccaacgtggacaacagcggaaatggccaggacaagatcatcgtgggcagcttcatgggctacctgcgcatcttcagcccccacccagccaagacaggagatggagcccaggccgaggacctgctgctggaggtggacctgcgggaccctgtgctgcaggtggaggtgggcaagtttgtgtctggaacagagatgctgcacctggccgtgctgcacagcaggaagctgtgtgtgtacagcgtgtctggcaccctgggcaatgtggagcacggcaaccagtgccagatgaagctgatgtatgagcacaacctgcagaggacagcctgcaacatgacctacggcagctttggaggagtgaagggccgggacctgatctgcatccagagcatggatggcatgctgatggtgtttgagcaggagagctatgccttcggccgcttcctgcccggcttcctgctgcccggccccctggcctacagcagcaggacagacagcttcctgactgtgagcagctgccagcaggtggagagctacaagtaccaggtgctggcctttgccacagatgctgacaagaggcaggagacagagcagcagaagctgggcagcggcaagaggctggtggtggactggaccctgaacattggagagcaggccctggacatctgcatcgtgtccttcaaccagagcgccagctctgtgtttgtgctgggggagaggaacttcttctgcctgaaggacaatggccagatccgcttcatgaagaagctggactggagccccagctgcttcctgccctactgcagcgtgtctgagggcaccatcaacaccctgattggcaaccacaacaacatgctgcacatctaccaggatgtgaccctgaagtgggccacccagctgccccacatccctgtggccgtgcgggtgggctgcctgcatgacctgaagggcgtgattgtgaccctgagtgatgatggccacctgcagtgcagctacctgggcacagaccccagcctcttccaggcccccaacgtgcagagccgggagctgaactatgatgagctggatgtggagatgaaggagctgcagaagatcatcaaggatgtgaacaagagccagggcgtgtggcccatgacagagcgggaggatgacctgaatgtgtctgtggtggtgagccccaactttgattctgtgtcccaggccacagatgtggaggtgggcacagacctggtgcccagcgtgacagtgaaggtgaccctgcagaacagagtcatcctgcagaaggccaagctgtctgtgtatgtgcagccccccctggagctgacctgtgaccagttcacctttgagttcatgagcatccccagggtcatccagtgcaagttccggctgcccctgaagctgatctgcctgcccggccagcccagcaagacagccagccacaagatcaccatcgacaccaacaagagccctgtgtccctgctgagcctcttccctggctttgccagccagagtgatgatgaccaggtgaatgtgatgggcttccacttcctgggcggggcccgcatcaccgtgctggccagcaagaccagccagcgctaccgcatccagagcgagcagtttgaggacctgtggctgatcaccaatgagctgatcctgcggctgcaggagtactttgagaagcagggcgtgaaggactttgcctgcagcttcagcggcagcatccccctgcaggagtactttgagctgattgaccaccactttgagctgcgcatcaacggggagaagctggaggagctgctgtctgaaagagctgtgcagttccgggccatccagaggcggctgctggcccgcttcaaggacaagaccccagcccccctgcagcacctggacaccctgctggatggcacctacaagcaggtgattgccctggctgatgctgtggaggagaaccagggcaacctcttccagagcttcacccggctgaagagcgccacccacctggtgatcctgctgattgccctgtggcagaagctgtctgctgaccaggtggccatcctggaggccgccttcctgcccctgcaggaggacacccaggagctgggctgggaggagaccgtggatgctgccatcagccacctgctgaagacctgcctgagcaagagcagcaaggagcaggccctgaacctgaacagccagctgaacatccccaaggacaccagccagctgaagaagcacatcaccctgctgtgtgaccggctgagcaaaggaggccgcctgtgcctgagcacagatgctgctgccccccagaccatggtgatgcctgggggctgcaccaccatccctgagagtgacctggaggagaggtctgtggagcaggacagcacagagctgttcaccaaccaccgccacctgacagctgagacccccaggcctgaggtgagccccctgcagggcgtgtctgagtag

SEQ ID NO: 180159 - DNA, 1446 bp, Artificial Sequence
  derived and/or modified sequence
atgagcctcttcaaggcccgggactggtggagcaccatcctgggggacaaggaggagtttgaccagggctgcctgtgcctggccaacgtggacaacagcggaaatggccaggacaagatcatcgtgggcagcttcatgggctacctgcgcatcttcagcccccacccagccaagacaggagatggagcccaggccgaggacctgctgctggaggtggacctgcgggaccctgtgctgcaggtggaggtgggcaagtttgtgtctggaacagagatgctgcacctggccgtgctgcacagcaggaagctgtgtgtgtacagcgtgtctggcaccctgggcaatgtggagcacggcaaccagtgccagatgaagctgatgtatgagcacaacctgcagaggacagcctgcaacatgacctacggcagctttggaggagtgaagggccgggacctgatctgcatccagagcatggatggcatgctgatggtgtttgagcaggagagctatgccttcggccgcttcctgcccggcttcctgctgcccggccccctggcctacagcagcaggacagacagcttcctgactgtgagcagctgccagcaggtggagagctacaagtaccaggtgctggcctttgccacagatgctgacaagaggcaggagacagagcagcagaagctgggcagcggcaagaggctggtggtggactggaccctgaacattggagagcaggccctggacatctgcatcgtgtccttcaaccagagcgccagctctgtgtttgtgctgggggagaggaacttcttctgcctgaaggacaatggccagatccgcttcatgaagaagctggactggagccccagctgcttcctgccctactgcagcgtgtctgagggcaccatcaacaccctgattggcaaccacaacaacatgctgcacatctaccaggatgtgaccctgaagtgggccacccagctgccccacatccctgtggccgtgcgggtgggctgcctgcatgacctgaagggcgtgattgtgaccctgagtgatgatggccacctgcagtgcagctacctgggcacagaccccagcctcttccaggcccccaacgtgcagagccgggagctgaactatgatgagctggatgtggagatgaaggagctgcagaagatcatcaaggatgtgaacaagagccagggcgtgtggcccatgacagagcgggaggatgacctgaatgtgtctgtggtggtgagccccaactttgattctgtgtcccaggccacagatgtggaggtgggcacagacctggtgcccagcgtgacagtgaaggtgaccctgcagaacagagtcatcctgcagaaggccaagctgtctgtgtatgtgcagccccccctggagctgacctgtgaccagttcacctttgagttcatgaacttccccagctag

SEQ ID NO: 180160 - DNA, 2544 bp, Artificial Sequence
  derived and/or modified sequence
atgagcctgttcaaggcccgggactggtggagcaccatcctgggcgataaagaggaattcgatcagggatgcctgtgtcttgcaaatgtagacaactcaggtaacgggcaagacaagattatcgtcggatctttcatgggctacctccgaatattttcccctcacccagctaaaaccggagatggtgctcaggctgaggacctcctactggaagtcgaccttagagatcctgtcttgcaggtggaagtaggaaagttcgtctccggaacggaaatgctgcatctcgcggtcctgcactccaggaagctgtgcgtgtactctgtgtcgggaactctcggaaatgtggaacacggcaatcaatgccagatgaagctgatgtatgagcacaatctccaaaggactgcatgcaacatgacctacggttcatttggtggtgtcaagggccgagatctcatttgtatccagtcgatggacggaatgctcatggtgtttgaacaagagagctatgcatttggacgattcttacctggctttttactccccggacctctggcctatagcagccgtacagattcttttctcactgtttcctcctgccagcaggtggaaagttataaataccaagtgctggcattcgccacagatgcggacaaaagacaagaaacagagcagcagaaactcggctccgggaagcgcctggttgtggactggaccttgaacattggcgagcaggccctggacatttgtatcgtttcattcaatcagtccgcctcttccgtcttcgtactgggggaacgcaactttttctgcctgaaagataatggacaaatccggtttatgaagaaactcgattggtctccttcctgtttccttccatattgtagcgtgtctgagggaaccatcaacactctgattgggaatcacaacaatatgttgcacatctatcaagatgtgacactaaaatgggctacacagctgccccatatccctgtggccgttagagtcggctgtctccacgatctgaaaggcgtgattgtgaccttgtccgacgatgggcaccttcaatgttcgtacctcgggacggaccctagcctcttccaagcgccaaacgtgcagagcagggaacttaactatgacgagctcgatgttgagatgaaggagctacagaagattatcaaggacgttaataagagtcaaggtgtgtggcctatgactgaaagagaggatgacctgaacgtcagcgtcgtggtctctccgaactttgattctgtttcccaggcaacggatgttgaggtgggcaccgatcttgtgccatcagtgacagtgaaagtgactctacagaaccgcgttatcctccagaaggctaagctcagcgtttatgtgcagccaccgcttgaattgacatgtgatcagttcacatttgaattcatgtcaattccccgcgtcattcagtgcaagttccggctgcctcttaaacttatttgcctccctggccagcccagcaagactgcatcccataagattacgatcgatactaacaaatctcctgtctccctcctctccctcttccctggcttcgcttcacagtcagatgacgaccaggtcaacgtgatgggcttccattttttaggaggcgcacgaatcaccgttctagcctcgaagacatcccagcgctatcgtattcagtccgagcagtttgaagacttatggctcattactaatgaactgatcctccgattacaggaatatttcgaaaagcagggtgttaaagatttcgcatgctctttttccggctctataccgctccaagagtacttcgaactaatcgaccaccatttcgagctaagaataaacggagaaaagctagaggagctgctgtctgagcgggcagttcagttcagagccattcaaagacggttgctggccaggtttaaagataagacaccggccccgcttcaacacctggataccttactagacggcacttacaagcaagtgatagcgcttgcggatgcagtcgaagaaaatcaaggcaatctctttcagagttttacaaggctgaagtctgcaacacatttagtgatcttgctcatcgctctctggcagaaacttagtgctgatcaggtggctattctggaagcagcattcctgcccctccaagaggacactcaggagcttggatgggaagagacagtggacgccgccatcagtcacttgctgaagacttgtctgagcaagagctctaaggagcaggcgcttaacttgaacagtcagcttaacatccctaaggatacaagtcaactgaagaagcatatcacactgctgtgcgatcgcctctccaaagggggtcgcttgtgcctgagcaccgatgcagctgcgccacaaaccatggtgatgccaggggggtgtacaacaattccagaatcggatttggaggagagaagcgtggaacaggacagcaccgaactgtttaccaaccatagacatctgacggctgagactcccagaccggaagtaagtccgctacaaggggtgagtgagtag

SEQ ID NO: 180161 - DNA, 1446 bp, Artificial Sequence
  derived and/or modified sequence
atgagcctgttcaaggcccgggactggtggagcaccatcctgggcgacaaagaggaattcgatcaaggctgcctgtgccttgcaaacgtggacaactctggcaacgggcaagataagatcattgtgggcagctttatggggtacttgcggatctttagcccccatcctgccaaaactggcgatggggcgcaggctgaggacctgcttctggaagttgatcttcgcgatccagttctgcaggtggaagtggggaaattcgtgtccggaactgagatgctccacttggccgttttgcactcccgcaagctctgtgtgtattccgtgtcaggtacactgggcaatgtggagcatggtaaccagtgtcagatgaagctgatgtatgaacacaacctccaaaggactgcctgtaacatgacttacggcagttttggcggggttaagggcagggatttgatttgtattcaatctatggacggtatgctgatggtgttcgagcaagagtcttatgcttttggcaggtttctgccagggtttctcctgccgggccctctcgcatactcaagcaggactgattccttcttgaccgtatcgtcctgtcagcaagtggagtcgtacaaataccaggtcctcgcctttgccacggacgcagataaaaggcaggaaacggaacagcagaaactgggctccggcaaaaggctggttgtcgactggactctgaatattggggagcaggccttggacatctgtatcgtgtcttttaaccagagcgcctcttcagtttttgtcctgggggagaggaacttcttctgtctgaaggacaacggccaaatcaggtttatgaaaaagttagactggtccccaagttgctttctcccttactgctccgtgtccgagggcactataaacactctaattgggaaccataacaatatgcttcacatctaccaggatgtgactctgaaatgggctacccagctgccacacatcccagtcgccgtccgagtgggatgtctgcacgatctgaagggtgtcattgtcaccttgtccgacgacggacacctccagtgcagttacctggggaccgacccatcattgttccaggcgcccaacgttcagtctcgagaactgaactacgacgagctcgatgtcgagatgaaagagcttcagaagattatcaaagacgtcaacaaatcgcaaggcgtatggccaatgacagaaagggaggacgatctgaacgtcagtgtcgtcgtctctccaaatttcgactcagtctctcaagccacagatgttgaggtaggaacggaccttgtacccagtgtgaccgtgaaagtgacacttcagaacagagttatactgcagaaggctaaactcagtgtctacgtgcagcctccccttgagctgacgtgtgaccagttcactttcgagtttatgaactttcctagttag

SEQ ID NO: 180162 - DNA, 2544 bp, Artificial Sequence
  derived and/or modified sequence
atgtctctctttaaagctcgtgattggtggtctactatactaggcgacaaggaggagtttgaccagggatgtctctgtctggcgaacgtcgacaatagcggcaacggccaggacaaaatcattgtcggaagctttatggggtacctcagaattttctcccctcacccggcaaagactggcgatggcgcacaggcagaggaccttcttctagaagttgacctgcgggaccccgttctgcaggtggaggtgggaaaatttgtcagcggaaccgagatgctccacctagctgtcctccactcaagaaaactgtgcgtgtactccgttagtgggactcttggaaacgtagaacacggcaatcagtgtcaaatgaagctgatgtatgagcataacctgcagagaacggcctgcaacatgacctatggttcattcgggggtgtgaagggccgagacctcatatgcattcaatctatggacggcatgctaatggttttcgagcaagaatcttatgctttcggacggtttctcccaggtttcctcctgcccggtcccctagcatattcctctcggaccgactcatttttaacagtgagtagctgccagcaagtggagtcctacaaatatcaggttctggcatttgccaccgacgctgacaaacgacaggagacagaacaacagaagctcgggagcggaaaacgtctagtcgtggactggacccttaatatcggcgagcaggctttggacatctgcatcgtgtccttcaatcagtcagcgtcctctgtattcgtgctgggagagaggaatttcttctgtctgaaggataatggacaaatccgattcatgaagaagcttgactggagcccctcttgctttctgccctactgttctgtgtcagagggcacaataaatacgctgatcggcaaccacaacaatatgctgcacatctaccaagacgtgaccctgaaatgggcaacccaactgcctcatattccagttgccgtgagggtggggtgtctgcacgacttaaagggagttatcgtgaccctgagcgatgacggacatctgcagtgcagctacctcggaaccgacccttctttgtttcaagcgcctaatgttcagtccagggagctgaactatgatgagcttgatgtcgaaatgaaagaactgcaaaaaatcattaaggatgtcaataagtcccagggcgtgtggccaatgaccgaacgcgaggacgatctcaacgtgagtgtggtggtttctccaaacttcgattcagtatcccaggctaccgacgtggaagtgggcacagatctagtcccttccgttaccgtcaaagttactctgcagaatagagtgatcctccagaaggcaaaattgtccgtctatgtccagccaccactcgaacttacatgtgaccagtttacatttgagtttatgtcaatcccacgggtcatccagtgcaaatttagattgcctctgaaactgatctgtctgcctggtcagccctcaaagactgccagccataagattaccattgacacaaataagtcaccggtctctcttctgtccttatttcccggatttgcgagccaatccgatgatgatcaagttaacgtcatgggattccattttttggggggtgcaaggataaccgtactggcctccaaaacatcccagcgttaccggatccagtctgagcaattcgaggatctgtggctaatcaccaacgagttgatcctgcgcctgcaggagtacttcgagaagcaaggcgtaaaagacttcgcttgcagtttttccggatccatccctctgcaggaatacttcgaactcattgatcaccactttgaactgcgaatcaatggagagaagctcgaagagctgctgagcgagagagccgtccaatttcgcgctatacaaaggaggctcctcgccaggtttaaggacaagacccccgcacctctgcagcacctggacaccttgctggatgggacctacaaacaggtgatcgcactagcggatgctgttgaggagaatcaagggaatctgtttcagtcttttacgcgtctgaaaagcgccactcatcttgtgattctgctgattgcattgtggcagaagctgtctgcagaccaggtggctatccttgaagctgccttccttcctctccaggaagacacccaggagctgggctgggaagagacagtcgacgccgcaataagccatcttctcaagacttgtctgtcaaagagttctaaagagcaagcccttaacctgaatagccaattgaacattcctaaggacacaagccagctgaagaagcatattactttgctttgcgacagactgtccaaaggcggacggctgtgcctatccacagacgccgcagcccctcagacaatggtgatgcccggtggctgtactaccattcctgagtccgacctcgaggaaaggagcgtagaacaggacagcacagagctcttcaccaatcaccgccatttaacggctgaaactccgaggccagaggtgtctccactacagggagtctcggagtag

SEQ ID NO: 180163 - DNA, 1446 bp, Artificial Sequence
  derived and/or modified sequence
atgagtctattcaaagccagggactggtggtctaccatcctcggagacaaggaggagtttgatcagggctgtttatgtctggctaacgtggataacagtgggaatgggcaggataagatcatcgttggcagcttcatgggctatctgaggattttttctcctcatccagcgaagacgggggatggcgcacaggccgaggatttgcttctggaggtcgaccttagagatccagtgctacaggtcgaagtggggaaattcgtgtccggaaccgagatgctacacctcgctgtgctccattcccggaagctttgtgtctatagcgtgtcaggaaccttgggtaacgtggagcatggcaaccagtgccaaatgaagctcatgtatgaacacaatctgcaacgaacagcctgtaacatgacctacggctctttcggaggggttaagggaagggaccttatttgtatccagagcatggatgggatgctcatggtttttgagcaagaatcatacgcctttggtcgctttttgccaggcttccttctgcctgggccacttgcatatagctcaaggacagactcttttttgacagtcagctcatgtcaacaggtcgagtcttacaaataccaagtgctagcctttgctacagacgcagataagcggcaggaaactgaacaacagaagctggggtctgggaagaggcttgtggtggactggacactcaatataggggaacaggccctggatatctgtattgtgtctttcaaccagtccgcgagctctgtgttcgtgctgggagagcggaattttttctgtctgaaggacaatgggcagatcagattcatgaagaagctggattggagtccgtcgtgcttcctaccatactgtagcgttagcgaagggacaatcaataccctcattggaaaccataataacatgctgcacatctatcaggacgtgaccctgaagtgggctacccagctccctcacatccctgttgctgtgcgcgtcggatgtctgcatgacctaaaaggcgttattgtcaccctgtcagacgacgggcatctgcaatgctcctacctgggcactgacccaagtcttttccaggccccaaatgttcagagtcgcgagctcaactatgatgaattggacgtggagatgaaggaattgcaaaaaataatcaaagacgtcaacaagagtcaaggggtgtggcctatgacggagcgggaggacgatctgaatgtcagcgtggtcgtgagtcccaacttcgattctgtctcccaagcgacagacgttgaagtagggaccgacttggtgccatcggtgacagttaaggtgactctgcagaacagagtcatattacagaaggctaagctgtctgtgtacgtgcagcctccattagaactgacgtgtgaccaatttaccttcgaattcatgaattttcccagctag

SEQ ID NO: 180164 - DNA, 3899 bp, Artificial Sequence
  derived and/or modified sequence
agtggcgtccgttgtaagtgctatgacaacagggcgaagatggctcagagttaggctggagaggggaggtgtcccttccgctgcggccgtcgggtttctgctacatcccattcaccgcctcctccatcctttcctcctcggtgtgagcagcaggacttgcatttgttctcgcctgcctagtgtcttccaagggatagatgccgtttcctctgctggtctctgggggtgacggggggcgcaggggagcttcttgggggaatcactccaactctgtggagctggtggtgctgcctggtggggctctctctttgcccgggacgtggaacaactttcagctggaggacgagagggaatagtgaagctaaaggttgcttttctctgcaccgtccgttcttgctccctctgctccatcactgggaccttgtcaggcgttcataaagcaaaatttgccgaacgagggttcgcagaaaggtggggcagagctcatctgacgtggcatcagtgtgaaagaaaatgtctttatttaaagcccgtgattggtggtctactattctgggagataaagaagaatttgatcaaggctgtttgtgtctggctaatgttgacaatagtggaaatggacaagataaaataattgtgggtagctttatgggatacctaaggatctttagcccccatcctgcaaaaacaggagatggagctcaagccgaagatttgcttctagaagtggatctacgagatccagtacttcaagtggaagtaggaaagtttgtttcaggtaccgaaatgctacatttggctgtgttacattctagaaaactttgtgtctactctgtctcaggaaccttgggtaatgtggaacatgggaaccaatgtcagatgaaattgatgtatgaacataatcttcagagaacagcctgcaatatgacctatggatcatttggtggtgtaaaaggtcgagatttaatttgcatccagtctatggatgggatgctgatggtatttgagcaggagagctatgcttttggaagatttctccctggctttcttctgcctggtcctcttgcctacagttcccgtacagattccttccttactgtctcttcctgccaacaagtggaaagttataagtaccaggtacttgcttttgcaacagatgcagataaaaggcaggagactgaacagcaaaaacttggttctggaaaaagactagttgtggattggactctaaatattggagagcaagcccttgacatatgtattgtctctttcaatcagtcggcatcctctgtttttgttcttggtgagagaaactttttttgccttaaggataatggacaaattcgattcatgaagaagcttgattggagcccaagttgttttctgccatattgctcagtttctgaaggaacaataaatactttgattggaaatcataataacatgctgcatatttatcaagatgtgacactgaagtgggccacccaacttccccacattcctgtagcagtaagagtgggctgtttgcatgatttaaagggagtgatagtcactctgagtgatgatggtcacttgcagtgttcatacctggggacagatccttctctgttccaagctccaaacgttcaatctcgagaactaaactatgatgaacttgatgtagaaatgaaagaacttcagaaaatcatcaaagatgttaacaaatcacaaggtgtttggcccatgactgagagagaagatgacttgaacgtttctgtcgtggtttctcctaactttgattcagtttctcaagcgaccgatgttgaggtgggaactgaccttgtcccttctgtcacggtgaaggtcacactgcagaacagagtgatattgcaaaaagccaaattatcagtctacgtgcaaccaccattagaattgacttgtgatcagttcacctttgaatttatgagcattccgcgagttatccaatgtaaatttagacttcccctaaagttaatttgcctaccaggtcagccttcaaaaactgcaagccacaaaattactattgataccaacaaatctccagtcagtcttcttagtctcttcccaggttttgccagtcagtcagatgatgatcaggtgaatgtaatgggttttcacttcttaggaggtgctcgaattactgttcttgcttccaaaacttctcaacgatatcgcattcagagtgaacaatttgaagatctttggctcataaccaatgagcttattcttcgccttcaagaatattttgaaaaacagggagtcaaagattttgcatgttctttttcgggatctataccccttcaagaatattttgagttgattgatcatcattttgagctacggataaatggtgaaaaattagaagaactcttatctgagagagctgtacaatttcgggccattcaacgccggctactagcaagattcaaagataaaactcctgcccctcttcaacacctggacaccttgttagatggaacctacaagcaggtaattgctctagcagatgcagtggaggaaaaccaaggcaatctgttccagtcattcaccaggctgaagagtgccacccatttggtgattctgctgatcgcgctgtggcagaagcttagtgctgaccaggttgctattctggaagcggcatttctgccgctacaagaagacactcaagaattgggctgggaagaaacggtggatgccgccatttcccacctgttgaagacttgcctgtcgaagagttctaaggagcaggctttgaacctcaacagccagctgaacatacccaaagacacaagccaactgaagaaacatatcaccttgctctgcgatagattatccaaaggtggccgtctctgcctaagtaccgatgcagcagccccacagaccatggtcatgccaggtggttgtactacaatcccagagtcagacctagaagaaagatcagtagaacaagactctacagaactgtttaccaaccacagacatctcactgcagagacacccaggcctgaagtttcacccctccaaggagtctcggaataattcaagtagagttgtttggttgagaggaacatccccatctcaaggccgaacctgtgtgaacctcatgccaagcacagatatagggctggcgcaggtgcttcctaaagctcaccttcctggagatgacatgcatagaaagaggggttgggactttttacttcactaggagaacttgtaacaccatggggaagtcagctgaaacttgtcttgttttgccaggaaaggaagtagttgcctttggtcatccatctgctaatagtcacagaatacagtgaaatgacatagttttgggttagattttataatgcaaagattcagatccaaaataatttcataccccattttttcacagaattcttatatagtaaatgtatcaagtttaataaagcatctcattgtcaaataatatcttggattttatttataattagagggatttatgagtgattgctctacattatttcttcaaaggaaaggaaaggaattgaagactttgctactctctggtaagacttgaatgtgattattttataaataaaagaaccactatgaaactttcatgtgatttgttctattaagctaaacgtggaagaagggaagttttctagtattgtatgaaaatgtttaaatattttcaaggaagctagtacattaacatccccttttcattaccccattgggtggcaccttttaaaaatccaggttattaaaggattcacactttattacagttaaaatttaaggtttttatgtgtaagaagtgaaagaaactttgctaatttcaagttcgaattacagttgtgagattgatttatttaaataaaaatatgcctttgccagtt

SEQ ID NO: 180165 - DNA, 1959 bp, Artificial Sequence
  derived and/or modified sequence
agtggcgtccgttgtaagtgctatgacaacagggcgaagatggctcagagttaggctggagaggggaggtgtcccttccgctgcggccgtcgggtttctgctacatcccattcaccgcctcctccatcctttcctcctcggtgtgagcagcaggacttgcatttgttctcgcctgcctagtgtcttccaagggatagatgccgtttcctctgctggtctctgggggtgacggggggcgcaggggagcttcttgggggaatcactccaactctgtggagctggtggtgctgcctggtggggctctctctttgcccgggacgtggaacaactttcagctggaggacgagagggaatagtgaagctaaaggttgcttttctctgcaccgtccgttcttgctccctctgctccatcactgggaccttgtcaggcgttcataaagcaaaatttgccgaacgagggttcgcagaaaggtggggcagagctcatctgacgtggcatcagtgtgaaagaaaatgtctttatttaaagcccgtgattggtggtctactattctgggagataaagaagaatttgatcaaggctgtttgtgtctggctaatgttgacaatagtggaaatggacaagataaaataattgtgggtagctttatgggatacctaaggatctttagcccccatcctgcaaaaacaggagatggagctcaagccgaagatttgcttctagaagtggatctacgagatccagtacttcaagtggaagtaggaaagtttgtttcaggtaccgaaatgctacatttggctgtgttacattctagaaaactttgtgtctactctgtctcaggaaccttgggtaatgtggaacatgggaaccaatgtcagatgaaattgatgtatgaacataatcttcagagaacagcctgcaatatgacctatggatcatttggtggtgtaaaaggtcgagatttaatttgcatccagtctatggatgggatgctgatggtatttgagcaggagagctatgcttttggaagatttctccctggctttcttctgcctggtcctcttgcctacagttcccgtacagattccttccttactgtctcttcctgccaacaagtggaaagttataagtaccaggtacttgcttttgcaacagatgcagataaaaggcaggagactgaacagcaaaaacttggttctggaaaaagactagttgtggattggactctaaatattggagagcaagcccttgacatatgtattgtctctttcaatcagtcggcatcctctgtttttgttcttggtgagagaaactttttttgccttaaggataatggacaaattcgattcatgaagaagcttgattggagcccaagttgttttctgccatattgctcagtttctgaaggaacaataaatactttgattggaaatcataataacatgctgcatatttatcaagatgtgacactgaagtgggccacccaacttccccacattcctgtagcagtaagagtgggctgtttgcatgatttaaagggagtgatagtcactctgagtgatgatggtcacttgcagtgttcatacctggggacagatccttctctgttccaagctccaaacgttcaatctcgagaactaaactatgatgaacttgatgtagaaatgaaagaacttcagaaaatcatcaaagatgttaacaaatcacaaggtgtttggcccatgactgagagagaagatgacttgaacgtttctgtcgtggtttctcctaactttgattcagtttctcaagcgaccgatgttgaggtgggaactgaccttgtcccttctgtcacggtgaaggtcacactgcagaacagagtgatattgcaaaaagccaaattatcagtctacgtgcaaccaccattagaattgacttgtgatcagttcacctttgaatttatgaattttccctcttag

SEQ ID NO: 180166 - DNA, 2544 bp, Artificial Sequence
  derived and/or modified sequence
atgagcctgttcaaggccagagactggtggagcaccatcctgggcgacaaggaggagttcgaccagggctgcctgtgcctggccaacgtggacaacagcggcaacggccaggacaagatcatcgtgggcagcttcatgggctacctgagaatcttcagcccccaccccgccaagaccggcgacggcgcccaggccgaggacctgctgctggaggtggacctgagagaccccgtgctgcaggtggaggtgggcaagttcgtgagcggcaccgagatgctgcacctggccgtgctgcacagcagaaagctgtgcgtgtacagcgtgagcggcaccctgggcaacgtggagcacggcaaccagtgccagatgaagctgatgtacgagcacaacctgcagagaaccgcctgcaacatgacctacggcagcttcggcggcgtgaagggcagagacctgatctgcatccagagcatggacggcatgctgatggtgttcgagcaggagagctacgccttcggcagattcctgcccggcttcctgctgcccggccccctggcctacagcagcagaaccgacagcttcctgaccgtgagcagctgccagcaggtggagagctacaagtaccaggtgctggccttcgccaccgacgccgacaagagacaggagaccgagcagcagaagctgggcagcggcaagagactggtggtggactggaccctgaacatcggcgagcaggccctggacatctgcatcgtgagcttcaaccagagcgccagcagcgtgttcgtgctgggcgagagaaacttcttctgcctgaaggacaacggccagatcagattcatgaagaagctggactggagccccagctgcttcctgccctactgcagcgtgagcgagggcaccatcaacaccctgatcggcaaccacaacaacatgctgcacatctaccaggacgtgaccctgaagtgggccacccagctgccccacatccccgtggccgtgagagtgggctgcctgcacgacctgaagggcgtgatcgtgaccctgagcgacgacggccacctgcagtgcagctacctgggcaccgaccccagcctgttccaggcccccaacgtgcagagcagagagctgaactacgacgagctggacgtggagatgaaggagctgcagaagatcatcaaggacgtgaacaagagccagggcgtgtggcccatgaccgagagagaggacgacctgaacgtgagcgtggtggtgagccccaacttcgacagcgtgagccaggccaccgacgtggaggtgggcaccgacctggtgcccagcgtgaccgtgaaggtgaccctgcagaacagagtgatcctgcagaaggccaagctgagcgtgtacgtgcagccccccctggagctgacctgcgaccagttcaccttcgagttcatgagcatccccagagtgatccagtgcaagttcagactgcccctgaagctgatctgcctgcccggccagcccagcaagaccgccagccacaagatcaccatcgacaccaacaagagccccgtgagcctgctgagcctgttccccggcttcgccagccagagcgacgacgaccaggtgaacgtgatgggcttccacttcctgggcggcgccagaatcaccgtgctggccagcaagaccagccagagatacagaatccagagcgagcagttcgaggacctgtggctgatcaccaacgagctgatcctgagactgcaggagtacttcgagaagcagggcgtgaaggacttcgcctgcagcttcagcggcagcatccccctgcaggagtacttcgagctgatcgaccaccacttcgagctgagaatcaacggcgagaagctggaggagctgctgagcgagagagccgtgcagttcagagccatccagagaagactgctggccagattcaaggacaagacccccgcccccctgcagcacctggacaccctgctggacggcacctacaagcaggtgatcgccctggccgacgccgtggaggagaaccagggcaacctgttccagagcttcaccagactgaagagcgccacccacctggtgatcctgctgatcgccctgtggcagaagctgagcgccgaccaggtggccatcctggaggccgccttcctgcccctgcaggaggacacccaggagctgggctgggaggagaccgtggacgccgccatcagccacctgctgaagacctgcctgagcaagagcagcaaggagcaggccctgaacctgaacagccagctgaacatccccaaggacaccagccagctgaagaagcacatcaccctgctgtgcgacagactgagcaagggcggcagactgtgcctgagcaccgacgccgccgccccccagaccatggtgatgcccggcggctgcaccaccatccccgagagcgacctggaggagagaagcgtggagcaggacagcaccgagctgttcaccaaccacagacacctgaccgccgagacccccagacccgaggtgagccccctgcagggcgtgagcgagtag

SEQ ID NO: 180167 - DNA, 1446 bp, Artificial Sequence
  derived and/or modified sequence
atgagcctgttcaaggccagagactggtggagcaccatcctgggcgacaaggaggagttcgaccagggctgcctgtgcctggccaacgtggacaacagcggcaacggccaggacaagatcatcgtgggcagcttcatgggctacctgagaatcttcagcccccaccccgccaagaccggcgacggcgcccaggccgaggacctgctgctggaggtggacctgagagaccccgtgctgcaggtggaggtgggcaagttcgtgagcggcaccgagatgctgcacctggccgtgctgcacagcagaaagctgtgcgtgtacagcgtgagcggcaccctgggcaacgtggagcacggcaaccagtgccagatgaagctgatgtacgagcacaacctgcagagaaccgcctgcaacatgacctacggcagcttcggcggcgtgaagggcagagacctgatctgcatccagagcatggacggcatgctgatggtgttcgagcaggagagctacgccttcggcagattcctgcccggcttcctgctgcccggccccctggcctacagcagcagaaccgacagcttcctgaccgtgagcagctgccagcaggtggagagctacaagtaccaggtgctggccttcgccaccgacgccgacaagagacaggagaccgagcagcagaagctgggcagcggcaagagactggtggtggactggaccctgaacatcggcgagcaggccctggacatctgcatcgtgagcttcaaccagagcgccagcagcgtgttcgtgctgggcgagagaaacttcttctgcctgaaggacaacggccagatcagattcatgaagaagctggactggagccccagctgcttcctgccctactgcagcgtgagcgagggcaccatcaacaccctgatcggcaaccacaacaacatgctgcacatctaccaggacgtgaccctgaagtgggccacccagctgccccacatccccgtggccgtgagagtgggctgcctgcacgacctgaagggcgtgatcgtgaccctgagcgacgacggccacctgcagtgcagctacctgggcaccgaccccagcctgttccaggcccccaacgtgcagagcagagagctgaactacgacgagctggacgtggagatgaaggagctgcagaagatcatcaaggacgtgaacaagagccagggcgtgtggcccatgaccgagagagaggacgacctgaacgtgagcgtggtggtgagccccaacttcgacagcgtgagccaggccaccgacgtggaggtgggcaccgacctggtgcccagcgtgaccgtgaaggtgaccctgcagaacagagtgatcctgcagaaggccaagctgagcgtgtacgtgcagccccccctggagctgacctgcgaccagttcaccttcgagttcatgaacttccccagctag

SEQ ID NO: 180168 - protein, 655 aa, Artificial Sequence
  derived and/or modified sequence
MGTSPSSSTALASCSRIARRATATMIAGSLLLLGFLSTTTAQPEQKASNLIGTYRHVDRATGQVLTCDKCPAGTYVSEHCTNTSLRVCSSCPVGTFTRHENGIEKCHDCSQPCPWPMIEKLPCAALTDRECTCPPGMFQSNATCAPHTVCPVGWGVRKKGTETEDVRCKQCARGTFSDVPSSVMKCKAYTDCLSQNLVVIKPGTKETDNVCGTLPSFSSSTSPSPGTAIFPRPEHMETHEVPSSTYVPKGMNSTESNSSASVRPKVLSSIQEGTVPDNTSSARGKEDVNKTLPNLQVVNHQQGPHHRHILKLLPSMEATGGEKSSTPIKGPKRGHPRQNLHKHFDINEHLPWMIVLFLLLVLVVIVVCSIRKSSRTLKKGPRQDPSAIVEKAGLKKSMTPTQNREKWIYYCNGHGIDILKLVAAQVGSQWKDIYQFLCNASEREVAAFSNGYTADHERAYAALQHWTIRGPEASLAQLISALRQHRRNDVVEKIRGLMEDTTQLETDKLALPMSPSPLSPSPIPSPNAKLENSALLTVEPSPQDKNKGFFVDESEPLLRCDSTSSGSSALSRNGSFITKEKKDTVLRQVRLDPCDLQPIFDDMLHFLNPEELRVIEEIPQAEDKLDRLFEIIGVKSQEASQTLLDSVYSHLPDLL

SEQ ID NO: 180169 - protein, 344 aa, Artificial Sequence
  derived and/or modified sequence
SCCRPWRPLGARSPARPSRPKRGHPRQNLHKHFDINEHLPWMIVLFLLLVLVVIVVCSIRKSSRTLKKGPRQDPSAIVEKAGLKKSMTPTQNREKWIYYCNGHGIDILKLVAAQVGSQWKDIYQFLCNASEREVAAFSNGYTADHERAYAALQHWTIRGPEASLAQLISALRQHRRNDVVEKIRGLMEDTTQLETDKLALPMSPSPLSPSPIPSPNAKLENSALLTVEPSPQDKNKGFFVDESEPLLRCDSTSSGSSALSRNGSFITKEKKDTVLRQVRLDPCDLQPIFDDMLHFLNPEELRVIEEIPQAEDKLDRLFEIIGVKSQEASQTLLDSVYSHLPDLL

SEQ ID NO: 180170 - DNA, 1968 bp, Artificial Sequence
  derived and/or modified sequence
atgggcaccagccccagcagcagcaccgccctggccagctgcagcagaatcgccagaagagccaccgccaccatgatcgccggcagcctgctgctgctgggcttcctgagcaccaccaccgcccagcccgagcagaaggccagcaacctgatcggcacctacagacacgtggacagagccaccggccaggtgctgacctgcgacaagtgccccgccggcacctacgtgagcgagcactgcaccaacaccagcctgagagtgtgcagcagctgccccgtgggcaccttcaccagacacgagaacggcatcgagaagtgccacgactgcagccagccctgcccctggcccatgatcgagaagctgccctgcgccgccctgaccgacagagagtgcacctgcccccccggcatgttccagagcaacgccacctgcgccccccacaccgtgtgccccgtgggctggggcgtgagaaagaagggcaccgagaccgaggacgtgagatgcaagcagtgcgccagaggcaccttcagcgacgtgcccagcagcgtgatgaagtgcaaggcctacaccgactgcctgagccagaacctggtggtgatcaagcccggcaccaaggagaccgacaacgtgtgcggcaccctgcccagcttcagcagcagcaccagccccagccccggcaccgccatcttccccagacccgagcacatggagacccacgaggtgcccagcagcacctacgtgcccaagggcatgaacagcaccgagagcaacagcagcgccagcgtgagacccaaggtgctgagcagcatccaggagggcaccgtgcccgacaacaccagcagcgccagaggcaaggaggacgtgaacaagaccctgcccaacctgcaggtggtgaaccaccagcagggcccccaccacagacacatcctgaagctgctgcccagcatggaggccaccggcggcgagaagagcagcacccccatcaagggccccaagagaggccaccccagacagaacctgcacaagcacttcgacatcaacgagcacctgccctggatgatcgtgctgttcctgctgctggtgctggtggtgatcgtggtgtgcagcatcagaaagagcagcagaaccctgaagaagggccccagacaggaccccagcgccatcgtggagaaggccggcctgaagaagagcatgacccccacccagaacagagagaagtggatctactactgcaacggccacggcatcgacatcctgaagctggtggccgcccaggtgggcagccagtggaaggacatctaccagttcctgtgcaacgccagcgagagagaggtggccgccttcagcaacggctacaccgccgaccacgagagagcctacgccgccctgcagcactggaccatcagaggccccgaggccagcctggcccagctgatcagcgccctgagacagcacagaagaaacgacgtggtggagaagatcagaggcctgatggaggacaccacccagctggagaccgacaagctggccctgcccatgagccccagccccctgagccccagccccatccccagccccaacgccaagctggagaacagcgccctgctgaccgtggagcccagcccccaggacaagaacaagggcttcttcgtggacgagagcgagcccctgctgagatgcgacagcaccagcagcggcagcagcgccctgagcagaaacggcagcttcatcaccaaggagaagaaggacaccgtgctgagacaggtgagactggacccctgcgacctgcagcccatcttcgacgacatgctgcacttcctgaaccccgaggagctgagagtgatcgaggagatcccccaggccgaggacaagctggacagactgttcgagatcatcggcgtgaagagccaggaggccagccagaccctgctggacagcgtgtacagccacctgcccgacctgctgtag

SEQ ID NO: 180171 - DNA, 1035 bp, Artificial Sequence
  derived and/or modified sequence
agctgctgcagaccctggagacccctgggcgccagaagccccgccagacccagcagacccaagagaggccaccccagacagaacctgcacaagcacttcgacatcaacgagcacctgccctggatgatcgtgctgttcctgctgctggtgctggtggtgatcgtggtgtgcagcatcagaaagagcagcagaaccctgaagaagggccccagacaggaccccagcgccatcgtggagaaggccggcctgaagaagagcatgacccccacccagaacagagagaagtggatctactactgcaacggccacggcatcgacatcctgaagctggtggccgcccaggtgggcagccagtggaaggacatctaccagttcctgtgcaacgccagcgagagagaggtggccgccttcagcaacggctacaccgccgaccacgagagagcctacgccgccctgcagcactggaccatcagaggccccgaggccagcctggcccagctgatcagcgccctgagacagcacagaagaaacgacgtggtggagaagatcagaggcctgatggaggacaccacccagctggagaccgacaagctggccctgcccatgagccccagccccctgagccccagccccatccccagccccaacgccaagctggagaacagcgccctgctgaccgtggagcccagcccccaggacaagaacaagggcttcttcgtggacgagagcgagcccctgctgagatgcgacagcaccagcagcggcagcagcgccctgagcagaaacggcagcttcatcaccaaggagaagaaggacaccgtgctgagacaggtgagactggacccctgcgacctgcagcccatcttcgacgacatgctgcacttcctgaaccccgaggagctgagagtgatcgaggagatcccccaggccgaggacaagctggacagactgttcgagatcatcggcgtgaagagccaggaggccagccagaccctgctggacagcgtgtacagccacctgcccgacctgctgtag

SEQ ID NO: 180172 - DNA, 1968 bp, Artificial Sequence
  derived and/or modified sequence
atgggcaccagcccctcctcttcaaccgctctggcctcatgttcacgcattgccaggcgggctaccgcaacaatgatcgcagggtcgctcctgctgctgggctttctgtcaacgactaccgcccagccagaacagaaagcaagtaacttaatcggtacatatcgccatgtcgatcgggcaactggccaggtgttgacttgcgacaaatgtccagcaggaacatacgttagcgaacactgcaccaacacatctctgcgcgtctgctccagctgccccgtcgggacttttactcgacacgagaacggcatcgagaagtgccacgactgtagtcagccatgtccctggccaatgattgagaagttaccctgtgcagcccttaccgatagagagtgtacttgtccacccggcatgttccagtccaatgccacttgcgctccccacactgtctgtcctgtgggttggggagtccggaagaaggggaccgagacagaggatgttcgctgtaagcagtgcgcacggggcacattcagcgatgtcccctcttctgtaatgaagtgcaaagcctacacggactgccttagccagaacctggtagtgatcaagcctggtaccaaggagaccgataatgtgtgtggtacacttccttcctttagctcctctacctccccaagtcccgggactgcaattttcccccggccagaacatatggagacacacgaggtgcctagtagtacatacgtgcccaagggcatgaatagcacagaatcaaattccagtgcatctgtgagaccaaaggttttaagctcaatacaggaagggaccgtgcctgataacaccagttctgcacggggcaaggaggacgtgaacaagaccttgcctaatctccaggtggtcaaccatcagcaggggccgcaccataggcacatcttgaagctgctgccttcaatggaagccaccggcggcgagaagtcatcaacacccatcaaggggccaaagaggggccatccccgacagaatcttcacaaacatttcgacatcaatgagcacctcccctggatgattgtcctattcctgctgttggttctcgtggtcatcgtggtctgttccatccgcaaatcttcacgtacccttaaaaaaggcccccggcaggatccctccgctattgtggagaaggccgggctgaagaaaagcatgactccaacccagaaccgggagaaatggatctactactgcaatggtcatgggatcgatatcctgaaactggttgctgctcaggtgggcagccaatggaaagatatctatcaatttttgtgtaatgcctctgagcgcgaagtggccgccttctctaatggatacactgctgatcacgaacgcgcatatgcagcgcttcaacactggaccatccgaggaccggaagcctcgctcgcccagctgattagcgccctgagacagcaccggcgcaatgacgtggtggagaaaatcaggggcttgatggaggacacgacacagttggaaactgacaaactcgctttgccgatgtcaccatctcctctgtcaccgtcccccatcccctccccgaatgccaaactcgaaaactcagccttacttaccgtggaaccaagccctcaggataaaaataaagggttcttcgtggacgagtctgagcccttattgagatgcgacagcacatcttctggctcttccgccctgagtcgcaatggcagctttatcactaaagaaaagaaggacacagtgttgaggcaagtccgcctggatccttgtgacctgcagcccattttcgacgatatgctgcatttcttaaaccctgaggagttacgtgtcattgaggaaatccctcaggcagaagacaaactcgaccgactcttcgaaattattggggtgaaatcccaggaggcttcacaaaccctacttgactcagtatactctcacctccccgacttactgtag

SEQ ID NO: 180173 - DNA, 1035 bp, Artificial Sequence
  derived and/or modified sequence
tcgtgttgtagaccatggcggcccctcggagctcggtcccccgcacgcccttccagaccaaaaaggggacaccccagacagaacctgcataagcactttgatattaatgagcatctaccctggatgatcgtgctctttctgctcctggtactggttgtgatcgttgtgtgctccattcgcaaatcatcaaggaccctgaaaaagggtccccgccaagatccctccgcgattgtcgagaaggccggcctgaagaaatccatgacacccacccaaaaccgagagaaatggatctactattgcaacggtcatggaatcgacatcttgaagctagttgctgctcaggttggttcgcagtggaaagacatttaccagtttctgtgtaacgcttccgaacgggaggttgccgctttcagcaacggatatacagccgaccatgagcgagcttacgccgccttacagcactggactatcaggggaccagaagcctcactggcacagctgatttcagccctaagacaacaccggaggaacgacgtggtggaaaaaatacgcggcctcatggaggataccacacaactggagactgacaaactggctctgcccatgagcccctcccccctgtccccgagtcccatcccatcccccaatgcgaagttagaaaactccgcattgttaaccgtcgaaccgtccccacaggacaagaataaagggtttttcgttgacgagagtgagcctctcctgagatgtgacagtaccagctctgggagttcagccctttctaggaatgggtcattcatcacgaaggagaaaaaggataccgtcctgaggcaggtgcgactagacccgtgtgatctgcagcccatattcgacgatatgctgcacttcctcaatccagaagagctgagggttattgaagagatcccgcaggctgaggataaactggatcggctattcgagattatcggcgtgaaaagccaggaggcttctcagaccctcctcgattctgtgtactcccacctcccagacttgctgtag

SEQ ID NO: 180174 - DNA, 1968 bp, Artificial Sequence
  derived and/or modified sequence
atgggcaccagccccagcagcagcacagccctggccagctgcagcagaattgcccggcgggccacagccaccatgattgctggcagcctgctgctgctgggcttcctgagcaccaccacagcccagcctgagcagaaggccagcaacctgattggcacctaccgccacgtggaccgggccaccggccaggtgctgacctgtgacaagtgcccagctggcacctacgtgtctgagcactgcaccaacaccagcctgcgggtgtgcagcagctgccctgtgggcaccttcaccaggcatgaaaatggaattgaaaaatgtcatgactgcagccagccctgcccctggcccatgattgagaagctgccctgtgccgccctgacagaccgggagtgcacctgccccccaggcatgttccagagcaatgccacctgtgccccccacacagtgtgccctgtgggctggggcgtgaggaagaagggcacagaaacagaagatgtgcgctgcaagcagtgtgcccggggcaccttcagtgatgtgcccagctctgtgatgaagtgcaaggcctacacagactgcctgagccagaacctggtggtgatcaagccaggcaccaaggagacagacaacgtgtgtggcaccctgcccagcttcagcagcagcaccagccccagccctggaacagccatcttccccaggcctgagcacatggagacccatgaggtgcccagcagcacctacgtgcccaagggcatgaacagcacagagagcaacagcagcgcctctgtgcggcccaaggtgctgagcagcatccaggagggcaccgtgcctgacaacaccagcagcgcccggggcaaggaggatgtgaacaagaccctgcccaacctgcaggtggtgaaccaccagcagggcccccaccaccgccacatcctgaagctgctgcccagcatggaggccactggaggagagaagagcagcacccccatcaagggccccaagaggggccacccccggcagaacctgcacaagcactttgacatcaatgagcacctgccctggatgattgtgctcttcctgctgctggtgctggtggtgattgtggtgtgcagcatcaggaagagcagcaggaccctgaagaagggcccccggcaggaccccagcgccatcgtggagaaggccggcctgaagaagtccatgacccccacccagaaccgggagaagtggatctactactgcaatggccacggcatcgacatcctgaagctggtggccgcccaggtgggcagccagtggaaggacatctaccagttcctgtgcaatgccagcgagcgggaggtggccgccttcagcaatggctacacagctgaccacgagcgggcctatgctgccctgcagcactggaccatccggggccctgaggccagcctggcccagctgatcagcgccctgcggcagcacagaagaaatgatgtggtggagaagatccggggcctgatggaggacaccacccagctggagacagacaagctggccctgcccatgagccccagccccctgagccccagccccatccccagccccaatgccaagctggagaacagcgccctgctgactgtggagcccagcccccaggacaagaacaagggcttctttgtggatgagagcgagcccctgctgcgctgtgacagcaccagcagcggcagcagcgccctgagcagaaatggcagcttcatcaccaaggagaagaaggacacagtgctgcggcaggtgcggctggacccctgtgacctgcagcccatctttgatgacatgctgcacttcctgaaccctgaggagctgcgggtgattgaggagatcccccaggccgaggacaagctggaccggctgtttgagatcatcggcgtgaagagccaggaggccagccagaccctgctggacagcgtgtacagccacctgcctgacctgctgtag

SEQ ID NO: 180175 - DNA, 1035 bp, Artificial Sequence
  derived and/or modified sequence
agctgctgccggccctggaggcccctgggcgcccggagccctgcccggcccagccggcccaagaggggccacccccggcagaacctgcacaagcactttgacatcaatgagcacctgccctggatgattgtgctcttcctgctgctggtgctggtggtgattgtggtgtgcagcatcaggaagagcagcaggaccctgaagaagggcccccggcaggaccccagcgccatcgtggagaaggccggcctgaagaagtccatgacccccacccagaaccgggagaagtggatctactactgcaatggacatggaattgacatcctgaagctggtggccgcccaggtgggcagccagtggaaggacatctaccagttcctgtgcaatgccagcgagcgggaggtggccgccttcagcaatggctacacagctgaccacgagcgggcctatgctgccctgcagcactggaccatccggggccctgaggccagcctggcccagctgatcagcgccctgcggcagcacagaagaaatgatgtggtggagaagatccggggcctgatggaggacaccacccagctggagacagacaagctggccctgcccatgagccccagccccctgagccccagccccatccccagccccaatgccaagctggagaacagcgccctgctgactgtggagcccagcccccaggacaagaacaagggcttctttgtggatgaaagtgagcccctgctgcgctgtgacagcaccagcagcggcagcagcgccctgagcagaaatggcagcttcatcaccaaggagaagaaggacacagtgctgcggcaggtgcggctggacccctgtgacctgcagcccatctttgatgacatgctgcacttcctgaaccctgaggagctgcgggtcatcgaggagatcccccaggccgaggacaagctggaccggctgtttgagatcattggagtgaagagccaggaggccagccagaccctgctggacagcgtgtacagccacctgcctgacctgctgtag

SEQ ID NO: 180176 - DNA, 1968 bp, Artificial Sequence
  derived and/or modified sequence
atgggcaccagccccagcagcagcaccgccctggccagctgcagccgcatcgcccggcgcgccactgcgacaatgattgccggatcgctgttgttacttggatttcttagcactacaacggctcaaccggagcaaaaagcttccaacctgattggaacctaccgtcatgtggaccgcgccactggccaagtgctgacttgcgataaatgtcccgcaggcacctatgtctccgagcactgtaccaacacctcactccgggtctgctcttcttgcccggtgggtacattcactcgccatgagaatggcatagaaaagtgtcacgactgcagtcagccctgtccatggccgatgatcgagaagctgccatgtgccgctctgactgacagagagtgcacctgtcctcctgggatgttccaatctaacgcaacatgtgcaccccacaccgtgtgccccgtgggctggggtgttcgcaaaaaaggtacagagacagaggacgtgaggtgcaagcagtgtgcgcggggaacattttccgatgtgccttcctccgtaatgaagtgtaaggcctataccgactgtctgagccagaacctagtggtgataaaaccaggtactaaggaaactgataacgtgtgcggtacactgccatcatttagctcttcaacctctccctccccaggcaccgctatcttcccacgaccggagcatatggaaacacacgaggttccctccagtacatacgtaccaaagggaatgaattctacagagtctaatagctctgcatctgtgcgcccgaaagtgctgtcttctattcaggagggcacggtcccagataatacttcctctgccagaggcaaggaggacgtcaataagactttgcccaacctacaggttgtgaaccaccagcaaggaccacaccataggcatatcctgaaactgctcccttccatggaggccacaggcggagaaaaaagctccacacctattaagggacctaagcgcggacatcctagacagaatctgcataagcattttgatataaatgaacatttaccatggatgatcgtgctttttctgctgctggtgctcgtggtaatcgtggtgtgttcaataagaaagagctctcgcaccctcaagaagggtccacgccaggatccctcagctattgtggaaaaggccggcctgaaaaagagcatgacccctacacagaaccgcgagaagtggatttattactgtaatggccatggtatcgacatcctgaagctcgtagcggcacaagtcggctcacagtggaaggacatctaccagttcttatgtaacgcaagtgaaagagaggtcgccgcattttccaacggttacaccgctgatcacgaacgtgcctacgccgcgctgcagcattggactattcggggaccagaggcctcgttggcccagctaattagcgctctgcgccagcatcgccgaaatgacgtggttgaaaagatcagaggcctcatggaggatactacccagctggagacagacaaactggcgctaccaatgtccccatctcccctctctccatcccccattccttcgcccaatgctaagctcgagaattccgccctgctgactgtagagccaagcccgcaggataagaacaaagggttttttgtggacgaatcagagcctctccttaggtgtgacagtacatcatctgggagtagtgccctctccaggaatggaagctttattactaaggaaaagaaagacaccgttctgcgacaggttcggttggatccatgtgacctgcagcctattttcgatgatatgttgcacttccttaatcccgaagagctccgcgtgattgaggagattcctcaggccgaagacaaactggacaggctgttcgagattattggtgtgaagtcccaggaagcctctcagacactgctggactcagtttactcacacctgcctgacttgttatag

SEQ ID NO: 180177 - DNA, 1035 bp, Artificial Sequence
  derived and/or modified sequence
agctgctgccggccctggcggcccctgggcgcccggagccccgcccgcccttcccggcccaagcgcggccacccaagacaaaatctgcacaaacattttgacatcaacgagcatctgccatggatgattgtcttgtttctgctgctcgtcctagtcgtcattgtcgtctgtagtattcggaaatcaagccgaacactgaaaaaaggcccgcgccaggatcccagtgcgatcgtggaaaaagcaggacttaaaaaaagcatgacgcccactcagaatcgagagaagtggatttactattgtaacggacacgggatagatattctgaaactggtcgccgctcaggtgggtagccagtggaaagacatctatcagtttctatgtaacgccagtgagcgagaagtcgcagctttttccaatgggtatacagccgatcacgagcgtgcctatgctgcactacagcattggacaatccgcggacccgaagcgagccttgcccagcttatcagcgctctcaggcagcatagacgcaatgacgttgtcgagaaaatccgcggcctcatggaggataccactcagcttgagacagacaagttggccttaccaatgagcccttcccctctttcacctagtcccattccttcacctaatgcgaagcttgaaaattccgcgctgcttacagtggagcccagtccccaggacaagaataaggggttttttgtcgacgaatccgagccactgctgaggtgcgactctacatcatccggcagctctgccctgagtcgaaacgggtcctttattactaaagagaagaaagacacagtcctaagacaggtaaggctggacccctgtgatttacagcctattttcgacgatatgctacatttcttgaacccagaagagcttcgggttatcgaggaaatcccccaagcggaggataagctggacaggttgtttgagattatcggcgtgaagtcccaagaagcctcgcagactctgctggactctgtatacagtcatctgcctgacctgctgtag

SEQ ID NO: 180178 - DNA, 1968 bp, Artificial Sequence
  derived and/or modified sequence
atggggacgtcaccttcaagcagcaccgccctagcctcctgttccagaatcgcccgaagagccacagccactatgattgccggttctctgctgctgcttggattcctatcaacaactacagctcaacccgagcaaaaggctagtaacctcataggcacgtaccggcacgtcgatagagctaccggccaggtcctgacctgcgacaaatgtccagctggcacctacgtatctgagcactgcacgaatacgtccctgagagtctgctcatcctgccccgtgggaacttttactagacatgagaatggaatagagaagtgccatgactgctctcaaccatgtccctggcccatgatagaaaagctcccttgcgctgcgcttacagaccgcgaatgcacctgcccaccaggaatgttccagtctaacgctacttgcgcccctcatacagtatgtcctgtgggatggggcgtgcgaaagaaaggcactgaaactgaggacgtgcgttgtaaacagtgtgctcgcggtacatttagtgatgtcccatcaagcgtaatgaagtgcaaggcatacacggattgtctctcccagaatcttgtggtgatcaagcccggtacaaaggaaaccgacaatgtttgcgggacactgccatccttctcttcttcaacctccccatccccagggaccgcaatcttcccacggcctgagcacatggaaacacacgaggtgcccagctccacctatgtacccaagggcatgaacagcacggaaagcaatagctctgcatcggtgcggcctaaggtgttatcatccatccaagaggggaccgtgcccgataatacttcctcggctcggggtaaggaagacgttaataagacattgcccaatctgcaggtcgtaaatcaccagcaaggtccgcatcacaggcacatcctgaaactgctcccatctatggaagccacaggtggggaaaagtcttcaaccccgatcaagggccctaagcgaggacaccccagacagaacctgcacaagcactttgacatcaacgagcaccttccttggatgatcgtgctcttcctgctgctggtcctggtggtaattgtcgtatgtagtatccgcaaatccagccgcaccctgaagaaggggccaagacaggatccatctgctatcgttgaaaaagctgggctcaagaaatccatgacccctacccaaaaccgggaaaagtggatatattattgcaatggccatggtattgacattctgaagctcgtagccgctcaagtgggcagccaatggaaagacatctaccagtttctttgcaatgcttccgaacgcgaggtggctgccttttctaacgggtacacagctgatcacgagagagcctatgcagccctgcagcattggacaattcgcggacctgaggcaagtctggcgcagttgatctcagctctaagacaacaccggagaaacgacgtggtagaaaaaatcaggggtttgatggaggacactacccagttggagacagataagctggcactgcccatgtccccatctccgctgagtccatcgccaatacctagccctaacgccaagctcgagaatagtgccttgttgacggtggaaccctccccccaagataaaaacaaagggttttttgtggatgagagcgaacccttgcttcgatgtgattcaactagcagcggtagctctgccctcagtcgcaacggttcatttatcacaaaagaaaaaaaagacaccgtccttcgtcaagtcagactggacccatgcgatcttcaacccatctttgacgacatgctgcattttctgaatcccgaagagttgcgtgtgatcgaggaaatccctcaagcagaggacaaactggacagactgttcgaaattattggcgttaaatctcaagaggcttcccagactttgctggacagcgtttactcccacttacctgatctgctctag

SEQ ID NO: 180179 - DNA, 1035 bp, Artificial Sequence
  derived and/or modified sequence
tcttgctgtcgcccttggagacctctgggtgcacgatctcctgcccgtcctagtcgccctaagcgcggtcatccgaggcagaacctccacaagcatttcgacatcaatgagcacctcccctggatgattgtgttattcctgctgctcgtccttgtggttattgtcgtgtgctctataagaaaatcatctaggacactcaaaaagggtccaaggcaggacccgtcagccatcgtagaaaaggccggactgaaaaagagcatgactccaacccagaatagggaaaagtggatctattactgtaatggtcacggaatagatatcttgaaactggtggccgctcaggtcggctctcagtggaaggatatatatcagttcctctgcaatgcttctgagagggaagtcgcagcgtttagcaatggctatactgcggatcacgagcgggcatacgcggcactgcagcactggactattcgtgggccagaggcttcccttgcgcagctgatcagtgctctgcgccagcaccggcgtaacgacgtagttgaaaaaatccggggtctgatggaggacacgacacagctggaaactgataagctggccctgccaatgtcacccagccctctgtctccaagcccgatccccagcccgaatgctaagctagaaaacagtgcactcctcactgtggagcctagccctcaggacaagaataaagggttcttcgtggacgagtccgagccactactcaggtgcgattcgaccagcagcggttctagcgccctgtctcggaatggctccttcatcactaaggaaaagaaagacaccgtgctgcgccaggtgcggctggacccttgtgatcttcaacccatcttcgacgacatgttgcactttttgaatccagaggagctccgcgtgatagaggagataccgcaggctgaagacaagctcgatcgcctgttcgagatcattggggttaagtcccaagaggcttcccaaactcttctcgatagcgtttattcacacctgcccgacttgctatag

SEQ ID NO: 180180 - DNA, 3595 bp, Artificial Sequence
  derived and/or modified sequence
agtccctcgccgaccagtctgggcagcggaggagggtggttggcagtggctggaagcttcgctatgggaagtcgttcctttgctctctcgcgcccagtcctcctccctggttctcctcagccgctgtcggaggagagcacccggagacgcgggctgcagtcgcggcggcttctccccgcctgggcggccgcgccgctgggcaggtgctgagcgcccctagagcctcccttgccgcctccctcctctgcccggccgcagcagtgcacatggggtgttggaggtagatgggctcccggcccgggaggcggcggtggatgcggcgctgggcagaagcagccgccgattccagctgccccgcgcgccccgggcgcccctgcgagtccccggttcagccatggggacctctccgagcagcagcaccgccctcgcctcctgcagccgcatcgcccgccgagccacagccacgatgatcgcgggctcccttctcctgcttggattccttagcaccaccacagctcagccagaacagaaggcctcgaatctcattggcacataccgccatgttgaccgtgccaccggccaggtgctaacctgtgacaagtgtccagcaggaacctatgtctctgagcattgtaccaacacaagcctgcgcgtctgcagcagttgccctgtggggacctttaccaggcatgagaatggcatagagaaatgccatgactgtagtcagccatgcccatggccaatgattgagaaattaccttgtgctgccttgactgaccgagaatgcacttgcccacctggcatgttccagtctaacgctacctgtgccccccatacggtgtgtcctgtgggttggggtgtgcggaagaaagggacagagactgaggatgtgcggtgtaagcagtgtgctcggggtaccttctcagatgtgccttctagtgtgatgaaatgcaaagcatacacagactgtctgagtcagaacctggtggtgatcaagccggggaccaaggagacagacaacgtctgtggcacactcccgtccttctccagctccacctcaccttcccctggcacagccatctttccacgccctgagcacatggaaacccatgaagtcccttcctccacttatgttcccaaaggcatgaactcaacagaatccaactcttctgcctctgttagaccaaaggtactgagtagcatccaggaagggacagtccctgacaacacaagctcagcaagggggaaggaagacgtgaacaagaccctcccaaaccttcaggtagtcaaccaccagcaaggcccccaccacagacacatcctgaagctgctgccgtccatggaggccactgggggcgagaagtccagcacgcccatcaagggccccaagaggggacatcctagacagaacctacacaagcattttgacatcaatgagcatttgccctggatgattgtgcttttcctgctgctggtgcttgtggtgattgtggtgtgcagtatccggaaaagctcgaggactctgaaaaaggggccccggcaggatcccagtgccattgtggaaaaggcagggctgaagaaatccatgactccaacccagaaccgggagaaatggatctactactgcaatggccatggtatcgatatcctgaagcttgtagcagcccaagtgggaagccagtggaaagatatctatcagtttctttgcaatgccagtgagagggaggttgctgctttctccaatgggtacacagccgaccacgagcgggcctacgcagctctgcagcactggaccatccggggccccgaggccagcctcgcccagctaattagcgccctgcgccagcaccggagaaacgatgttgtggagaagattcgtgggctgatggaagacaccacccagctggaaactgacaaactagctctcccgatgagccccagcccgcttagcccgagccccatccccagccccaacgcgaaacttgagaattccgctctcctgacggtggagccttccccacaggacaagaacaagggcttcttcgtggatgagtcggagccccttctccgctgtgactctacatccagcggctcctccgcgctgagcaggaacggttcctttattaccaaagaaaagaaggacacagtgttgcggcaggtacgcctggacccctgtgacttgcagcctatctttgatgacatgctccactttctaaatcctgaggagctgcgggtgattgaagagattccccaggctgaggacaaactagaccggctattcgaaattattggagtcaagagccaggaagccagccagaccctcctggactctgtttatagccatcttcctgacctgctgtagaacatagggatactgcattctggaaattactcaatttagtggcagggtggttttttaattttcttctgtttctgatttttgttgtttggggtgtgtgtgtgtgtttgtgtgtgtgtgtgtgtgtgtgtgtgtgtgtgtgtttaacagagaatatggccagtgcttgagttctttctccttctctctctctcttttttttttaaataactcttctgggaagttggtttataagcctttgccaggtgtaactgttgtgaaatacccaccactaaagttttttaagttccatattttctccattttgccttcttatgtattttcaagattattctgtgcactttaaatttacttaacttaccataaatgcagtgtgacttttcccacacactggattgtgaggctcttaacttcttaaaagtataatggcatcttgtgaatcctataagcagtctttatgtctcttaacattcacacctactttttaaaaacaaatattattactatttttattattgtttgtcctttataaattttcttaaagattaagaaaatttaagaccccattgagttactgtaatgcaattcaactttgagttatcttttaaatatgtcttgtatagttcatattcatggctgaaacttgaccacactattgctgattgtatggttttcacctggacaccgtgtagaatgcttgattacttgtactcttcttatgctaatatgctctgggctggagaaatgaaatcctcaagccatcaggatttgctatttaagtggcttgacaactgggccaccaaagaacttgaacttcaccttttaggatttgagctgttctggaacacattgctgcactttggaaagtcaaaatcaagtgccagtggcgccctttccatagagaatttgcccagctttgctttaaaagatgtcttgttttttatatacacataatcaataggtccaatctgctctcaaggccttggtcctggtgggattccttcaccaattactttaattaaaaatggctgcaactgtaagaacccttgtctgatatatttgcaactatgctcccatttacaaatgtaccttctaatgctcagttgccaggttccaatgcaaaggtggcgtggactccctttgtgtgggtggggtttgtgggtagtggtgaaggaccgatatcagaaaaatgccttcaagtgtactaatttattaataaacattaggtgtttgtta

SEQ ID NO: 180181 - DNA, 2267 bp, Artificial Sequence
  derived and/or modified sequence
agctgctgccgtccatggaggccactgggggcgagaagtccagcacgcccatcaaggcccaagaggggacatcctagacagaacctacacaagcattttgacatcaatgagcatttgccctggatgattgtgcttttcctgctgctggtgcttgtggtgattgtggtgtgcagtatccggaaaagctcgaggactctgaaaaaggggccccggcaggatcccagtgccattgtggaaaaggcagggctgaagaaatccatgactccaacccagaaccgggagaaatggatctactactgcaatggccatggtatcgatatcctgaagcttgtagcagcccaagtgggaagccagtggaaagatatctatcagtttctttgcaatgccagtgagagggaggttgctgctttctccaatgggtacacagccgaccacgagcgggcctacgcagctctgcagcactggaccatccggggccccgaggccagcctcgcccagctaattagcgccctgcgccagcaccggagaaacgatgttgtggagaagattcgtgggctgatggaagacaccacccagctggaaactgacaaactagctctcccgatgagccccagcccgcttagcccgagccccatccccagccccaacgcgaaacttgagaattccgctctcctgacggtggagccttccccacaggacaagaacaagggcttcttcgtggatgagtcggagccccttctccgctgtgactctacatccagcggctcctccgcgctgagcaggaacggttcctttattaccaaagaaaagaaggacacagtgttgcggcaggtacgcctggacccctgtgacttgcagcctatctttgatgacatgctccactttctaaatcctgaggagctgcgggtgattgaagagattccccaggctgaggacaaactagaccggctattcgaaattattggagtcaagagccaggaagccagccagaccctcctggactctgtttatagccatcttcctgacctgctgtagaacatagggatactgcattctggaaattactcaatttagtggcagggtggttttttaattttcttctgtttctgatttttgttgtttggggtgtgtgtgtgtgtttgtgtgtgtgtgtgtgtgtgtgtgtgtgtgtgtgtttaacagagaatatggccagtgcttgagttctttctccttctctctctctcttttttttttaaataactcttctgggaagttggtttataagcctttgccaggtgtaactgttgtgaaatacccaccactaaagttttttaagttccatattttctccattttgccttcttatgtattttcaagattattctgtgcactttaaatttacttaacttaccataaatgcagtgtgacttttcccacacactggattgtgaggctcttaacttcttaaaagtataatggcatcttgtgaatcctataagcagtctttatgtctcttaacattcacacctactttttaaaaacaaatattattactatttttattattgtttgtcctttataaattttcttaaagattaagaaaatttaagaccccattgagttactgtaatgcaattcaactttgagttatcttttaaatatgtcttgtatagttcatattcatggctgaaacttgaccacactattgctgattgtatggttttcacctggacaccgtgtagaatgcttgattacttgtactcttcttatgctaatatgctctgggctggagaaatgaaatcctcaagccatcaggatttgctatttaagtggcttgacaactgggccaccaaagaacttgaacttcaccttttaggatttgagctgttctggaacacattgctgcactttggaaagtcaaaatcaagtgccagtggcgccctttccatagagaatttgcccagctttgctttaaaagatgtcttgttttttatatacacataatcaataggtccaatctgctctcaaggccttggtcctggtgggattccttcaccaattactttaattaaaaatggctgcaactgtaagaacccttgtctgatatatttgcaactatgctcccatttacaaatgtaccttctaatgctcagttgccaggttccaatgcaaaggtggcgtggactccctttgtgtgggtggggtttgtgggtagtggtgaaggaccgatatcagaaaaatgccttcaagtgtactaatttattaataaacattaggtgtttgtt

SEQ ID NO: 180182 - protein, 426 aa, Artificial Sequence
  derived and/or modified sequence
MHALFADSFAALGRLDNITLVMVFHPQYLESFLKTQHYLLQMDGPLPLHYRHYIGIMAAARHQCSYLVNLHVNDFLHVGGDPKWLNGLENAPQKLQNLGELNKVLAHRPWLITKEHIEGLLKAEEHSWSLAELVHAVVLLTHYHSLASFTFGCGISPEIHCDGGHTFRPPSVSNYCICDITNGNHSVDEMPVNSAENVSVSDSFFEVEALMEKMRQLQECRDEEEASQEEMASRFEIEKRESMFVFSSDDEEVTPARAVSRHFEDTSYGYKDFSRHGMHVPTFRVQDYCWEDHGYSLVNRLYPDVGQLIDEKFHIAYNLTYNTMAMHKDVDTSMLRRAIWNYIHCMFGIRYDDYDYGEINQLLDRSFKVYIKTVVCTPEKVTKRMYDSFWRQFKHSEKVHVNLLLIEARMQAELLYALRAITRYMT

SEQ ID NO: 180183 - protein, 551 aa, Artificial Sequence
  derived and/or modified sequence
MAEGENEVRWDGLCSRDSTTRETALENIRQTILRKTEYLRSVKETPHRPSDGLSNTESSDGLNKLLAHLLMLSKRCPFKDVREKSEFILKSIQELGIRIPRPLGQGPSRFIPEKEILQVGSEDAQMHALFADSFAALGRLDNITLVMVFHPQYLESFLKTQHYLLQMDGPLPLHYRHYIGIMAAARHQCSYLVNLHVNDFLHVGGDPKWLNGLENAPQKLQNLGELNKVLAHRPWLITKEHIEGLLKAEEHSWSLAELVHAVVLLTHYHSLASFTFGCGISPEIHCDGGHTFRPPSVSNYCICDITNGNHSVDEMPVNSAENVSVSDSFFEVEALMEKMRQLQECRDEEEASQEEMASRFEIEKRESMFVFSSDDEEVTPARAVSRHFEDTSYGYKDFSRHGMHVPTFRVQDYCWEDHGYSLVNRLYPDVGQLIDEKFHIAYNLTYNTMAMHKDVDTSMLRRAIWNYIHCMFGIRYDDYDYGEINQLLDRSFKVYIKTVVCTPEKVTKRMYDSFWRQFKHSEKVHVNLLLIEARMQAELLYALRAITRYMT

SEQ ID NO: 180184 - DNA, 1656 bp, Artificial Sequence
  derived and/or modified sequence
atggcggagggagaaaatgaagtgagatgggatggtctgtgtagtcgggattccacaacccgggagactgcgctggagaatattaggcagacgatcttacgcaaaacagaatatttgcggtcggtgaaagagacacctcaccggcctagtgacgggctctccaatacggaaagctctgatggactgaataaactccttgctcatctgttgatgctctccaagagatgcccattcaaggacgttcgggaaaagagcgaatttatcctgaaatctattcaggaactggggattcgcatccctcgacccctgggccaggggccctctcgtttcatcccagagaaggaaatcttgcaagtgggcagtgaggacgcccagatgcatgctttatttgccgacagcttcgccgccctggggcgactggataatattacactggtgatggttttccatccacagtatctagagagtttcctcaaaactcaacactacctcttgcagatggatgggccactgcccttgcactacaggcattacattgggattatggccgcggccaggcaccagtgtagctacctagtcaacctccatgtaaatgactttctgcacgtcgggggagacccgaaatggctaaacggtttagaaaacgcacctcagaagttgcagaacttgggggagcttaataaggtcctggctcatcgcccttggctgattacgaaagaacatattgagggactgctaaaagcagaagaacactcttggtcacttgctgaattagtccacgccgtggtgctcctaacacattatcactcgttggcttccttcacattcggctgtggaatcagccctgaaatccactgcgacggaggccacactttccgaccccctagcgtgagcaattactgcatttgcgacatcactaacggcaatcattccgttgatgaaatgccagtgaattccgctgaaaatgtgtctgttagtgacagtttcttcgaggtagaggctctgatggagaaaatgcggcagcttcaagagtgtcgggatgaggaagaagcatcccaggaggagatggcatctcgatttgagatcgagaagcgggaatcaatgtttgtgttcagctccgacgacgaggaagtgacgccagccagggcggtctcaaggcactttgaagatactagctatgggtacaaggatttttctcggcatgggatgcatgtgccgacgttccgggtgcaggactactgttgggaggatcacggatactcactagtaaacaggctctaccccgatgtagggcagttgatagatgagaagttccacatcgcctataatttaacctacaacacaatggcaatgcataaagatgtagatacctcaatgctcagacgcgccatctggaattacatccactgtatgttcggaatcaggtacgacgactatgactacggcgagataaatcaattactggaccgatcgttcaaggtgtatatcaagaccgtggtttgcacccccgagaaggtcaccaagaggatgtatgatagcttctggagacagttcaaacactcagaaaaggttcacgtgaatctgctgcttatagaagcaagaatgcaagcggagcttctgtacgctttacgcgccattactaggtacatgacatag

SEQ ID NO: 180185 - DNA, 1656 bp, Artificial Sequence
  derived and/or modified sequence
atggccgagggagaaaatgaggtgcgctgggatggcctgtgcagccgggacagcaccacccgggagacagccctggagaacatccggcagaccatcctgaggaagacagagtacctgcggtctgtgaaggagaccccccaccggcccagtgatggcctgagcaacacagagagcagtgatggcctgaacaagctgctggcccacctgctgatgctgagcaagcgctgccccttcaaggatgtgcgggagaagtctgagttcatcctgaagagcatccaggagctgggcatccgcatcccccggcccctgggccagggccccagccgcttcatccctgagaaggagatcctgcaggtgggctctgaagatgcccagatgcacgccctgtttgctgacagctttgctgccctgggccgcctggacaacatcaccctggtgatggtgttccacccccagtacctggagagcttcctgaagacccagcactacctgctgcagatggatggccccctgcccctgcactaccgccactacatcggcatcatggccgccgcccggcaccagtgcagctacctggtgaacctgcacgtgaatgacttcctgcacgtgggcggggaccccaagtggctgaatggcctggagaatgccccccagaagctgcagaacctgggggagctgaacaaggtgctggcccaccggccctggctgatcaccaaggagcacatcgagggcctgctgaaggccgaggagcacagctggagcctggccgagctggtgcatgctgtggtgctgctgacccactaccacagcctggccagcttcaccttcggctgcggcatcagccctgagatccactgtgatggcggccacaccttccggccccccagcgtgagcaactactgcatctgtgacatcaccaatggaaaccacagcgtggatgagatgcctgtgaacagcgcagaaaatgtgtctgtgtctgacagcttctttgaggtggaggccctgatggagaagatgaggcagctgcaggagtgcagagatgaggaggaggccagccaggaggagatggccagcagatttgaaattgagaagcgggagagcatgtttgtgttcagcagtgatgatgaggaggtgaccccagcccgggctgtgagccgccactttgaggacaccagctatggctacaaggacttcagcagacatggcatgcacgtgcccaccttccgggtgcaggactactgctgggaggaccacggctacagcctggtgaaccggctgtacccagatgtgggccagctgattgatgagaagttccacatcgcctacaacctgacctacaacaccatggccatgcacaaggatgtggacacctccatgctgcggcgggccatctggaactacatccactgcatgtttggcatccgctatgatgattatgactatggagagatcaaccagctgctggaccgctccttcaaggtgtacatcaagacagtggtgtgcaccccagagaaggtgaccaagaggatgtatgacagcttctggaggcagttcaagcacagcgagaaggtgcacgtgaacctgctgctgattgaggccaggatgcaggccgagctgctgtatgccctgcgggccatcacccgctacatgacctag

SEQ ID NO: 180186 - DNA, 1656 bp, Artificial Sequence
  derived and/or modified sequence
atggccgagggcgagaacgaggtgcggtgggacggcctgtgcagccgggatagtacaactcgggagaccgctctcgaaaacatccgccaaaccatcctccgtaaaacggaatatctcaggtccgtcaaggagaccccgcatcgccccagtgacggcctgtccaataccgaatcatcggacgggctgaacaagttactggcccacctccttatgctgtccaagcgctgtccctttaaagatgtccgtgaaaagtcagagttcatcctcaagagtatacaagagttaggtatacgcatcccaaggcctttaggccagggtccatctcgcttcattcccgagaaagagatcctgcaagtgggttccgaggatgcccagatgcatgctctgtttgccgatagtttcgccgctttgggtaggttggacaacatcacgctcgtgatggtattccacccacagtacctggagtctttcctgaaaacacagcattatttgctacagatggacggtccattgcctttacactatcggcactacataggcatcatggctgccgcacggcatcagtgcagctacctggttaacctgcatgtgaacgactttctacacgtggggggggacccaaaatggctgaatggactcgagaatgccccccaaaaacttcaaaacctcggggaactcaacaaagttctcgctcacaggccatggctgatcaccaaagaacacatagaagggctattgaaggccgaggagcatagttggtccctcgccgagctcgtgcacgcagtggtcctactcacacactatcatagcctggcctcgtttacctttgggtgtggtatttcaccagagattcattgcgacggaggacatacctttaggcctccttctgtgtctaattactgcatctgtgacattaccaatggtaatcacagcgttgacgaaatgcctgtcaactccgcagagaacgtgagtgtttcagattccttctttgaagttgaagctcttatggaaaagatgcggcagctacaggaatgtcgcgacgaagaagaagccagtcaggaagaaatggcatctcgctttgagattgagaagcgcgagagcatgtttgtgttcagctcagacgacgaagaggtcaccccagcacgggccgtatcccggcattttgaagataccagctatggttacaaggattttagcaggcacggcatgcatgtgcccactttccgggtgcaggattattgttgggaggatcatggctactccctggttaaccggctgtacccggacgtgggtcaactgattgatgaaaaatttcatatcgcttacaatctcacttacaacacaatggcaatgcataaagacgttgatacctccatgcttagaagggccatctggaattacatccattgtatgtttggaatccggtatgatgactacgattacggcgaaatcaatcagctcttggatcgttctttcaaggtttatattaagactgtggtttgtacgcccgaaaaggtgacaaagcgtatgtacgattcattctggcgtcagttcaagcactcagagaaagtgcatgtgaatcttctcctgatagaggcccgcatgcaggcggagcttctctatgcgttgcgggcgataacgagatacatgacctag

SEQ ID NO: 180187 - DNA, 1656 bp, Artificial Sequence
  derived and/or modified sequence
atggctgaaggggagaacgaggtgagatgggatgggctgtgctccagagattccacgactcgagaaactgctctagaaaatatcagacagactatactccggaaaacagagtacctgagaagcgtgaaggaaaccccccatagacccagcgatggcctgagcaacactgaatcttccgacggtcttaataagctattagcccatctgctgatgctgagtaaacgatgcccttttaaggatgtgagggagaaatctgaatttatcctgaaatctatccaggagttaggcatccgtatccccaggccccttgggcagggcccatctcgtttcataccagaaaaggagatccttcaggttggctctgaggatgcccagatgcacgccctctttgctgacagctttgccgcactgggaaggttagacaacattactctggtgatggtgtttcacccgcagtatctggaatcgtttctcaagactcaacactatctcctacagatggacggcccactcccacttcattaccggcactatattggcatcatggccgcagctagacaccagtgcagctacctggtgaacctgcatgtgaacgactttctgcacgtggggggagatcctaaatggctcaacggactggagaatgctccccagaagctccagaacctcggagaactgaacaaggtactggcgcaccggccatggttgattaccaaggagcacatcgaggggctgctcaaagcagaggaacactcctggagcttggcagagctcgtacatgccgtggtattgctgactcattaccactccttggcgtcgttcactttcggctgtggcatctcacccgagatccactgtgacggaggacatacgtttcggccaccaagtgtctccaactactgcatatgcgacatcaccaacggcaaccattcagtggatgagatgcctgtcaattccgccgaaaacgtgagtgtatcagattctttcttcgaggtggaagctctgatggagaaaatgaggcaactacaggagtgccgggatgaagaagaggcttcacaggaggagatggcctctaggtttgaaatcgagaaacgggagtcaatgttcgtgttctcttccgacgatgaggaggtgactcctgcccgtgcagttagccggcacttcgaggatacctcctacgggtataaagatttctccaggcacggaatgcatgtccccacctttagggtacaggattattgctgggaagaccacgggtatagcctggtgaatagattgtatcccgacgtggggcagctcattgacgagaagttccatattgcttacaacctcacctataataccatggccatgcataaggacgttgatacctccatgctgaggcgggcaatttggaactacatccactgcatgttcggcatccgctacgacgactacgactatggcgagattaaccaactactggatagatcttttaaggtctatataaaaactgtggtctgtacacccgagaaagtcacgaagaggatgtatgactcattctggcggcaattcaagcacagcgaaaaggttcacgtaaatctcctgctgatcgaagctaggatgcaggcagagctcctgtacgcactcagagctatcacaaggtatatgacatag

SEQ ID NO: 180188 - DNA, 3509 bp, Artificial Sequence
  derived and/or modified sequence
gattgccagggccgccctgtgccctctggctcggcggtggtgggcgagggctcagggatcggagaagtagcgtcttcccgggggtgccgaattggcggggctgggggacgctttttttcaccgccgcccgccgagactacggctgcccgagactgccgccctccgacagcgcccaagcctccggccgctgcggccagtgggccagggttcggcgagccttccctgccggcgccggccggctgctgaggcgctgggaggagctgcggagggcggggactggtgtcggagaaggggcggggtgggaacgccggagagaacccggtggctgcacagacaaaaaagccccgaatggctggagggcgttcagctgttaacagccttttggggcagagcacggatttgacagctccacaacgtgaggatatccactgaccccgcgagacggaggagaacgcttccccgaaattctctgcccaccaaagccagcgctgcaaggttgcaactttcaaactttgtttttccagaaagaagactgccctttcgtgtacaaggagagggtgagagggtgacctagcttgtagatcggctgaaggcaccagtggttccaaatgtcacccagatgtgtgttttcatgacgatttgatttctctgattttatttttacatttttcattttaaaaatacaaagcaatttttttggggcatgctgaaaggtaactgaagaccgcaaaggaaaaactattgtcatggctgaaggagagaatgaagtgagatgggatggactctgcagcagagattcaactactagggagacagcattggaaaacattaggcaaaccattttgaggaaaaccgagtatcttcgttcggtgaaagaaacacctcatcgtccatcagacgggctttcaaataccgagtcttcggatgggttgaataagctacttgctcatctgcttatgctttctaagaggtgtcccttcaaagatgtgagagagaaaagtgagtttattctgaagagcatccaggaacttggcattagaattcctcgaccactaggacagggaccaagcagattcatcccagaaaaggagatcctccaagtggggagtgaagacgcacagatgcatgctttatttgcagattcttttgctgctttgggccgtttggataacattacgttagtgatggttttccacccacaatatttagaaagtttcttaaaaactcagcactatctactgcaaatggatgggccgttacccctacattatcgtcactacattggaataatggctgcggcaagacatcagtgctcctacttagtgaacctgcatgtaaatgatttccttcatgttggtggggaccccaagtggctcaatggtttagagaatgctcctcaaaaactacagaatttaggagaacttaacaaagtgttagcccatagaccttggcttattaccaaagaacacattgagggacttttaaaagctgaagagcacagctggtcccttgcggaattggtacatgcagtagttttactcacacactatcattctcttgcctcattcacattcggctgtggaatcagtccagaaattcattgtgatggtggccacacattcagacctccttctgttagcaactactgcatctgtgacattacaaatggcaatcacagtgtggatgagatgccggtcaactcagcagaaaatgtttctgtaagtgattctttctttgaggttgaagccctcatggaaaagatgaggcagttacaggaatgtcgagatgaagaagaggcaagtcaggaagagatggcttcacgttttgaaatagaaaaaagagagagtatgtttgtcttctcttcagatgatgaagaagttacaccagcaagagctgtatctcgtcattttgaggatactagttatggctataaagatttctctagacatgggatgcatgttccaacatttcgtgtccaggactattgctgggaagatcatggttattctttggtaaatcgcctttatccagatgtgggacagttgattgatgaaaaatttcacattgcttacaatcttacttataatacaatggcaatgcacaaagatgttgatacctcaatgcttagacgggcaatttggaactatattcactgcatgtttggaataagatatgatgattatgactatggtgaaattaaccagctattggatcgtagctttaaagtttatatcaaaactgttgtttgcactcctgaaaaggttaccaaaagaatgtatgatagcttctggaggcagttcaagcactctgagaaggttcatgttaatctgcttcttatagaagctaggatgcaagcagaactcctttatgctctgagagccattacccgctatatgacctgatgcctttccttcattaaagatgattctggaatgatcagcagatatagtctacaagggggaaggtactaagccccaggaccaatggtagacaaaataattcagaaatccattgtgccatgattcctttagtttctgctatttttctgtggaaaaccactgctggcacaagcagtgactgtttggcagcttcaagtttagagctgtgaagacaggctgccattcacagtattttgctttttgacagtacaagatgctgtgtaactgttttaatacagcaaatagtaactctccaaatcctgttgcttttatgttaaataagataacaagaattggagcatgcaaagaatgggacttggataatgacttaagctttatatgtaaagaattttagaagatcttggtgctgctattcctgctggaggaatgaatagatggctgtttcagttaagctattagtaataaaagtgaacattgctactatctgagcctacatacataacttgtgtgatttcaaattaaacttgcattatgtgttaattttcttgcatctaaaaaagcatagaattcctactcacacagctcagcaacaaccattttgatggtaacagttaatttctttcattagttttttaaattcagggttctggatattaaattaaaatggcattcttaaagattttcttcaaaaagcaatcctaaatgaaagtgtgtaaattataagaagctggcgatcttttgatatgctgtttcacaggatcctgacactggagggcagctgtcttgtgcattacttgtgtttccagcaccaaagttgtgggacatgttgctgtagactgctgcgcagtcctgggtgcattcagtctctctgcctctgcctgcctcctggtccccactttaaaggctgtgcagctccttaaataataaagctggaaaatatttttagtcgggttatcaaatttgatttacaaaaacgctaactttgtttgaaatgcaaacaggtttgaaaatatgtattaagtactttgtattctggaagcgtgaattgcttttgaagtctgtcagtattactggtatttttaaataaagaagaatttttctccaatttta

SEQ ID NO: 180189 - DNA, 1656 bp, Artificial Sequence
  derived and/or modified sequence
atggccgagggcgagaacgaggtgagatgggacggcctgtgcagcagagacagcaccaccagagagaccgccctggagaacatcagacagaccatcctgagaaagaccgagtacctgagaagcgtgaaggagaccccccacagacccagcgacggcctgagcaacaccgagagcagcgacggcctgaacaagctgctggcccacctgctgatgctgagcaagagatgccccttcaaggacgtgagagagaagagcgagttcatcctgaagagcatccaggagctgggcatcagaatccccagacccctgggccagggccccagcagattcatccccgagaaggagatcctgcaggtgggcagcgaggacgcccagatgcacgccctgttcgccgacagcttcgccgccctgggcagactggacaacatcaccctggtgatggtgttccacccccagtacctggagagcttcctgaagacccagcactacctgctgcagatggacggccccctgcccctgcactacagacactacatcggcatcatggccgccgccagacaccagtgcagctacctggtgaacctgcacgtgaacgacttcctgcacgtgggcggcgaccccaagtggctgaacggcctggagaacgccccccagaagctgcagaacctgggcgagctgaacaaggtgctggcccacagaccctggctgatcaccaaggagcacatcgagggcctgctgaaggccgaggagcacagctggagcctggccgagctggtgcacgccgtggtgctgctgacccactaccacagcctggccagcttcaccttcggctgcggcatcagccccgagatccactgcgacggcggccacaccttcagaccccccagcgtgagcaactactgcatctgcgacatcaccaacggcaaccacagcgtggacgagatgcccgtgaacagcgccgagaacgtgagcgtgagcgacagcttcttcgaggtggaggccctgatggagaagatgagacagctgcaggagtgcagagacgaggaggaggccagccaggaggagatggccagcagattcgagatcgagaagagagagagcatgttcgtgttcagcagcgacgacgaggaggtgacccccgccagagccgtgagcagacacttcgaggacaccagctacggctacaaggacttcagcagacacggcatgcacgtgcccaccttcagagtgcaggactactgctgggaggaccacggctacagcctggtgaacagactgtaccccgacgtgggccagctgatcgacgagaagttccacatcgcctacaacctgacctacaacaccatggccatgcacaaggacgtggacaccagcatgctgagaagagccatctggaactacatccactgcatgttcggcatcagatacgacgactacgactacggcgagatcaaccagctgctggacagaagcttcaaggtgtacatcaagaccgtggtgtgcacccccgagaaggtgaccaagagaatgtacgacagcttctggagacagttcaagcacagcgagaaggtgcacgtgaacctgctgctgatcgaggccagaatgcaggccgagctgctgtacgccctgagagccatcaccagatacatgacctag

SEQ ID NO: 180190 - protein, 469 aa, Artificial Sequence
  derived and/or modified sequence
MDVENEQILNVNPADPDNLSDSLFSGDEENAGTEEIKNEINGNWISASSINEARINAKAKRRLRKNSSRDSGRGDSVSDSGSDALRSGLTVPTSPKGRLLDRRSRSGKGRGLPKKGGAGGKGVWGTPGQVYDVEEVDVKDPNYDDDQENCVYETVVLPLDERAFEKTLTPIIQEYFEHGDTNEVAEMLRDLNLGEMKSGVPVLAVSLALEGKASHREMTSKLLSDLCGTVMSTTDVEKSFDKLLKDLPELALDTPRAPQLVGQFIARAVGDGILCNTYIDSYKGTVDCVQARAALDKATVLLSMSKGGKRKDSVWGSGGGQQSVNHLVKEIDMLLKEYLLSGDISEAEHCLKELEVPHFHHELVYEAIIMVLESTGESTFKMILDLLKSLWKSSTITVDQMKRGYERIYNEIPDINLDVPHSYSVLERFVEECFQAGIISKQLRDLCPSRGRKRFVSEGDGGRLKPESY

SEQ ID NO: 180191 - DNA, 1410 bp, Artificial Sequence
  derived and/or modified sequence
atggacgtggagaacgagcagatcctgaacgtgaaccccgccgaccccgacaacctgagcgacagcctgttcagcggcgacgaggagaacgccggcaccgaggagatcaagaacgagatcaacggcaactggatcagcgccagcagcatcaacgaggccagaatcaacgccaaggccaagagaagactgagaaagaacagcagcagagacagcggcagaggcgacagcgtgagcgacagcggcagcgacgccctgagaagcggcctgaccgtgcccaccagccccaagggcagactgctggacagaagaagcagaagcggcaagggcagaggcctgcccaagaagggcggcgccggcggcaagggcgtgtggggcacccccggccaggtgtacgacgtggaggaggtggacgtgaaggaccccaactacgacgacgaccaggagaactgcgtgtacgagaccgtggtgctgcccctggacgagagagccttcgagaagaccctgacccccatcatccaggagtacttcgagcacggcgacaccaacgaggtggccgagatgctgagagacctgaacctgggcgagatgaagagcggcgtgcccgtgctggccgtgagcctggccctggagggcaaggccagccacagagagatgaccagcaagctgctgagcgacctgtgcggcaccgtgatgagcaccaccgacgtggagaagagcttcgacaagctgctgaaggacctgcccgagctggccctggacacccccagagccccccagctggtgggccagttcatcgccagagccgtgggcgacggcatcctgtgcaacacctacatcgacagctacaagggcaccgtggactgcgtgcaggccagagccgccctggacaaggccaccgtgctgctgagcatgagcaagggcggcaagagaaaggacagcgtgtggggcagcggcggcggccagcagagcgtgaaccacctggtgaaggagatcgacatgctgctgaaggagtacctgctgagcggcgacatcagcgaggccgagcactgcctgaaggagctggaggtgccccacttccaccacgagctggtgtacgaggccatcatcatggtgctggagagcaccggcgagagcaccttcaagatgatcctggacctgctgaagagcctgtggaagagcagcaccatcaccgtggaccagatgaagagaggctacgagagaatctacaacgagatccccgacatcaacctggacgtgccccacagctacagcgtgctggagagattcgtggaggagtgcttccaggccggcatcatcagcaagcagctgagagacctgtgccccagcagaggcagaaagagattcgtgagcgagggcgacggcggcagactgaagcccgagagctactag

SEQ ID NO: 180192 - DNA, 1410 bp, Artificial Sequence
  derived and/or modified sequence
atggatgtcgaaaatgaacagatcctcaatgtaaatcctgcggacccagataatctgtccgactcactcttcagcggcgatgaggagaacgccggcaccgaggagatcaaaaatgaaattaatggcaattggatcagcgccagttccatcaacgaagctagaatcaacgctaaagccaagagacgcctacgcaagaatagctcccgggatagcggtcgcggcgacagtgtctccgactctgggagtgacgctctccgctctggcctgaccgttccaacctcgcctaagggcaggctgctggaccgccgatctaggtccggaaagggcagaggccttccaaagaaggggggtgcaggaggcaagggggtgtggggaacacctggccaggtttacgatgtggaggaagtagatgtgaaagatcccaattacgacgacgatcaagaaaactgtgtgtatgagacggtggtgctccccctggacgagcgcgccttcgagaagacacttacacctattatccaagagtacttcgagcacggagacactaatgaggtagcggaaatgttacgcgacctgaatctaggagagatgaagtctggggtaccagtactggctgtgtcgctggctctggagggaaaagcaagccacagagagatgaccagtaaattgctgagcgatctgtgtggcaccgtgatgagtactaccgacgtcgaaaagtcttttgacaagttgttgaaagacctgcctgagctggccctcgacactccccgggccccccaactggtgggccaattcatagcaagagctgtaggagacggtattctctgcaacacctacatcgatagttacaagggtaccgtcgactgcgtacaagcgcgggctgcgctcgacaaggcaactgtcctgttgtccatgtcaaaaggtggaaaaaggaaagatagtgtgtggggcagcggtggaggtcaacagtctgtgaaccacctcgtaaaggagattgatatgcttctgaaggagtacctgttgtcgggggatatctcagaagccgaacactgtttaaaggaacttgaagtgccccacttccaccatgagctcgtctatgaggccatcataatggtgctcgaaagcacaggcgaaagtacctttaaaatgatcctggacttactgaagagcctctggaagagttcgaccattaccgtcgaccagatgaaaagaggttacgagcgcatttataacgagatcccagatataaacctagatgtaccccatagctactctgttctcgagaggtttgtggaggaatgttttcaagcgggtatcatatctaaacagctcagagacctgtgtcccagcagagggcgcaagcgattcgttagtgagggagacggcgggagactgaaacctgaaagttactag

SEQ ID NO: 180193 - DNA, 1410 bp, Artificial Sequence
  derived and/or modified sequence
atggatgtggagaatgagcagatcctgaatgtgaacccagctgaccctgacaacctgagtgacagcctcttctctggagatgaagaaaatgccggcacagaggagatcaagaatgagatcaatggaaactggatcagcgccagcagcatcaatgaggcccgcatcaatgccaaggccaagaggcggctgaggaagaacagcagccgggacagcggccgcggggacagcgtgtctgacagcggcagtgatgccctgcggagcggcctgactgtgcccaccagccccaagggccgcctgctggaccggcgcagccgcagcggcaagggccggggcctgcccaagaagggcggggccggcggcaaaggagtgtggggcaccccaggccaggtgtatgatgtggaggaggtggatgtgaaggaccccaactatgatgatgaccaggagaactgtgtgtatgagaccgtggtgctgcccctggatgagcgggcctttgagaagaccctgacccccatcatccaggagtactttgagcacggggacaccaatgaggtggccgagatgctgcgggacctgaacctgggggagatgaagagcggcgtgcctgtgctggccgtgtccctggccctggagggcaaggccagccaccgggagatgaccagcaagctgctgagtgacctgtgtggcaccgtgatgagcaccacagatgtggagaagagctttgacaagctgctgaaggacctgcctgagctggccctggacaccccccgggccccccagctggtgggccagttcatcgcccgggctgtgggagatggcatcctgtgcaacacctacatcgacagctacaagggcaccgtggactgtgtgcaggcccgggccgccctggacaaggccaccgtgctgctgtccatgagcaagggcggcaagaggaaggacagcgtgtggggcagcggcggcggccagcagagcgtgaaccacctggtgaaggagattgacatgctgctgaaggagtacctgctgagcggggacatcagcgaggccgagcactgcctgaaggagctggaggtgccccacttccaccacgagctggtgtatgaggccatcatcatggtgctggagagcactggagagagcaccttcaagatgatcctggacctgctgaagagcctgtggaagagcagcaccatcaccgtggaccagatgaagaggggctatgagcgcatctacaatgagatcccagacatcaacctggatgtgccccacagctacagcgtgctggagagatttgtggaggagtgcttccaggccggcatcatcagcaagcagctgcgggacctgtgccccagccggggcaggaagagatttgtgtctgaaggagatggcggccgcctgaagccagagagctactag

SEQ ID NO: 180194 - DNA, 1410 bp, Artificial Sequence
  derived and/or modified sequence
atggacgtggagaacgagcagatcctgaacgtgaaccccgccgaccctgataacctttcagattccctgttctccggtgacgaagagaatgcaggaaccgaggaaatcaaaaatgaaattaacgggaactggatcagtgcctcttctataaacgaggcccgtatcaacgccaaggccaaacgcagattgaggaaaaatagttcccgagattccggaaggggagactctgtatccgattcagggagtgacgctctcagatctggtttgaccgtacctacgtcacccaaaggcaggctgctggatcggcgcagtagatctggaaaaggcaggggcttgcccaaaaagggcggcgctggcggcaagggggtctggggtacgccaggccaagtatacgatgtagaagaagtggacgtgaaagaccccaattatgatgacgaccaggagaattgtgtttatgaaaccgttgtcctgcctttagacgagcgggccttcgaaaaaactctgaccccgataatccaggagtatttcgagcatggggacaccaatgaagtggcggagatgctgcgtgaccttaacctgggagaaatgaaatccggggtccctgtgctcgctgtgagtcttgcgctggagggcaaagccagccacagggagatgacttctaaactcctcagcgacctgtgtggcactgtcatgagcactaccgatgtggaaaaatcctttgacaagctccttaaggatctgcctgaacttgccttggacaccccgcgagcaccacagctcgtgggacagtttattgcccgcgccgtgggtgacggcatactgtgcaacacatacatcgactcttataagggcacagtggactgcgttcaagctagggccgcgctggacaaagccacagtcctgttgtccatgtcgaagggaggcaaacgaaaagatagtgtttggggcagcggtgggggccaacaaagcgtgaaccacctggtcaaggaaatcgatatgctcttaaaagagtatcttctatcaggtgatatttcagaggcagaacattgcctgaaggagctggaagtgccacatttccaccacgagttagtttacgaagccattatcatggtgctggagagtactggagagtctacatttaagatgattctcgatctgctcaagtcattgtggaaaagctccacgattaccgtggaccagatgaagcgcggctacgagagaatatacaatgagataccagacattaaccttgatgttccacacagttattctgtccttgaacgttttgtggaggagtgctttcaggccggcattataagcaaacagcttcgggacctgtgtccgtcccgaggcaggaaacgcttcgtcagtgaaggagacgggggtcggctaaaacctgagagctattag

SEQ ID NO: 180195 - DNA, 1410 bp, Artificial Sequence
  derived and/or modified sequence
atggacgtggagaacgagcagatcttaaacgtgaaccccgctgaccccgataatttaagcgatagtctgttttcaggcgatgaggagaacgccggaactgaggagatcaagaacgagatcaatgggaattggatctctgctagctccattaatgaggcccgtatcaatgctaaagccaaaagaaggctcagaaaaaacagctctcgagactcagggcgaggggatagcgtgtccgatagtggcagcgatgcccttcgctcagggctgacggtccctacctccccgaagggccgattgctggacaggcggtcacggtctggaaaagggcgaggactaccaaagaaaggaggtgctggtggcaagggcgtgtggggcactcctggacaggtttatgacgtggaagaggtcgacgtgaaagaccctaactacgatgacgaccaggaaaactgtgtctatgaaacggtggtgctcccactcgatgagcgggcttttgaaaagactcttacacctatcatccaagaatattttgaacacggcgatacaaacgaagtggccgagatgttgagagatctgaatttgggcgaaatgaaaagtggcgtaccagtcctagcagtgtccctggcattggagggcaaagcctctcacagggagatgacgagcaagttgctaagcgatctctgcggaacagtcatgagcacaactgacgtggaaaagtcctttgataagctgctgaaggatctgccagaactggccttagacacccctcgggctcctcagctcgtcgggcagtttattgccagagctgtgggggacggcattctgtgtaatacatacattgacagttacaaaggcacggtggattgtgtgcaggccagagcagcccttgacaaggctactgtgcttttgtctatgagtaagggcggaaaaagaaaggatagtgtttggggctccggcggaggccagcagtcagtgaaccacttagtgaaggagatcgatatgttattgaaggagtatttactttctggcgacatctctgaggctgagcattgcttgaaggagttggaggtccctcattttcatcatgagctcgtgtacgaggctattattatggtgctcgagtcaacgggggagagtacttttaagatgatcctagatttactgaagtcactgtggaagtctagtaccataaccgtggatcagatgaagcggggttatgagcgcatctacaatgagattcccgacattaatcttgatgtgccccattcctactctgtgctggagcgctttgtggaggagtgcttccaggctggaataatcagtaaacagctgcgagatctgtgcccaagccggggacgtaaaagatttgtgagcgagggggacggaggtcgcctgaaacctgagtcctattag

SEQ ID NO: 180196 - DNA, 3602 bp, Artificial Sequence
  derived and/or modified sequence
agctccggctccgccgccacgattggccagccgaccacccggcctcggccaataagcgccgccctctcgcccccgtgttactgggtagaagaaaacaaaaacaaacagagcgagaagggccagagactctccgaggcggcggcagagacagaagagcggggtcggggccggctgaccaggaacctgggcgagcagcggcgggggcccgagggattctgaaggaagatttccattaggtaatttgtttaatcagtgcaagcgaaattaagggaaaatggatgtagaaaatgagcagatactgaatgtaaaccctgcagatcctgataacttaagtgactctctcttttccggtgatgaagaaaatgctgggactgaggaaataaagaatgaaataaatggaaattggatttcagcatcctccattaacgaagctagaattaatgccaaggcaaaaaggcgactaaggaaaaactcatcccgggactctggcagaggcgattcggtcagcgacagtgggagtgacgcccttagaagtggattaactgtgccaaccagtccaaagggaaggttgctggataggcgatccagatctgggaaaggaaggggactaccaaagaaaggtggtgcaggaggcaaaggtgtctggggtacacctggacaggtgtatgatgtggaggaggtggatgtgaaagatcctaactatgatgatgaccaggagaactgtgtttatgaaactgtagttttgcctttggatgaaagggcatttgagaagactttaacaccaatcatacaggaatattttgagcatggagatactaatgaagttgcggaaatgttaagagatttaaatcttggtgaaatgaaaagtggagtaccagtgttggcagtatccttagcattggaggggaaggctagtcatagagagatgacatctaagcttctttctgacctttgtgggacagtaatgagcacaactgatgtggaaaaatcatttgataaattgttgaaagatctacctgaattagcactggatactcctagagcaccacagttggtgggccagtttattgctagagctgttggagatggaattttatgtaatacctatattgatagttacaaaggaactgtagattgtgtgcaggctagagctgctctggataaggctaccgtgcttctgagtatgtctaaaggtggaaagcgtaaagatagtgtgtggggctctggaggtgggcagcaatctgtcaatcaccttgttaaagagattgatatgctgctgaaagaatatttactctctggagacatatctgaagctgaacattgccttaaggaactggaagtacctcattttcaccatgagcttgtatatgaagctattataatggttttagagtcaactggagaaagtacatttaagatgattttggatttattaaagtccctttggaagtcttctaccattactgtagaccaaatgaaaagaggttatgagagaatttacaatgaaattccggacattaatctggatgtcccacattcatactctgtgctggagcggtttgtagaagaatgttttcaggctggaataatttccaaacaactcagagatctttgtccttcaaggggcagaaagcgttttgtaagcgaaggagatggaggtcgtcttaaaccagagagctactgaatataagaactcttgcagtcttagatgttataaaaatatatatctgaattgtaagagttgttagcacaagttttttttttttttttttttaagcacttgttttgggtacaaggcatttctgacattttataaacctacatttaaggggaatttttaaaggaaatgttttttcttttttttttgtttttcgagggggcaaggagggacagaaaagtaacctcttcttaagtggaatattctaataagctaccttttgtaagtgccatgtttattatctaatcattccaagttttgcattgatgtctgactgccactcctttctttcaaggacagtgttttttgtagtaaaatcactggtttatacaaagctttatttagggggtaaagttaagctgctaaaaccccatgttggctgctgctgttgagatactgtgctttgggagtaaaaaaagaaagttatttctttgtcttaaagaatttttaaaaaattagtcatgagacttattcatctttccagggaacatactgattggtcttaaaagactagacagttaagtaaaaggtggctggaacatctatttttctacaaaactggaaaaatgaacctggttctagaagaatgtacaccaaaataaaacatgtgaagcagtattgattctttattgggagtacatttttttaggtctcttaaactttaatttcacacagtaaattttgaatctcataaggaagcatatttgaacctagtcaatttaatcttagtgttcccttgaaaactttttttccctacaaaattttaagtgaaaaatacaatagtaaattaagattacactggggaaaaaaatgcaggtatcactttactccattgttatctgacctagagcttaattaagttttagaaatatgtaataccttccatcattccatcatccttaaattctgttaccaaataatggctaatgttacaaaaagttatactccagagacccaaagcttgacatttacctaatgtatgagaaaatattaccaattaacaataaagaatgatcatatttttaacctcttttacatagcctaataactcagcaaggcctcaacgtctgtgctaatttaaactgccaaatattgactgcagcaaacaagaattatattcagaatttatgagggtactgttaggagtatactgcttacaggtttagatatagtctgttagaattaaaaccaagtttagtgttcatatttacctcatgggctttatcaagcccatattacctcagcttatatatagttaccatttttaggtttttaattgtttgacacttggatgataaatgcagtcattttattctcaagtgcttaaaattaatgtaattaaaagcttagctgactacagaataggtgagggtttcttaaaaatgagatttaagggctgggcacggtggctcatgcctgtaatcccagcactttgggaggccgaggtgggcggatcacttgaggttgggagttcatgaccagcttgaccaacatgaagaaaccctgtctctattaaaaatacaaaagtagccaggcatggtggcgcatgcgtgtaatcccagctacttgggaggctgaggcaggagaattgcttgaacctgggaggcagaggttgcagtgagtcgagatggtgccattgctctcgtttgggcaacaagagtgaaactcttgtctcaaaaaaaaaaaaaaatgaggtttaagacagttttgtcattactggtgggatctggtcacacaagatagcattaaacgtgacatggcacataaaattggttaaaaaattttgttttttaattacgtaatgtaaaagcccaacaaacactttatgcaagattggaatgtatcttcaaattcagatttaataaacatgtaaagatcctctgta

SEQ ID NO: 180197 - DNA, 3654 bp, Artificial Sequence
  derived and/or modified sequence
cgaccacccggcctcggccaataagcgccgccctctcgcccccgtgttactgggtagaagaaaacaaaaacaaacagagcgagaagggccagagactctccgaggcggcggcagagacagaagagcggggtcggggccggctgaccaggaacctgggcgagcagcggcgggggcccgagggattctgaaggaagatttccattaggtaatttgtttaatcagtgcaagcgaaattaagggaaaatggatgtagaaaatgagcagatactgaatgtaaaccctgcagggtattttccctaattctccatggtgcttcaatagcatgttattatcataaaaatgaacagttttgtggaatagatgaccaaatatcctgataacttaagtgactctctcttttccggtgatgaagaaaatgctgggactgaggaaataaagaatgaaataaatggaaattggatttcagcatcctccattaacgaagctagaattaatgccaaggcaaaaaggcgactaaggaaaaactcatcccgggactctggcagaggcgattcggtcagcgacagtgggagtgacgcccttagaagtggattaactgtgccaaccagtccaaagggaaggttgctggataggcgatccagatctgggaaaggaaggggactaccaaagaaaggtggtgcaggaggcaaaggtgtctggggtacacctggacaggtgtatgatgtggaggaggtggatgtgaaagatcctaactatgatgatgaccaggagaactgtgtttatgaaactgtagttttgcctttggatgaaagggcatttgagaagactttaacaccaatcatacaggaatattttgagcatggagatactaatgaagttgcggaaatgttaagagatttaaatcttggtgaaatgaaaagtggagtaccagtgttggcagtatccttagcattggaggggaaggctagtcatagagagatgacatctaagcttctttctgacctttgtgggacagtaatgagcacaactgatgtggaaaaatcatttgataaattgttgaaagatctacctgaattagcactggatactcctagagcaccacagttggtgggccagtttattgctagagctgttggagatggaattttatgtaatacctatattgatagttacaaaggaactgtagattgtgtgcaggctagagctgctctggataaggctaccgtgcttctgagtatgtctaaaggtggaaagcgtaaagatagtgtgtggggctctggaggtgggcagcaatctgtcaatcaccttgttaaagagattgatatgctgctgaaagaatatttactctctggagacatatctgaagctgaacattgccttaaggaactggaagtacctcattttcaccatgagcttgtatatgaagctattataatggttttagagtcaactggagaaagtacatttaagatgattttggatttattaaagtccctttggaagtcttctaccattactgtagaccaaatgaaaagaggttatgagagaatttacaatgaaattccggacattaatctggatgtcccacattcatactctgtgctggagcggtttgtagaagaatgttttcaggctggaataatttccaaacaactcagagatctttgtccttcaaggggcagaaagcgttttgtaagcgaaggagatggaggtcgtcttaaaccagagagctactgaatataagaactcttgcagtcttagatgttataaaaatatatatctgaattgtaagagttgttagcacaagttttttttttttttttttttaagcacttgttttgggtacaaggcatttctgacattttataaacctacatttaaggggaatttttaaaggaaatgttttttcttttttttttgtttttcgagggggcaaggagggacagaaaagtaacctcttcttaagtggaatattctaataagctaccttttgtaagtgccatgtttattatctaatcattccaagttttgcattgatgtctgactgccactcctttctttcaaggacagtgttttttgtagtaaaatcactggtttatacaaagctttatttagggggtaaagttaagctgctaaaaccccatgttggctgctgctgttgagatactgtgctttgggagtaaaaaaagaaagttatttctttgtcttaaagaatttttaaaaaattagtcatgagacttattcatctttccagggaacatactgattggtcttaaaagactagacagttaagtaaaaggtggctggaacatctatttttctacaaaactggaaaaatgaacctggttctagaagaatgtacaccaaaataaaacatgtgaagcagtattgattctttattgggagtacatttttttaggtctcttaaactttaatttcacacagtaaattttgaatctcataaggaagcatatttgaacctagtcaatttaatcttagtgttcccttgaaaactttttttccctacaaaattttaagtgaaaaatacaatagtaaattaagattacactggggaaaaaaatgcaggtatcactttactccattgttatctgacctagagcttaattaagttttagaaatatgtaataccttccatcattccatcatccttaaattctgttaccaaataatggctaatgttacaaaaagttatactccagagacccaaagcttgacatttacctaatgtatgagaaaatattaccaattaacaataaagaatgatcatatttttaacctcttttacatagcctaataactcagcaaggcctcaacgtctgtgctaatttaaactgccaaatattgactgcagcaaacaagaattatattcagaatttatgagggtactgttaggagtatactgcttacaggtttagatatagtctgttagaattaaaaccaagtttagtgttcatatttacctcatgggctttatcaagcccatattacctcagcttatatatagttaccatttttaggtttttaattgtttgacacttggatgataaatgcagtcattttattctcaagtgcttaaaattaatgtaattaaaagcttagctgactacagaataggtgagggtttcttaaaaatgagatttaagggctgggcacggtggctcatgcctgtaatcccagcactttgggaggccgaggtgggcggatcacttgaggttgggagttcatgaccagcttgaccaacatgaagaaaccctgtctctattaaaaatacaaaagtagccaggcatggtggcgcatgcgtgtaatcccagctacttgggaggctgaggcaggagaattgcttgaacctgggaggcagaggttgcagtgagtcgagatggtgccattgctctcgtttgggcaacaagagtgaaactcttgtctcaaaaaaaaaaaaaaatgaggtttaagacagttttgtcattactggtgggatctggtcacacaagatagcattaaacgtgacatggcacataaaattggttaaaaaattttgttttttaattacgtaatgtaaaagcccaacaaacactttatgcaagattggaatgtatcttcaaattcagatttaataaacatgtaaagatcctctgt

SEQ ID NO: 180198 - protein, 609 aa, Artificial Sequence
  derived and/or modified sequence
MEGKPMRRCTNIRPGETGMDVTSRCTLGDPNKLPEGVPQPARMPYISDKHPRQTLEVINLLRKHRELCDVVLVVGAKKIYAHRVILSACSPYFRAMFTGELAESRQTEVVIRDIDERAMELLIDFAYTSQITVEEGNVQTLLPAACLLQLAEIQEACCEFLKRQLDPSNCLGIRAFADTHSCRELLRIADKFTQHNFQEVMESEEFMLLPANQLIDIISSDELNVRSEEQVFNAVMAWVKYSIQERRPQLPQVLQHVRLPLLSPKFLVGTVGSDPLIKSDEECRDLVDEAKNYLLLPQERPLMQGPRTRPRKPIRCGEVLFAVGGWCSGDAISSVERYDPQTNEWRMVASMSKRRCGVGVSVLDDLLYAVGGHDGSSYLNSVERYDPKTNQWSSDVAPTSTCRTSVGVAVLGGFLYAVGGQDGVSCLNIVERYDPKENKWTRVASMSTRRLGVAVAVLGGFLYAVGGSDGTSPLNTVERYNPQENRWHTIAPMGTRRKHLGCAVYQDMIYAVGGRDDTTELSSAERYNPRTNQWSPVVAMTSRRSGVGLAVVNGQLMAVGGFDGTTYLKTIEVFDPDANTWRLYGGMNYRRLGGGVGVIKMTHCESHIW

SEQ ID NO: 180199 - protein, 420 aa, Artificial Sequence
  derived and/or modified sequence
MVHGRKANAQVMESEEFMLLPANQLIDIISSDELNVRSEEQVFNAVMAWVKYSIQERRPQLPQVLQHVRLPLLSPKFLVGTVGSDPLIKSDEECRDLVDEAKNYLLLPQERPLMQGPRTRPRKPIRCGEVLFAVGGWCSGDAISSVERYDPQTNEWRMVASMSKRRCGVGVSVLDDLLYAVGGHDGSSYLNSVERYDPKTNQWSSDVAPTSTCRTSVGVAVLGGFLYAVGGQDGVSCLNIVERYDPKENKWTRVASMSTRRLGVAVAVLGGFLYAVGGSDGTSPLNTVERYNPQENRWHTIAPMGTRRKHLGCAVYQDMIYAVGGRDDTTELSSAERYNPRTNQWSPVVAMTSRRSGVGLAVVNGQLMAVGGFDGTTYLKTIEVFDPDANTWRLYGGMNYRRLGGGVGVIKMTHCESHIW

SEQ ID NO: 180200 - DNA, 1263 bp, Artificial Sequence
  derived and/or modified sequence
atggtgcacggcagaaaggccaacgcccaggtgatggagagcgaggagttcatgctgctgcccgccaaccagctgatcgacatcatcagcagcgacgagctgaacgtgagaagcgaggagcaggtgttcaacgccgtgatggcctgggtgaagtacagcatccaggagagaagaccccagctgccccaggtgctgcagcacgtgagactgcccctgctgagccccaagttcctggtgggcaccgtgggcagcgaccccctgatcaagagcgacgaggagtgcagagacctggtggacgaggccaagaactacctgctgctgccccaggagagacccctgatgcagggccccagaaccagacccagaaagcccatcagatgcggcgaggtgctgttcgccgtgggcggctggtgcagcggcgacgccatcagcagcgtggagagatacgacccccagaccaacgagtggagaatggtggccagcatgagcaagagaagatgcggcgtgggcgtgagcgtgctggacgacctgctgtacgccgtgggcggccacgacggcagcagctacctgaacagcgtggagagatacgaccccaagaccaaccagtggagcagcgacgtggcccccaccagcacctgcagaaccagcgtgggcgtggccgtgctgggcggcttcctgtacgccgtgggcggccaggacggcgtgagctgcctgaacatcgtggagagatacgaccccaaggagaacaagtggaccagagtggccagcatgagcaccagaagactgggcgtggccgtggccgtgctgggcggcttcctgtacgccgtgggcggcagcgacggcaccagccccctgaacaccgtggagagatacaacccccaggagaacagatggcacaccatcgcccccatgggcaccagaagaaagcacctgggctgcgccgtgtaccaggacatgatctacgccgtgggcggcagagacgacaccaccgagctgagcagcgccgagagatacaaccccagaaccaaccagtggagccccgtggtggccatgaccagcagaagaagcggcgtgggcctggccgtggtgaacggccagctgatggccgtgggcggcttcgacggcaccacctacctgaagaccatcgaggtgttcgaccccgacgccaacacctggagactgtacggcggcatgaactacagaagactgggcggcggcgtgggcgtgatcaagatgacccactgcgagagccacatctggtag

SEQ ID NO: 180201 - DNA, 3421 bp, Artificial Sequence
  derived and/or modified sequence
ctgcctgcgttagcggcggtggaggaggaggcagagaggagtggagggcggagtagacggaggaggctgctgcagagaagaaagtgtcagagccggttcggctttagagtgtggtgaagggtacttttcatggtgcatggaaggaaagccaatgcgcaggtgtaccaacattcgaccaggagagactggaatggatgtaacaagccgctgcacccttggagaccccaacaaactgccagaaggggttccccaacctgcccgcatgccctatatctcagacaagcaccctcgacaaaccttggaagtgattaaccttctgagaaagcaccgggagctatgtgatgtggtgctagttgtgggcgccaagaagatatatgcccatcgagtcattttgtcagcctgtagtccctacttccgagctatgtttacaggagaattggcagagagccgtcagacagaagtagtgatccgagacattgacgagagggctatggaattactgattgactttgcgtatacctcccagataacagtagaagagggcaatgttcagactcttctgccagctgcttgcctcctccagctggcagaaatacaggaagcctgctgtgaattcttaaagagacaattagatccttctaactgcctgggcattcgggcttttgctgacacacattcatgtcgtgagttgctaaggatagcagacaagttcacccaacataactttcaagaggtaatggagagtgaagagttcatgttgcttccagccaatcaactcattgatataatatccagtgatgagctaaacgttcgcagtgaagaacaagtgttcaatgcagtgatggcctgggtcaaatacagtattcaggaaagacgtcctcaattaccccaggtgctgcagcatgttcgtttgcctttgcttagtcccaagttcctggtcggcacagtaggctctgatcccctcatcaaaagtgatgaagaatgcagagacttggtagatgaggctaaaaactacctcctattgccgcaagaacgaccactaatgcaaggaccaaggacgagaccacggaaacctatccgatgtggggaagtactctttgcagttggtggttggtgcagtggagatgccatttccagtgttgaacgatatgatccacagaccaatgaatggagaatggtggcttcaatgagcaaaaggagatgcggagttggggtcagtgttcttgatgatctgttatatgcagtaggaggccatgatggatcctcttatctcaatagtgttgaaaggtatgaccccaaaacaaaccagtggagcagtgatgtggcccctacaagcacctgcaggacaagtgttggtgtagcagtacttggaggctttctttatgctgtgggtggccaggatggtgtgtcttgcctcaacattgttgagaggtatgatccgaaggagaacaagtggactcgggtagcttctatgagtaccagaagactaggtgtggctgtggctgtgttaggagggttcttatatgctgtaggtggctctgacgggacatctcctctcaacacagtggaacgttacaatcctcaggaaaacagatggcacactatagcccctatggggacccggaggaaacacctaggctgtgcagtatatcaggacatgatctatgctgtaggaggtagagatgacactacagagctgagcagtgctgagagatacaaccccagaaccaaccagtggtctccagtggtggccatgacatcacgccgtagtggagttggcctggcagtggtcaatggacagctcatggcagtaggaggttttgatggcacaacatacttgaagaccatagaagtttttgatcctgatgccaatacatggaggttatatggcgggatgaattaccgtcggctagggggtggcgtaggagttattaaaatgacacattgtgaatcccatatttggtgaacacagagaagacagtcttgtatatattcctctgtattctggggagctttgaccttggagctttgtacagcttgagaaaacattagaacaaattttattatttgccggtgcctcaacaaatggaaatacaatccaatgaaagtacttcacctgcaagatgcacaataattttcaactctgtgcagaagaatatttatttttggttttaatttatcatggttttttgttgttttcgttttgaacttatccttcctcccacaaaaaaagaaaagaagaaaaaattccaagcagcaaaacttactttgtttgtaaggtattcatttaggtttgaaaatactatttaataagggcagaagggctatatatgatttggctattatttctagacactccatccacatgattccactaacaaggattaccaggaataaaggtaggtatgcaaaatgtattagctacccattattctcgcactaaccaccagaagacttgaaaatcttaaaaaaaaaaaacaaaaaaacaagaaaaggcaacatctcattttaaatagtacaattcagaagggatactaaatcaataaaaaccaggactcagacactacagttttcatcagtgtaattttatgtcttgtttctttctatatgaacttgtttatttagtctttttttcataatattctcatagagtttctgctagatctagagctctgctcagtgcctcttataaaaacaatatataagtctcatatgctgtcttgagaatccaagagaatcacatgcagctctgcaacagtttttgctcaaaaatgttactgactaaagcaactgtccttcctgtttccttattgctaccaaggaccagcagggagaaatgtcttctcccagcagtgaattctgttatgcaatttattcttgatgctcaggcctggttaagctgaggcttacctttaataacagcctccaagggaatgaattattcagttaatgtaatagcacacattaaagagtgtaaaatcaattgaggcattttattaatatcttggttcttttatacaaacaatgtatcattatcttcattctataaggtcattgttactacttctctcaaattgcactttctggtaaaaagttaaaaatttttaaggaaaaaataatttcaatggttaaagttttttttcctcattgtattcatagacaaatttttttcaatatattttgcaagaaaaatctttgaataagactaactgcatttaaaaggaataacctccttctccctttccccaactacaaaaatgtttggcaactttgtgtttacatttaaagatcatttgcacctttttcaaggaaaaaaagtattgagtaaacaattgtttacatatatcatttatgcttttttctagcatgtataacttttttaaataaaggtagtatttaccattaaaaaaattttagctaa

SEQ ID NO: 180202 - DNA, 1263 bp, Artificial Sequence
  derived and/or modified sequence
atggtgcacgggcgcaaggctaacgctcaggtcatggaatcagaggagttcatgctcctgccagccaatcagctaattgacatcatcagtagcgatgagctgaacgtgcggtcagaagagcaagtgttcaatgccgtgatggcctgggttaagtacagcatacaggaaaggcgcccccagcttcctcaggtactgcaacacgtcagactgcccttgttgtctcctaaatttctggtaggtaccgtgggaagcgatccactgataaagagcgatgaggagtgtagagatctcgttgatgaagccaaaaactacttattgctgccccaggagcgacctctgatgcagggcccgcgtactcggccacgcaagccaattaggtgtggcgaagtgcttttcgcagtgggcggatggtgctcaggagatgccatctcttcggtggagcggtatgatcctcagaccaatgaatggcgcatggtggcttcaatgtctaaaaggaggtgcggcgtgggtgtctccgtcctggatgaccttttgtatgctgtgggagggcatgatgggagctcctatctgaactccgtggagagatacgatccaaaaacaaaccaatggtcttccgatgtcgctcctacctcaacttgccgaacttccgtgggtgttgccgtgctgggggggtttttgtacgccgtggggggacaggatggggtgtcctgcttgaacatcgtggagcggtatgatcctaaagagaataaatggacccgcgtagcctccatgtccacaagacggctgggagtagcggtggcggtgctgggcgggttcttatatgccgtcggggggtcagatggtactagtcctcttaacaccgtcgaaaggtacaatccacaagagaacaggtggcacacaatcgccccaatgggaacccggcgcaagcatctgggctgcgcggtgtaccaggatatgatatatgccgttggtggacgcgacgatactacagagctcagttcagcagaacgttataaccctcgaacaaaccagtggagccccgtggtagcgatgacctcacgcaggagtggagttggactggccgttgtcaacggccagcttatggcagtcggcgggtttgatggcacaacgtacctgaagaccattgaagtatttgacccagatgccaacacatggagactgtatggtggtatgaactatcgaagactgggtggcggagtaggcgtgattaagatgacccattgcgaatctcatatttggtag

SEQ ID NO: 180203 - DNA, 1263 bp, Artificial Sequence
  derived and/or modified sequence
atggtgcacggcaggaaggccaatgcccaggtgatggagagcgaggagttcatgctgctgcctgccaaccagctgattgacatcatcagcagtgatgagctgaatgtgcgctctgaggagcaggtgttcaatgctgtgatggcctgggtgaagtacagcatccaggagcggcggccccagctgccccaggtgctgcagcacgtgcggctgcccctgctgagccccaagttcctggtgggcaccgtgggcagtgaccccctcatcaagagtgatgaagaatgtcgggacctggtggatgaggccaagaactacctgctgctgccccaggagcggcccctgatgcagggccccaggacccggcccaggaagcccatccgctgtggggaggtgctgtttgctgtgggcggctggtgcagcggagatgccatcagctctgtggagagatatgacccccagaccaatgagtggaggatggtggcctccatgagcaagagaagatgtggggtgggcgtgtctgtgctggatgacctgctgtatgctgtgggcggccatgatggcagcagctacctgaacagcgtggagagatatgaccccaagaccaaccagtggagcagtgatgtggcccccaccagcacctgcaggacctctgtgggcgtggccgtgctgggcggcttcctgtatgctgtgggcggccaggatggagtgtcctgcctgaacatcgtggagagatatgaccccaaggagaacaagtggaccagggtggcctccatgagcacccggcggctgggcgtggccgtggccgtgctgggcggcttcctgtatgctgtgggcggcagtgatggcaccagccccctgaacacagtggagcgctacaacccccaggagaaccgctggcacaccatcgcccccatgggcaccaggaggaagcacctgggctgtgctgtgtaccaggacatgatctatgctgtgggcggcagagatgacaccacagagctgagcagcgctgagcgctacaaccccaggaccaaccagtggagccctgtggtggccatgaccagccgccgcagcggcgtgggcctggccgtggtgaatggccagctgatggctgtgggcggctttgatggcaccacctacctgaagaccatcgaggtgtttgatcctgatgccaacacctggaggctgtatggaggcatgaactacagaaggctgggcggcggcgtgggcgtcatcaagatgacccactgtgagagccacatctggtag

SEQ ID NO: 180204 - DNA, 1263 bp, Artificial Sequence
  derived and/or modified sequence
atggtgcacggccggaaggccaacgcccaggtgatggagagcgaggaattcatgttattgcccgctaaccagctaattgatatcataagctctgacgagctcaatgtgcgctccgaggaacaggtgttcaacgccgttatggcgtgggtcaaatacagcattcaggagcgtaggccccaattgccccaggtgctgcaacacgtccgcctccccctcctgtctcccaaatttttagtcggcacggtgggatccgatcccctgattaagtcagacgaagaatgtcgcgacttggtggacgaggccaagaactacctcttactgcctcaggaaaggcccctgatgcaggggcctcggactcgacccagaaagccgatccggtgcggggaagtcctcttcgcagtgggcggctggtgcagcggggatgctatcagcagcgttgaacgatatgatccacagactaatgaatggcgtatggtcgcttcaatgagcaaacgcaggtgtggagtcggggtgtccgtcctggacgatctgctgtatgcagttggcggccacgatggatcctcctatctgaattccgtcgaacgctacgatcccaaaactaaccagtggtcctctgatgtggctcccacttcaacatgcagaacatccgtaggggtcgcagtcctcggggggttcctgtacgcagtgggggggcaggacggcgtgtcttgccttaatattgtggaacgttacgacccaaaagagaacaagtggaccagagttgccagtatgagcacacggcgcctcggggttgctgtcgccgtgttaggggggttcctgtatgctgtgggggggagtgacggaacaagccccctgaacacggtggaacgctataacccgcaggagaaccggtggcacaccatagcgccgatggggacaaggcggaagcatctaggctgtgccgtatatcaggatatgatatacgccgtgggaggtcgagacgacactacagagcttagtagcgctgaacgatataatccccgcacgaaccagtggtcccccgtggtggccatgacaagccggcgcagcggtgtcgggctcgcagtggtaaatggccaactgatggctgtggggggttttgatggaacaacgtatcttaagacaatagaagttttcgacccagacgccaacacgtggcgcctatacggcggaatgaactatagacggctcggggggggcgtcggggtgattaagatgactcactgcgaaagccacatttggtag

SEQ ID NO: 180205 - DNA, 1263 bp, Artificial Sequence
  derived and/or modified sequence
atggttcatggtagaaaggcgaatgcccaagtgatggagagcgaggaattcatgctgcttcctgcgaaccaactgatcgatattatctccagtgacgagttgaacgtccgtagcgaggaacaggtgtttaacgcagtaatggcctgggtcaaatattcgatccaagagcgacggcctcagctgcctcaagttctacagcacgtgagactgcccttactctctccaaagttcctcgttgggacggtcgggagtgatccactcattaagagcgatgaggaatgcagggatctcgtagatgaggcaaaaaactaccttctgcttccacaggagagacctcttatgcagggtcccagaactcggccacgcaaaccgatccggtgcggtgaagtcctctttgcagtgggtgggtggtgctcaggtgacgctatcagttccgtggagagatacgatccccagaccaacgaatggaggatggtagccagcatgagtaagaggcggtgtggggttggggtgtccgttcttgacgatctgttgtatgctgtgggcggacatgacggctcttcctatcttaacagtgttgaacgatacgatccaaaaactaaccagtggagctcggatgttgccccaaccagtacctgtcgcacctctgtcggcgtggccgtccttgggggttttctctatgccgtgggagggcaggatggtgtgtcatgcctgaatatcgttgagcgatatgaccccaaagagaataagtggacgcgggtggcgagcatgagcaccaggaggctcggagtcgcagtcgccgtcctagggggattcctctacgctgtgggaggtagtgatggtacctctcccctgaacacggttgaaagatataacccacaggaaaatcgctggcatactatcgcacccatgggaacccggcgtaagcacctgggatgcgcggtttatcaagatatgatatatgcagtgggaggacgggacgacaccaccgaactgagttctgccgagcgatacaatcccaggactaatcaatggtcacccgtggttgccatgacatctcggcgatctggagtggggctggcagtagtgaatggacagctgatggcagttggaggattcgacggaacaacgtacctgaagactatagaggtgtttgatcccgatgccaacacatggagactatatgggggtatgaactataggagacttggaggaggcgtgggggttatcaaaatgacacattgcgagtcgcacatttggtag

SEQ ID NO: 180206 - DNA, 1906 bp, Artificial Sequence
  derived and/or modified sequence
ctacgagcggcatcctgcctgcgttagcggcggtggaggaggaggcagagaggagtggagggcggagtagacggaggaggctgctgcagagaagaaagtgtcagagccggttcggctttagagtgtggtgaagggtacttttcatggtgcatggaaggaaagccaatgcgcaggtaatggagagtgaagagttcatgttgcttccagccaatcaactcattgatataatatccagtgatgagctaaacgttcgcagtgaagaacaagtgttcaatgcagtgatggcctgggtcaaatacagtattcaggaaagacgtcctcaattaccccaggtgctgcagcatgttcgtttgcctttgcttagtcccaagttcctggtcggcacagtaggctctgatcccctcatcaaaagtgatgaagaatgcagagacttggtagatgaggctaaaaactacctcctattgccgcaagaacgaccactaatgcaaggaccaaggacgagaccacggaaacctatccgatgtggggaagtactctttgcagttggtggttggtgcagtggagatgccatttccagtgttgaacgatatgatccacagaccaatgaatggagaatggtggcttcaatgagcaaaaggagatgcggagttggggtcagtgttcttgatgatctgttatatgcagtaggaggccatgatggatcctcttatctcaatagtgttgaaaggtatgaccccaaaacaaaccagtggagcagtgatgtggcccctacaagcacctgcaggacaagtgttggtgtagcagtacttggaggctttctttatgctgtgggtggccaggatggtgtgtcttgcctcaacattgttgagaggtatgatccgaaggagaacaagtggactcgggtagcttctatgagtaccagaagactaggtgtggctgtggctgtgttaggagggttcttatatgctgtaggtggctctgacgggacatctcctctcaacacagtggaacgttacaatcctcaggaaaacagatggcacactatagcccctatggggacccggaggaaacacctaggctgtgcagtatatcaggacatgatctatgctgtaggaggtagagatgacactacagagctgagcagtgctgagagatacaaccccagaaccaaccagtggtctccagtggtggccatgacatcacgccgtagtggagttggcctggcagtggtcaatggacagctcatggcagtaggaggttttgatggcacaacatacttgaagaccatagaagtttttgatcctgatgccaatacatggaggttatatggcgggatgaattaccgtcggctagggggtggcgtaggagttattaaaatgacacattgtgaatcccatatttggtgaacacagagaagacagtcttgtatatattcctctgtattctggggagctttgaccttggagctttgtacagcttgagaaaacattagaacaaattttattatttgccggtgcctcaacaaatggaaatacaatccaatgaaagtacttcacctgcaagatgcacaataattttcaactctgtgcagaagaatatttatttttggttttaatttatcatggttttttgttgttttcgttttgaacttatccttcctcccacaaaaaaagaaaagaagaaaaaattccaagcagcaaaacttactttgtttgtaaggtattcatttaggtttgaaaatactatttaataagggcagaagggctatatatgatttggctattatttctagacactccatccacatgattccactaacaaggattaccaggaataaaggtaggtatgcaaaatgtattagctacccattattctcgcactaaccaccagaagacttgaaaatctt

SEQ ID NO: 180207 - DNA, 1830 bp, Artificial Sequence
  derived and/or modified sequence
atggagggtaaacctatgagaaggtgcacaaacatccggccaggcgagacagggatggacgtcacctctagatgcacactgggggaccccaacaagctaccagagggcgtgcctcagcccgcccgcatgccgtacatatccgacaagcaccccaggcagacgcttgaggtcattaacctgctgaggaaacatcgagagctctgtgatgtcgtgctggtggtgggtgcaaagaaaatatacgctcatagggtcatcctctccgcctgtagtccctactttagagccatgtttactggggaactggccgaatcccgacaaaccgaagttgtgatacgtgacatcgatgagcgagcgatggaacttctgattgactttgcatacacatctcagataactgtggaagagggtaacgtccaaactctgctgcctgcagcgtgtttattgcagctggctgagatccaggaagcgtgctgtgaatttttgaagcgccagctggatcccagcaactgcttggggattagagcctttgccgatacgcattcctgtcgagaactgctcagaatagctgataaatttacacagcacaactttcaagaagtgatggaaagtgaggagtttatgttgctgccagcaaatcagctgatcgacataatttccagcgatgagcttaatgtgcgaagcgaggaacaagttttcaacgccgtcatggcttgggtgaaatactccatccaggagcgccgcccacaactgcctcaggtcctgcagcacgttaggctccctctactgtctcccaaatttttagttggcaccgtcggaagcgatcctctcatcaaatccgatgaagaatgtagagacctggtagacgaggctaaaaattatctgctgctgccccaggagcgcccactgatgcaaggcccgaggaccaggcccaggaaaccaatcaggtgtggtgaggtgttgtttgccgttggtggctggtgttcaggcgatgcaatcagctccgtcgaacgctatgatccccagaccaacgagtggagaatggtggcctctatgagtaaacggcgttgtggcgtgggggtcagtgttcttgacgatctactgtacgcagtgggaggccatgacggttcctcttaccttaacagtgtcgaaagatatgacccgaaaactaaccagtggtccagcgacgttgcacctacttcgacctgtaggacatcagtaggtgtggctgtgctgggtggctttctgtacgctgttggtgggcaggacggcgttagttgcctcaatattgtggagcgttacgatcctaaggaaaataaatggactcgggtggcttcaatgtcaacgaggagactcggtgtcgctgtcgccgtcttaggtggatttctttacgcggtgggagggtccgacggcaccagccctctcaacaccgtcgaacgctacaacccacaggaaaaccgctggcacactatcgcacctatgggtacaagaagaaagcacctgggctgtgccgtttaccaggacatgatttacgccgtcggcggtcgagacgataccacggagctgagcagcgccgagagatacaatccaagaactaaccaatggagtcccgtggtggccatgaccagtcggcggtcaggggtcggtctagctgtagtaaacggccagttgatggccgtgggaggttttgatggcacgacctacctaaaaacaatcgaggtctttgatcctgacgccaatacatggcgtctctatggcgggatgaattaccgccgactggggggaggcgtaggagttattaagatgacacactgcgagagccacatttggtag

SEQ ID NO: 180208 - DNA, 1830 bp, Artificial Sequence
  derived and/or modified sequence
atggagggcaagcccatgaggcgctgcaccaacatccggcctggagaaacaggcatggatgtgaccagccgctgcaccctgggggaccccaacaagctgcctgagggcgtgccccagcctgccaggatgccctacatcagtgacaagcacccccggcagaccctggaggtgatcaacctgctgaggaagcaccgggagctgtgtgatgtggtgctggtggtgggcgccaagaagatctatgcccacagggtcatcctgagcgcctgcagcccctacttccgggccatgttcaccggggagctggccgagagccggcagacagaggtggtgatccgggacattgatgagcgggccatggagctgctgattgactttgcctacaccagccagatcaccgtggaggagggcaatgtgcagaccctgctgcctgctgcctgcctgctgcagctggccgagatccaggaggcctgctgtgagttcctgaagaggcagctggaccccagcaactgcctgggcatccgggcctttgctgacacccacagctgccgggagctgctgagaattgctgacaagttcacccagcacaacttccaggaggtgatggagagcgaggagttcatgctgctgcctgccaaccagctgattgacatcatcagcagtgatgagctgaatgtgcgctctgaggagcaggtgttcaatgctgtgatggcctgggtgaagtacagcatccaggagcggcggccccagctgccccaggtgctgcagcacgtgcggctgcccctgctgagccccaagttcctggtgggcaccgtgggcagtgaccccctcatcaagagtgatgaggagtgccgggacctggtggatgaggccaagaactacctgctgctgccccaggagcggcccctgatgcagggccccaggacccggcccaggaagcccatccgctgtggggaggtgctgtttgctgtgggcggctggtgcagcggagatgccatcagctctgtggagagatatgacccccagaccaatgagtggaggatggtggcctccatgagcaagaggcgctgtggggtgggcgtgtctgtgctggatgacctgctgtatgctgtgggcggccatgatggcagcagctacctgaacagcgtggagagatatgaccccaagaccaaccagtggagcagtgatgtggcccccaccagcacctgcaggacctctgtgggcgtggccgtgctgggcggcttcctgtatgctgtgggcggccaggatggagtgtcctgcctgaacatcgtggagagatatgaccccaaggagaacaagtggaccagggtggcctccatgagcacccggcggctgggcgtggccgtggccgtgctgggcggcttcctgtatgctgtgggcggcagtgatggcaccagccccctgaacacagtggagcgctacaacccccaggagaaccgctggcacaccatcgcccccatgggcaccaggaggaagcacctgggctgtgctgtgtaccaggacatgatctatgctgtgggcggcagagatgacaccacagagctgagcagcgctgagcgctacaaccccaggaccaaccagtggagccctgtggtggccatgaccagcagaagaagtggagtgggcctggccgtggtgaatggccagctgatggctgtgggcggctttgatggcaccacctacctgaagaccatcgaggtgtttgatcctgatgccaacacctggaggctgtatggaggcatgaactaccgccgcctgggcggcggcgtgggcgtcatcaagatgacccactgtgagagccacatctggtag

SEQ ID NO: 180209 - DNA, 1830 bp, Artificial Sequence
  derived and/or modified sequence
atggagggcaagcccatgcggcggtgcaccaacatccggcccggcgagacaggaatggacgtgacttctcgttgcaccttgggggaccccaataagcttccagagggtgttcctcagccagcacgcatgccatacatttctgataagcatccacgccagactctggaggtgatcaatttactgaggaaacaccgcgagttgtgcgacgtcgttctggttgtgggagctaaaaagatatatgcccatcgagtcatcttatctgcctgttcaccttactttagggccatgtttacaggtgagctggcagagagcagacagaccgaagtcgtcatcagagacatcgacgagagagccatggaactgctaattgatttcgcctacacctcacagatcaccgtcgaagagggtaacgtgcagacccttctccctgctgcctgcctactgcagctggccgagatccaggaggcatgctgtgagtttcttaagcgtcagttggatccgagcaactgcctaggtattcgggccttcgcagacacccattcttgccgagagctcctaaggattgccgataagttcactcaacacaacttccaggaagtaatggaatcggaggagttcatgcttctcccagcaaaccagctgatcgatattattagctctgacgaattgaacgttaggtctgaggaacaggtcttcaatgctgtcatggcttgggtcaagtattcgattcaggagcgcagaccacagctgccgcaagtactccagcacgtgagactcccccttttaagcccaaaatttctcgtgggcactgtgggatccgaccctctgattaaaagcgatgaagaatgccgcgatcttgtggatgaagcaaagaactaccttctgctgccacaggagcgacctctgatgcagggaccccgtacccgccctagaaaacctatccgatgtggtgaggtgctgttcgctgtaggcggctggtgttctggggacgccatttcatctgttgagcgatatgacccacagaccaacgaatggaggatggtcgcaagcatgtcaaagagacggtgcggggtcggcgtgtcagtgcttgatgacctcctgtacgccgtgggtggtcatgatgggtcgtcttatctcaacagtgttgagagatacgatccgaaaacaaatcagtggtctagcgacgttgctcctacttcaacctgcagaacaagcgtgggcgtggctgtccttggaggcttcttgtacgctgtcgggggccaggatggggtgtcctgcctgaacattgtagagagatacgacccaaaagagaacaaatggaccagggtggcatccatgtcaactcgcagactcggagtcgccgtcgccgtgctgggcgggtttctctatgcggtcggcggctccgacgggacaagcccattgaacacagtagagaggtacaatcctcaagaaaacagatggcatactatcgctcccatgggcacacgccgaaagcacttaggctgcgcagtctatcaggacatgatttatgccgtggggggacgcgatgacacgacagaactctcctcagccgaacggtataaccctaggacgaatcagtggtcaccagtggtggccatgacctcccgtagatctggggtcgggctggcagttgtgaatgggcagttgatggcagtaggcggtttcgacggcacaacatacctgaaaaccatcgaggtgttcgatcccgacgccaacacctggcgtctgtatggtgggatgaattatcgcaggctaggggggggggtaggcgtcataaagatgacccactgcgagagtcacatctggtag

SEQ ID NO: 180210 - DNA, 1830 bp, Artificial Sequence
  derived and/or modified sequence
atggaagggaaacccatgaggaggtgcaccaacattcgacctggagagactggtatggatgttacttcaaggtgtacactgggcgacccgaacaagctgcccgaaggcgtaccccagcctgctagaatgccctatatatccgataagcatccacggcaaactctggaggttattaatctcctcaggaaacatcgtgaactgtgtgacgtggtgctggttgttggagcaaaaaagatctatgcccatagagtgatactatctgcctgcagcccatattttagagcaatgttcacaggtgagctcgctgaatccagacagacagaggtggtcattcgcgatatagacgagcgggctatggagctccttatcgacttcgcctacaccagtcaaattacagtggaggaggggaatgttcagacgctcctccctgccgcttgccttctccagctcgctgaaattcaggaggcttgttgcgagtttttaaagcggcaactggaccctagcaactgcctaggaattagagcgttcgctgatactcactcgtgccgtgagctgctgcgtatagcagacaagtttacccagcataacttccaagaagtgatggaaagcgaagaattcatgttgttgcccgcaaatcagctgatcgacataataagtagtgacgagttgaatgtgcggagcgaagagcaggtctttaatgccgtcatggcatgggtgaagtactccatacaagagcgcaggccccagctaccacaggtcttacaacatgtgaggctccccctcttatcaccaaaattcctagtgggcaccgtaggctctgacccccttataaagagtgacgaggaatgtcgagacctggtggatgaagcgaaaaattacctgttactgcctcaggaaaggccactcatgcagggtcccaggacgcggcctagaaaaccaattcggtgcggggaggtgctcttcgcggtgggaggatggtgttctggagacgctatctcaagtgtagaaagatacgacccacaaactaatgaatggagaatggtagcctcaatgagtaagaggaggtgcggagtgggcgtgtctgtactggatgacctgctgtacgcggtgggtggccatgacgggtcttcgtacctgaacagtgtagaaaggtatgatccaaagaccaatcagtggagtagcgatgtcgctccgaccagcacctgcaggacttcggtcggtgtggctgtcttggggggttttctgtacgccgtcggcggacaggatggagtctcttgtctcaatattgtggagcgctacgatcccaaggagaacaagtggacacgagtggcatcaatgagcactcgcagactgggggtggcagttgctgttcttggcggattcctgtatgcagttggaggatccgatggaacttccccattgaatacagttgaaaggtacaatccacaggagaacaggtggcataccatagcacctatgggcactaggcggaaacatctgggatgcgccgtctatcaggatatgatatacgccgtggggggaagggatgacacaacagaacttagcagcgcagagcgttacaacccacgcacaaatcagtggtcccccgtagtcgcgatgaccagtcggcgatccggagtggggctggctgtagttaacggccagctgatggcagtagggggattcgatgggacgacctacctgaaaactatcgaggtcttcgatcctgacgctaacacatggcgcctttacggtgggatgaactatcggagacttggcggaggtgtcggcgtgatcaagatgactcattgcgagtcccacatctggtag

SEQ ID NO: 180211 - DNA, 1830 bp, Artificial Sequence
  derived and/or modified sequence
atggagggcaagcccatgagaagatgcaccaacatcagacccggcgagaccggcatggacgtgaccagcagatgcaccctgggcgaccccaacaagctgcccgagggcgtgccccagcccgccagaatgccctacatcagcgacaagcaccccagacagaccctggaggtgatcaacctgctgagaaagcacagagagctgtgcgacgtggtgctggtggtgggcgccaagaagatctacgcccacagagtgatcctgagcgcctgcagcccctacttcagagccatgttcaccggcgagctggccgagagcagacagaccgaggtggtgatcagagacatcgacgagagagccatggagctgctgatcgacttcgcctacaccagccagatcaccgtggaggagggcaacgtgcagaccctgctgcccgccgcctgcctgctgcagctggccgagatccaggaggcctgctgcgagttcctgaagagacagctggaccccagcaactgcctgggcatcagagccttcgccgacacccacagctgcagagagctgctgagaatcgccgacaagttcacccagcacaacttccaggaggtgatggagagcgaggagttcatgctgctgcccgccaaccagctgatcgacatcatcagcagcgacgagctgaacgtgagaagcgaggagcaggtgttcaacgccgtgatggcctgggtgaagtacagcatccaggagagaagaccccagctgccccaggtgctgcagcacgtgagactgcccctgctgagccccaagttcctggtgggcaccgtgggcagcgaccccctgatcaagagcgacgaggagtgcagagacctggtggacgaggccaagaactacctgctgctgccccaggagagacccctgatgcagggccccagaaccagacccagaaagcccatcagatgcggcgaggtgctgttcgccgtgggcggctggtgcagcggcgacgccatcagcagcgtggagagatacgacccccagaccaacgagtggagaatggtggccagcatgagcaagagaagatgcggcgtgggcgtgagcgtgctggacgacctgctgtacgccgtgggcggccacgacggcagcagctacctgaacagcgtggagagatacgaccccaagaccaaccagtggagcagcgacgtggcccccaccagcacctgcagaaccagcgtgggcgtggccgtgctgggcggcttcctgtacgccgtgggcggccaggacggcgtgagctgcctgaacatcgtggagagatacgaccccaaggagaacaagtggaccagagtggccagcatgagcaccagaagactgggcgtggccgtggccgtgctgggcggcttcctgtacgccgtgggcggcagcgacggcaccagccccctgaacaccgtggagagatacaacccccaggagaacagatggcacaccatcgcccccatgggcaccagaagaaagcacctgggctgcgccgtgtaccaggacatgatctacgccgtgggcggcagagacgacaccaccgagctgagcagcgccgagagatacaaccccagaaccaaccagtggagccccgtggtggccatgaccagcagaagaagcggcgtgggcctggccgtggtgaacggccagctgatggccgtgggcggcttcgacggcaccacctacctgaagaccatcgaggtgttcgaccccgacgccaacacctggagactgtacggcggcatgaactacagaagactgggcggcggcgtgggcgtgatcaagatgacccactgcgagagccacatctggtag

SEQ ID NO: 180212 - protein, 1028 aa, Artificial Sequence
  derived and/or modified sequence
MRLLWKLVILLPLINSSAGDGLLSRPIFTQEPHDVIFPLDLSKSEVILNCAANGYPSPHYRWKQNGTDIDFTMSYHYRLDGGSLAINSPHTDQDIGMYQCLATNLLGTILSRKAKLQFAYIEDFETKTRSTVSVREGQGVVLLCGPPPHFGDLSYAWTFNDNPLYVQEDNRRFVSQETGNLYIAKVEPSDVGNYTCFITNKEAQRSVQGPPTPLVQRTDGVMGEYEPKIEVRFPETIQAAKDSSVKLECFALGNPVPDISWRRLDGSPLPGKVKYSKSQAILEIPNFQQEDEGFYECIASNLRGRNLAKGQLIFYAPPEWEQKIQNTHLSIYDNLLWECKASGKPNPWYTWLKNGERLNPEERIQIENGTLIITMLNVSDSGVYQCAAENKYQIIYANAELRVLASAPDFSKSPVKKKSFVQVGGDIVIGCKPNAFPRAAISWKRGTETLRQSKRIFLLEDGSLKIYNITRSDAGSYTCIATNQFGTAKNTGSLIVKERTVITVPPSKMDVTVGESIVLPCQVSHDPSIEVVFVWFFNGDVIDLKKGVAHFERIGGESVGDLMIRNIQLHHSGKYLCTVQTTLESLSAVADIIVRGPPGPPEDVQVEDISSTTSQLSWRAGPDNNSPIQIFTIQTRTPFSVGWQAVATVPEILNGKTYNATVVGLSPWVEYEFRVVAGNSIGIGEPSEPSELLRTKASVPVVAPVNIHGGGGSRSELVITWESIPEELQNGEGFGYIIMFRPVGSTTWSKEKVSSVESSRFVYRNESIIPLSPFEVKVGVYNNEGEGSLSTVTIVYSGEDEPQLAPRGTSLQSFSASEMEVSWNAIAWNRNTGRVLGYEVLYWTDDSKESMIGKIRVSGNVTTKNITGLKANTIYFASVRAYNTAGTGPSSPPVNVTTKKSPPSQPPANIAWKLTNSKLCLNWEHVKTMENESEVLGYKILYRQNRQSKTHILETNNTSAELLVPFEEDYLIEIRTVSDGGDGSSSEEIRIPKMSSLSSRGIQFLEPSTHFLSIVIVIFHCFAIQPLI

SEQ ID NO: 180213 - DNA, 100 bp, Artificial Sequence
  derived and/or modified sequence
aaagaaatagaagggagttgaacagaatcgaatggaatcgaatcaaatggaatcgaatggcatcaaatggaatcgaatggaatgtggtgaagtggattgg

SEQ ID NO: 180214 - DNA, 3087 bp, Artificial Sequence
  derived and/or modified sequence
atgcgtctcctgtggaaactggtgattctgctacccttgattaactccagtgctggtgatggcctcctgagccggcccattttcacacaggaaccccacgatgtcatttttcccctcgatctgtctaagtcggaggtgatactcaactgtgctgctaatggatatccttcccctcattatcggtggaaacagaatggcacagacatcgatttcaccatgtcctatcattaccgcctggacggaggcagtctggcaatcaatagccctcatacagatcaagatatcggtatgtatcaatgtctagcgactaacctacttgggacaatcctttctcggaaggccaagctgcagttcgcatatatcgaagacttcgaaacaaagaccaggtccactgtgtccgttcgcgaaggtcaaggggtagtgctgctgtgcggccctcccccacattttggcgacctgagctatgcctggaccttcaacgataaccccctttacgtccaagaggacaataggcgcttcgtgagccaggaaaccggcaacttgtatattgccaaggtggaaccttccgatgtcggcaactatacatgctttattactaataaggaggcccagcgatctgtgcagggtccacctacacccttggtgcaaaggacggatggcgtgatgggagagtatgagccaaaaatcgaagtcagattccccgaaaccatacaggccgccaaagattcctccgtaaagctggaatgtttcgcgctggggaaccccgtgccggatataagctggcggagactcgacgggagcccactgcctggtaaggtgaagtatagtaagtctcaggccattctggagatcccaaactttcagcaagaggacgagggattctatgagtgcattgcttccaatctaagaggcaggaacctggctaagggccaattgatcttctatgcacctccggagtgggagcaaaagatccaaaatactcatctgagcatttacgataacctgctgtgggagtgcaaagcctcgggtaaacctaatccttggtacacctggctaaagaatggcgaacggctgaaccctgaggagcgaatccaaattgagaacgggacactcatcattaccatgttgaacgtgagtgacagtggagtttaccaatgcgccgccgaaaataagtaccagatcatctacgcaaatgcggagttgagggtactggcttcggcccctgatttctcaaaatcccccgtcaaaaaaaagtctttcgtgcaggtcggtggcgatatcgttatcggatgcaagcctaatgctttcccccgggctgccatttcctggaagagaggaacagagacgctccgacaaagcaagcgcattttcctcttggaggatggcagtctgaaaatttataacattacacgcagtgacgctggctcctatacttgcatcgcaaccaaccagttcgggactgctaagaacacaggaagcctgatcgtgaaagagagaactgtcattaccgtgccccccagcaaaatggacgtgaccgttggcgaaagtattgtgttgccgtgtcaggtaagccatgatccctctattgaggttgtattcgtatggttctttaatggggacgttatcgacctgaagaagggggtcgcgcatttcgagagaatcgggggggagtcagttggagaccttatgatcaggaacatccagctgcatcattcaggcaaatacttatgtacggttcagactacgctggagtccctctcagccgtggctgatataattgtacgcgggcccccggggccccctgaagatgtacaggtggaggatatttccagcaccacaagtcagctgtcatggcgggctgggcccgacaataactctcctattcaaattttcacaatacagaccagaacaccttttagcgtcgggtggcaagccgtggcaaccgtccctgaaatactgaacggcaagacatataacgccacagtagtgggcctgagcccctgggttgagtatgagtttcgggtggtggctgggaatagcataggcatcggagaaccgtcagagccctcggaactgttgagaaccaaggcctccgtgcccgtggtggctcctgttaacatccacggtggcggagggtcccgcagcgaactggttattacatgggagagcattcccgaagagcttcaaaatggggagggtttcgggtatatcattatgttcaggcccgtggggagtacaacgtggtccaaagagaaggtgtcctctgtggaaagttctcggtttgtataccgaaatgaatcgatcatccccctgtcaccctttgaggtgaaagtgggcgtgtacaacaacgagggcgaggggagccttagtacggtgactatcgtgtactctggagaagacgaaccacaattggcgccccgcgggaccagcttacagagcttttccgcttccgagatggaggtgtcctggaacgccattgcgtggaatcgaaacacaggtcgtgtgttaggatacgaggtgctctactggaccgacgactccaaggagagcatgatcgggaagattcgggtgagcgggaatgtgacgactaagaatatcaccggcttgaaagcaaacactatctactttgcctcagtgcgcgcttacaatacggccggtactggcccctcatctccacccgtcaatgttacgacaaagaagtcccctcccagccagccacctgctaatatagcatggaaattaaccaactctaaactctgtctgaactgggagcatgttaagaccatggagaacgagtccgaagtgctgggttataagattctgtatcgtcaaaatcgacagtcaaagactcacatccttgagacaaataatacatccgctgaactgctggttccttttgaggaagattacctgattgagatcagaacagtgtcggatggcggggatggctcatcatccgaagaaattcggattcctaaaatgtcctcactctctagtagagggatccagtttttggagcctagcacccacttcctctcaattgtcattgtcatttttcattgctttgctatccaaccactaatttag

SEQ ID NO: 180215 - DNA, 3087 bp, Artificial Sequence
  derived and/or modified sequence
atgaggctgctatggaaattggtcattctcctacccctcattaatagcagcgctggtgatggtttgttgtctaggccgatattcacgcaagagccgcacgacgtcatttttcctttagatttatccaagtccgaagtcatcctgaattgtgctgctaacggatatccatcaccccactatcgttggaagcaaaatggaacagatatcgactttactatgagttaccactaccggctggacggtggctcacttgcaataaactctccccatacggatcaagacatcgggatgtaccagtgtttagccactaacctcctgggtaccatcctgagccgcaaggccaagttacaattcgcctatatcgaagatttcgaaacaaagacaaggtccaccgtctcagtcagggagggtcaaggcgtcgtgctgttgtgcggcccccccccacacttcggggatctgagttacgcctggacctttaatgacaatccactgtacgttcaagaagataaccggagatttgtgtcccaagagactgggaatctgtatattgctaaagttgagccatcagacgtcggtaattacacttgcttcataaccaacaaagaggcacaacgcagcgttcagggaccccccacccccctggttcagcgcactgacggggtgatgggagagtacgagccaaaaatcgaggtccgctttcctgagaccatccaggccgcgaaagattctagcgtgaagctggaatgctttgccctgggtaatcctgtgccagacatatcgtggcgacgtctggatggctctcccttgcctggaaaggtcaaatattcaaagtctcaggcaatattggaaattcccaattttcagcaggaagacgaagggttttacgagtgcatcgcctccaatcttcggggccgaaacctggctaagggacagctgattttttacgcaccccctgagtgggagcagaagatacagaacacgcatctttccatttacgacaacttgctctgggaatgcaaagcttccggaaagcctaacccctggtatacttggctcaagaacggcgagaggctgaacccggaagagcgcattcaaattgagaacgggactctgattatcaccatgttgaacgtgagcgacagcggcgtatatcagtgcgccgcagagaataaataccagatcatatacgccaatgccgagctgagggtgctagcctctgcacctgacttttctaaaagtccagtgaaaaaaaagagttttgtgcaggtgggcggagacattgtaatcggttgcaaacccaacgccttccctagagcggctatcagctggaagcggggaaccgaaacactgcggcagagcaagagaatttttctccttgaagacggctccttgaagatatataacattacgcggtccgacgcaggctcatacacctgcatcgccacaaaccagttcgggacggccaaaaacactggatccctgatcgtcaaggaacggacagtgatcactgttccgcccagcaagatggatgtgaccgttggggaaagcatcgtgctgccttgccaggtatcccacgatccaagcattgaggtagtttttgtgtggttttttaatggcgacgttattgacctgaagaaaggtgtagctcattttgaacgcatcggaggcgagagcgtgggggatttaatgatcaggaacattcagctgcaccactctggcaagtatctatgtacagtgcaaaccacactagaaagtctgagcgccgtcgctgacatcatagtgagagggcctcccggcccccctgaggacgttcaagtcgaagacattagctctacgaccagccagttgtcctggagagctggtcccgataacaatagtcctattcaaattttcacaatccagacgcgcacaccattttctgtgggctggcaggccgtggcaaccgtgccagaaatcctgaatggcaagacatataacgctaccgttgtcggactgtcaccttgggtggagtatgaattccgggtggtggccggcaactcaattggcatcggggagccctccgagccctccgaattattgagaaccaaggcttccgtgcccgtcgtagctccggttaacattcatggagggggcgggtccaggagcgaactcgtgataacttgggaatccattcctgaagagcttcagaatggcgaggggttcggctacatcatcatgtttaggcctgtgggatctacgacatggagcaaagagaaggtgtccagtgtcgaaagctcaagattcgtgtaccgcaacgagtctatcattccactgagccctttcgaggtgaaggtgggcgtgtacaacaacgagggtgaaggttctctctccaccgtgacaatcgtgtatagcggcgaggatgagccccaactggccccacggggcacttcgctgcagagcttttcagcttcagagatggaagtctcatggaatgccattgcttggaaccgaaacactggcagggtcttagggtacgaggttctgtattggaccgatgactccaaggagtccatgattggaaagattcgggtgagcggtaatgtgaccacgaagaacatcaccggactgaaagcaaacaccatctatttcgccagcgtaagggcttataataccgccgggacaggcccatctagtcccccggtgaacgtgacaactaagaagtcccctccttcacagcccccggccaacatagcctggaaattaactaacagcaagctgtgtttgaattgggagcacgtcaagactatggaaaatgaatctgaggtcttggggtacaagatactgtaccgccagaacaggcagagtaaaacccatatactggagactaacaacacaagcgcagaactgctggtgcctttcgaagaggactacctcatcgaaataaggactgtgtctgacgggggggatggcagtagcagcgaggagataaggatccccaagatgagctcattgtcttccaggggcatccaattccttgagcccagcacacatttcctgagcatcgtcatcgttattttccattgttttgcaatccagcctctgatttag

SEQ ID NO: 180216 - DNA, 2871 bp, Artificial Sequence
  derived and/or modified sequence
atgtcctatcactacagactggatggtggttcgttagcaatcaatagcccgcatacagaccaagacattggaatgtaccagtgcctggccaccaacctactgggaacgatcttgtcacgaaaagctaaattacagttcgcatatatcgaagatttcgagactaagacgcggtctacagtgtcagtcagagaaggtcagggggtagtactcctttgtggccccccaccccattttggagatttatcctacgcctggaccttcaacgacaaccccttatacgttcaggaagacaaccgtcgattcgtttcacaggaaacaggtaatctgtacattgccaaggtagagcccagcgacgttggcaattacacctgctttattacgaacaaagaagcgcagcgaagcgttcaaggaccgcccacccctctggtgcagaggaccgatggtgtcatgggggagtatgaacccaagatcgaagtgaggtttcccgagactatacaggcagcgaaagactcatctgtgaagctcgagtgttttgccttgggtaaccccgtccccgacatttcctggagacgccttgatggatctccactcccgggtaaagttaagtactctaagagccaagcaattctggaaatcccaaatttccagcaggaggatgagggattctatgaatgcatcgccagtaatctccgtggccgaaatttggcgaaagggcagttaattttctatgcccccccagaatgggaacaaaaaattcagaatacacatttgtccatctatgacaatctcttgtgggagtgcaaagcatccggtaagcccaacccatggtacacctggttgaagaacggggaaagactcaatccagaggagaggatacagatagagaacggtaccctcatcattactatgttaaacgtgtcagactcaggtgtataccaatgcgctgcagagaataaatatcagattatctacgccaacgccgaactgcgggtcctggcctctgctccagacttcagtaagtcccctgtgaaaaagaagagtttcgtgcaggtggggggtgatatcgtgatcggatgtaaacctaatgccttcccacgagccgctatctcatggaagaggggtaccgaaactcttaggcaatccaaacgcatcttcttgcttgaggatggatccctcaaaatctataatataacacgcagcgacgcagggtcctacacctgtatcgcaaccaaccaattcggcaccgccaaaaacacagggtctctcatcgtgaaggagaggaccgtcatcaccgttccaccatccaagatggacgtcacagtcggggaaagcatcgtactaccttgtcaggttagccacgaccccagcatcgaggtagttttcgtatggttcttcaatggggacgttattgacctgaaaaaaggtgtcgcccattttgaacggattgggggtgaatcggtgggcgacttgatgatcagaaatattcagctccaccactctggcaaatatctgtgtaccgtgcagactactctggaatccttgtcagccgtggccgacattatagttcgcggcccacctggacctcctgaggacgtgcaggtggaagatatctccagtactactagccaactatcttggcgggcaggccccgataacaattccccaatacagatcttcaccatccagacacgaactcccttcagtgtgggctggcaggcggtcgccacagtgcccgagatcttaaacgggaagacctacaatgctacggtagtggggctttccccctgggtggaatacgaattccgtgttgttgctggcaactcaatcggcataggtgagccgtctgaaccctctgagctactgcgaaccaaagcctccgtgcccgtggtggcgcctgtaaacattcacggtggaggcggcagccggtctgaactggttatcacatgggagtccatcccagaagagctgcagaacggagaaggattcggctatattattatgtttcgtcccgttggttccacgacttggtcgaaagagaaggtatcctctgtcgagtcatcgcggtttgtgtaccgcaacgagtctatcatccccctctctcccttcgaagttaaggtgggcgtgtataataacgaaggtgaaggctcactgagcactgttactattgtgtacagcggagaagacgaaccccagctggcaccccggggaacatccttgcagtccttcagcgcatccgagatggaagtgtcgtggaatgcgatcgcttggaatcggaacacaggaagagtcctcggatatgaggttttatattggacagacgattctaaggagtctatgattggcaagataagagtgagtgggaatgtgactacgaagaatatcaccggcttgaaagccaacacaatatatttcgcctccgtgagagcatataataccgccggcactgggcccagcagtccccccgtcaacgtgacaaccaagaaaagtccaccaagtcaaccacccgcgaatatcgcttggaaattgacaaacagtaagttatgcctgaactgggagcatgtcaaaacaatggaaaatgagagcgaggttctggggtacaagattttgtaccgtcaaaacaggcagtcaaagactcacatccttgagacaaataacacctccgcggaactgctggtgcctttcgaggaggattacctcatcgaaatccggactgtaagtgacggcggcgatgggagtagctctgaagagattcgtatccccaaaatgtcatccttgtccagccgggggattcaatttctggagccctccactcacttcctgtcaatcgttatcgttatctttcactgcttcgctatccagccattgatctag

SEQ ID NO: 180217 - DNA, 3087 bp, Artificial Sequence
  derived and/or modified sequence
atgaggctgctgtggaagctggtgatcctgctgcccctcatcaacagcagcgctggagatggcctgctgagccggcccatcttcacccaggagccccatgatgtgatcttccccctggacctgagcaagtctgaggtgatcctgaactgtgccgccaacggctaccccagcccccactaccgctggaagcagaatggaacagacatcgacttcaccatgagctaccactaccgcctggatggcggcagcctggccatcaacagcccccacacagaccaggacatcggcatgtaccagtgcctggccaccaacctgctgggcaccatcctgagcaggaaggccaagctgcagtttgcctacatcgaggactttgagaccaagaccaggagcacagtgtctgtgcgggagggccagggcgtggtgctgctgtgtggccccccaccccactttggagacctgtcctatgcctggaccttcaatgacaaccccctgtatgtgcaggaggacaacagaagatttgtgtcccaggagaccggcaacctgtacatcgccaaggtggagcccagtgatgtgggcaactacacctgcttcatcaccaacaaggaggcccagaggtctgtgcagggcccccccacccccctggtgcagaggacagatggagtgatgggagaatatgagcccaagattgaggtgcgcttccctgagaccatccaggccgccaaggacagctctgtgaagctggagtgctttgccctgggcaaccctgtgcctgacatctcctggaggcggctggatggcagccccctgcccgggaaggtgaagtacagcaagagccaggccatcctggagatccccaacttccagcaggaggatgagggcttctatgagtgcatcgccagcaacctgcggggcaggaacctggccaagggccagctgatcttctacgcccctcctgagtgggagcagaagatccagaacacccacctgagcatctatgacaacctgctgtgggagtgcaaggccagcggcaagcccaacccctggtacacctggctgaagaatggagagcggctgaaccctgaggagcgcatccagattgaaaatggcaccctcatcatcaccatgctgaatgtgtctgattctggagtgtaccagtgtgccgctgagaacaagtaccagatcatctatgccaatgctgagctgcgggtgctggccagcgccccagacttcagcaagagccctgtgaagaagaagagctttgtgcaggtgggcggggacatcgtgattggctgcaagcccaatgccttccccagggctgccatctcctggaagaggggcacagagaccctgcggcagagcaagaggatcttcctgctggaggatggcagcctgaagatctacaacatcaccaggagtgatgctggcagctacacctgcatcgccaccaaccagtttggaacagccaagaacacaggcagcctgattgtgaaggagaggacagtcatcaccgtgccccccagcaagatggatgtgacagtgggggagagcatcgtgctgccctgccaggtgtcccatgaccccagcattgaggtggtgtttgtgtggttcttcaatggagatgtgattgacctgaagaagggcgtggcccactttgagcgcatcggcggggagagcgtgggggacctgatgatccggaacatccagctgcaccacagcggcaagtacctgtgcaccgtgcagaccaccctggagagcctgtctgctgtggccgacatcatcgtgcggggccccccaggccccccagaagatgtgcaggtggaggacatcagcagcaccaccagccagctgtcctggagggctggccctgacaacaacagccccatccagatcttcaccatccagaccaggacccccttctctgtgggctggcaggccgtggccaccgtgcctgagatcctgaatggcaagacctacaatgccaccgtggtgggcctgagcccctgggtggagtatgagttccgggtggtggccggcaacagcattggaattggagagcccagcgagcccagcgagctgctgcggaccaaggcctctgtgcctgtggtggcccctgtgaacatccacggcggcggcggcagccgctctgagctggtgatcacctgggagagcatccctgaggagctgcagaatggagagggcttcggctacatcatcatgttccggcctgtgggcagcaccacctggagcaaggagaaggtgtcctctgtggagagcagcagatttgtgtacagaaatgaaagcatcatccccctgagcccctttgaggtgaaggtgggcgtgtacaacaatgaaggagagggcagcctgagcacagtgaccatcgtgtacagcggagaagatgagccccagctggccccccggggcaccagcctgcagagcttcagcgccagcgagatggaggtgtcctggaatgccatcgcctggaacagaaacacaggccgggtgctgggctatgaggtgctgtactggacagatgacagcaaggagagcatgattggcaagatccgggtgtctggaaatgtgaccaccaagaacatcaccggcctgaaggccaacaccatctactttgcctctgtgcgggcctacaacacagctggcaccggccccagcagcccccctgtgaatgtgaccaccaagaagagcccccccagccagcccccagccaacatcgcctggaagctgaccaacagcaagctgtgcctgaactgggagcacgtgaagaccatggagaatgaaagtgaggtgctgggctacaagatcctgtaccggcagaaccggcagagcaagacccacatcctggagaccaacaacaccagcgctgagctgctggtgccctttgaggaggactacctgattgagatcagaacagtgtctgatggaggagatggcagcagcagcgaggagatccgcatccccaagatgagcagcctgagcagccggggcatccagttcctggagcccagcacccacttcctgagcatcgtcatcgtcatcttccactgctttgccatccagcccctcatctag

SEQ ID NO: 180218 - DNA, 2871 bp, Artificial Sequence
  derived and/or modified sequence
atgagctaccactaccgcctggatggcggcagcctggccatcaacagcccccacacagaccaggacatcggcatgtaccagtgcctggccaccaacctgctgggcaccatcctgagcaggaaggccaagctgcagtttgcctacatcgaggactttgagaccaagaccaggagcacagtgtctgtgcgggagggccagggcgtggtgctgctgtgtggccccccaccccactttggagacctgtcctatgcctggaccttcaatgacaaccccctgtatgtgcaggaggacaacagaagatttgtgtcccaggagaccggcaacctgtacatcgccaaggtggagcccagtgatgtgggcaactacacctgcttcatcaccaacaaggaggcccagaggtctgtgcagggcccccccacccccctggtgcagaggacagatggagtgatgggagaatatgagcccaagattgaggtgcgcttccctgagaccatccaggccgccaaggacagctctgtgaagctggagtgctttgccctgggcaaccctgtgcctgacatctcctggaggcggctggatggcagccccctgcccgggaaggtgaagtacagcaagagccaggccatcctggagatccccaacttccagcaggaggatgagggcttctatgagtgcatcgccagcaacctgcggggcaggaacctggccaagggccagctgatcttctacgcccctcctgagtgggagcagaagatccagaacacccacctgagcatctatgacaacctgctgtgggagtgcaaggccagcggcaagcccaacccctggtacacctggctgaagaatggagagcggctgaaccctgaggagcgcatccagattgaaaatggcaccctcatcatcaccatgctgaatgtgtctgattctggagtgtaccagtgtgccgctgagaacaagtaccagatcatctatgccaatgctgagctgcgggtgctggccagcgccccagacttcagcaagagccctgtgaagaagaagagctttgtgcaggtgggcggggacatcgtgattggctgcaagcccaatgccttccccagggctgccatctcctggaagaggggcacagagaccctgcggcagagcaagaggatcttcctgctggaggatggcagcctgaagatctacaacatcaccaggagtgatgctggcagctacacctgcatcgccaccaaccagtttggaacagccaagaacacaggcagcctgattgtgaaggagaggacagtcatcaccgtgccccccagcaagatggatgtgacagtgggggagagcatcgtgctgccctgccaggtgtcccatgaccccagcattgaggtggtgtttgtgtggttcttcaatggagatgtgattgacctgaagaagggcgtggcccactttgagcgcatcggcggggagagcgtgggggacctgatgatccggaacatccagctgcaccacagcggcaagtacctgtgcaccgtgcagaccaccctggagagcctgtctgctgtggccgacatcatcgtgcggggccccccaggccccccagaagatgtgcaggtggaggacatcagcagcaccaccagccagctgtcctggagggctggccctgacaacaacagccccatccagatcttcaccatccagaccaggacccccttctctgtgggctggcaggccgtggccaccgtgcctgagatcctgaatggcaagacctacaatgccaccgtggtgggcctgagcccctgggtggagtatgagttccgggtggtggccggcaacagcattggaattggagagcccagcgagcccagcgagctgctgcggaccaaggcctctgtgcctgtggtggcccctgtgaacatccacggcggcggcggcagccgctctgagctggtgatcacctgggagagcatccctgaggagctgcagaatggagagggcttcggctacatcatcatgttccggcctgtgggcagcaccacctggagcaaggagaaggtgtcctctgtggagagcagcagatttgtgtacagaaatgaaagcatcatccccctgagcccctttgaggtgaaggtgggcgtgtacaacaatgaaggagagggcagcctgagcacagtgaccatcgtgtacagcggagaagatgagccccagctggccccccggggcaccagcctgcagagcttcagcgccagcgagatggaggtgtcctggaatgccatcgcctggaacagaaacacaggccgggtgctgggctatgaggtgctgtactggacagatgacagcaaggagagcatgattggcaagatccgggtgtctggaaatgtgaccaccaagaacatcaccggcctgaaggccaacaccatctactttgcctctgtgcgggcctacaacacagctggcaccggccccagcagcccccctgtgaatgtgaccaccaagaagagcccccccagccagcccccagccaacatcgcctggaagctgaccaacagcaagctgtgcctgaactgggagcacgtgaagaccatggagaatgaaagtgaggtgctgggctacaagatcctgtaccggcagaaccggcagagcaagacccacatcctggagaccaacaacaccagcgctgagctgctggtgccctttgaggaggactacctgattgagatcagaacagtgtctgatggaggagatggcagcagcagcgaggagatccgcatccccaagatgagcagcctgagcagccggggcatccagttcctggagcccagcacccacttcctgagcatcgtcatcgtcatcttccactgctttgccatccagcccctcatctag

SEQ ID NO: 180219 - DNA, 3087 bp, Artificial Sequence
  derived and/or modified sequence
atgcggctgctgtggaagctggtgatcctgctgcccctgatcaactcaagcgctggggacggcctgttgtctcggccaatatttacacaggagccccatgatgtcatctttcccttggatctgagcaagagtgaagtgatcctgaactgcgcagcgaatggctacccttccccacattatcgctggaaacaaaatggaaccgatatcgattttacaatgtcctatcactacaggctggacggaggttccctggccatcaactccccccacactgaccaggacatcggcatgtatcagtgtctcgcaacaaacttactcggtactatcctgagtaggaaagcgaagctgcagttcgcttacattgaggacttcgaaacaaagacccggagcacggttagtgtgcgtgagggacaaggagtcgtgctgctgtgtgggcccccacctcactttggcgacctgagttacgcctggaccttcaacgataatccactttacgtacaggaagacaaccggcggtttgtgagccaagaaactgggaacctttatatagctaaggtggagcctagcgatgtgggaaattatacttgttttattacaaataaagaggcccaacgcagtgtgcagggccccccaacaccattggttcagagaacggatggcgtgatgggggagtacgagccaaaaatcgaagttcgtttccctgagaccatccaggccgctaaagattcctcagtgaaacttgagtgcttcgccttaggaaatcccgtgccagacatctcttggaggcgcctggatgggagccctttacctggcaaggtcaaatattcgaaaagtcaggctattctcgagattcccaacttccagcaggaagacgaagggttttacgagtgcattgcgtccaacctccgagggcgcaacttggccaaaggccagctgattttctatgcaccccctgagtgggagcagaagatacagaacactcatctctcaatctacgataatctactttgggaatgcaaggcatccggtaagcctaatccatggtacacttggttgaagaatggggagagactaaaccctgaagagaggatccagatcgagaatggcacactgataatcactatgctgaacgtctcagatagtggagtctaccagtgcgcagccgaaaataaatatcagatcatttatgctaatgccgaattaagggtgttagccagtgcccccgatttcagcaaatcaccggttaagaagaaatcttttgtgcaggtgggaggggatattgtaattggatgcaaaccgaatgcctttcctcgtgctgccatctcctggaaacggggtacagagaccttaagacagtccaagcgcattttcctgttagaggatgggtctcttaaaatttacaatattactcgctccgatgcgggaagctacacctgcattgctactaaccagttcgggaccgcaaagaataccgggtctctcattgttaaggagaggacagtgatcacagtgcctccaagcaaaatggacgtaactgtcggagaatccattgtcctgccatgtcaggtgtctcatgacccctccatagaggtggtttttgtttggttctttaacggagacgtgatcgacctgaagaaaggtgtcgcccactttgagagaatcggaggagagtcggttggggacttgatgatcaggaacatacagttgcaccactcaggaaagtacctgtgcacagtgcaaacaaccttggaaagcctgagtgccgtagccgacataatcgttaggggcccccccggcccccccgaggatgtgcaggtagaagatataagctctaccacaagtcagttgtcttggagggctgggccggataacaattcccctattcaaatattcactatccagacgaggacccctttctccgttggctggcaggccgtagccacagttcccgaaattctgaatggaaagacttacaatgctactgtcgtcggactgtccccctgggtggagtacgagttcagagtagtggccggcaactcaatcggcattggtgaaccatccgaacccagcgaactgcttagaaccaaggcctccgtgcctgtcgtggcccctgttaatatccacgggggcgggggtagtcgctccgagctcgtgataacttgggaatctatacccgaggagctgcagaacggagagggattcggctacatcatcatgttccggcctgttgggtctaccacctggagtaaagaaaaagtgagtagcgtggagagcagcaggttcgtttatcgtaacgaatctatcatccccctgtcaccttttgaagtgaaagtgggggtatataacaacgagggagagggtagcctgtccacagtgaccatcgtctattctggagaggacgagcctcagcttgctcctagaggtacctccttacagagttttagcgcttccgaaatggaagttagttggaatgcgattgcctggaaccgaaatacggggcgggtcctgggatacgaagtcttatattggactgatgattccaaggagagcatgattggcaagataagggttagcggcaacgtgactactaagaacatcaccggactgaaggccaatacaatctactttgcaagcgttcgggcgtataatactgccggaaccgggccaagtagtcctccagtcaacgtaacgactaaaaagtccccaccgtctcagccgcctgccaatatcgcttggaagctgaccaactcaaaactctgtctgaattgggagcatgtgaagacaatggaaaacgaatccgaggtcttagggtacaagattctctatcgccagaacaggcagtcaaagactcatattctagaaacaaacaacacctccgccgagctgctggttccattcgaagaggattatcttatagagatccggacagtttctgacggcggagacggaagcagtagcgaagaaatccgcataccaaagatgtccagcctgtcctccagggggatccagtttcttgagccctcaacccacttcttgtcgatcgtgattgtgatcttccactgttttgcgatacagcctctgatatag

SEQ ID NO: 180220 - DNA, 3087 bp, Artificial Sequence
  derived and/or modified sequence
atgcggctgctgtggaagctggtgatcctgctgcccctgatcaactcgtccgcgggcgacggtttactctcgcgaccaattttcacgcaggaaccccatgacgtgatttttcccctggatctgagtaagtctgaagttatattaaattgtgctgcgaatggttaccccagtcctcattaccggtggaaacagaatggcaccgatattgacttcacaatgtcataccattatcgacttgatggcggttctcttgcaattaatagccctcacaccgatcaggatatcggtatgtatcagtgcctagccaccaacctcttgggaaccatactgtctaggaaagccaaattacagttcgcttatatcgaggactttgagactaagacacgcagcacagtcagtgtaagggagggccaaggtgtggtcttactgtgtggcccgcccccccattttggcgatctttcctacgcatggaccttcaacgacaatcctctttacgtgcaggaagacaacaggcgttttgtgagccaggaaactggtaatctctacatcgctaaggtagaacccagcgacgtcggcaactatacgtgtttcattactaataaggaagcccagaggtctgtgcaaggtccaccaacccccctggtccaaagaacagatggggttatgggggagtatgaacctaagattgaggtgcggttccctgaaaccattcaggcagccaaagatagctccgtcaaactcgaatgcttcgctctggggaaccctgttccagacatctcttggcgccgcctcgacggatccccacttccagggaaggtgaaatactctaaatcacaggccatactggaaatccccaattttcaacaggaagatgaagggttttatgagtgtatcgccagcaatctgagggggcggaacctggccaaaggtcagctgatattttatgccccccctgagtgggaacagaagatccagaacacgcatctctcgatttacgataacctgctctgggagtgtaaagcctctgggaaacccaatccctggtatacttggcttaagaatggagagcggttaaacccggaggaacggatccagatcgagaacggaaccctcatcattactatgctcaacgtgtctgactccggcgtctaccagtgcgccgcagagaataagtaccagatcatatatgcgaacgcagaattaagagtgctagcgtccgcaccggatttttcgaagagtcctgtgaagaagaaaagcttcgtacaggtcgggggcgacattgtgatagggtgtaagcctaatgctttccccagggcggccattagctggaagcgcgggaccgagacacttagacagagtaaaaggatatttttgctggaagatgggtccctgaaaatttataacattactagaagcgacgccgggtcctacacttgcattgctacaaatcagttcggcacagccaagaatacgggaagcctgattgtaaaagaaaggacagtcatcaccgtgccaccctctaagatggatgtgacggtgggggagtctatcgtccttccctgccaggtgtcccatgacccaagtattgaggtcgtgtttgtatggtttttcaatggagatgttattgacctcaaaaaaggcgtcgcacacttcgagagaatcgggggagagagtgtaggggatcttatgatccgaaatatccaactgcaccactccggaaagtacttgtgtactgtccagaccacactggaatccctttcagccgtggccgacatcattgtaaggggtccacccgggccgcccgaggatgtacaagttgaggacattagcagcacaacaagtcaacttagttggcgcgccggcccagacaacaactcgcctattcaaatcttcacgatccagacccgcactccgttttccgttggctggcaggccgtcgccactgtgcctgagatactcaacggaaagacatacaatgccaccgtagtcggtctgagcccatgggtggaatacgaatttcgcgtggtggctggcaacagcattggtatcggggaacccagcgaaccgtctgaacttctgaggaccaaggcttctgtcccggtggtggctccggtcaatatccacgggggcggtggcagccggagcgagctcgtaatcacctgggaaagcatacctgaggagctccagaacggggaaggatttggctacataattatgtttagaccggttgggagtactacctggtccaaagagaaggtgtccagcgtggaatcctcccgctttgtgtatagaaatgagtctatcatccccctttcgccattcgaggtcaaggtgggcgtctacaacaacgagggggaggggtcactcagcacagtaacaatcgtctattcaggagaggatgagccgcagctagccccgcgaggcacatctctgcagagcttctctgcgagcgagatggaagtgagctggaacgccatcgcatggaataggaacacggggcgcgtgcttgggtatgaagtgctgtattggaccgacgactctaaggagtccatgattggtaagatcagggtgagcggcaacgtcaccactaaaaacattaccggtctgaaggcaaatacaatctattttgctagtgttcgggcctacaatactgccgggacggggccaagttcaccgcctgtgaacgtaactacaaagaaatcacccccgtcgcagcctccagctaacattgcttggaagctgaccaatagcaaactctgtctcaactgggagcacgtgaaaactatggaaaacgagtccgaagtgctaggctacaagatcctgtaccgacaaaatagacagagcaaaactcacatactggagacaaacaatacatcagccgaactgttggtccccttcgaagaagattatctgattgaaatccggaccgtgtccgatggcggcgacgggagcagctccgaggaaataaggatcccgaagatgagcagtctgagttctagagggatccagtttctcgagccatcaacgcacttcctttctatcgttatcgtaatcttccactgttttgccatccaacccctcatctag

SEQ ID NO: 180221 - DNA, 2871 bp, Artificial Sequence
  derived and/or modified sequence
atgagctaccactaccggctggacggcggcagcctggccatcaactcaccacatacggatcaggatatcgggatgtatcagtgtctggccaccaacctgctggggaccattttaagccgtaaagctaagctgcagtttgcatacatcgaggatttcgagacgaaaaccaggtctacagtttcagttcgcgagggacagggagtggtgttgctctgtggcccaccccctcacttcggagaccttagctacgcctggacatttaacgataaccccctctatgttcaagaagacaacagacgcttcgtgtctcaagagactggcaatttatatatcgccaaggtagagccgagtgatgtggggaattatacatgtttcattactaataaggaagctcagaggagcgtccagggaccccctacccctctggtgcagcgcactgatggggtgatgggggagtacgagcccaagatagaagtgcggttcccagagactatccaggcagctaaggattcatctgtgaagctagaatgctttgcattgggaaatcctgttcctgatatctcttggcgaaggttggacggctcacccctgccgggcaaggtcaaatattcaaaatcccaggccattctggaaatacctaactttcagcaagaggatgaagggttctacgaatgcattgcatcgaacctcagaggccgcaatctcgcaaagggccaacttatcttttatgccccacctgaatgggaacagaaaatacaaaacacccacctttctatttacgacaatctgctttgggagtgcaaggcatctggcaagcctaatccttggtatacctggctgaagaatggggaacggctgaaccctgaggaacggatccaaattgaaaacggtaccttaataattacaatgttaaacgtttctgactccggcgtttatcaatgtgctgcggagaataagtaccaaatcatttatgctaacgcggaactgagggtgcttgccagcgcacctgacttttctaaaagtccagtgaaaaaaaagtccttcgtccaagtggggggagatatcgtgatagggtgtaagccgaacgccttcccacgcgccgctatctcctggaaacggggaactgagactctgaggcagtccaaacgaatcttcctcttagaagatggctcactgaaaatttacaatatcactcgctcagacgctggctcctacacctgcatcgctacaaaccagttcggcaccgccaaaaataccgggagcttgattgtgaaagaaaggaccgtcattactgtccctccttccaaaatggacgtgactgtgggcgaatctatcgtcttgccatgccaggtcagtcacgacccaagcatcgaggtggtttttgtttggtttttcaatggagacgtcatcgatttgaaaaagggcgtcgcccacttcgaaagaataggtggggagagcgtgggagatctcatgattagaaatattcagctgcatcatagcggcaaatatctgtgtaccgtgcagaccacactagaaagcttatccgccgtcgcagatataatcgtacggggtccacctggccctcccgaagacgtgcaggtagaggacataagctctaccaccagtcagctctcttggcgtgcaggccccgataataatagccccattcagatatttacgatccagacgagaactccgtttagcgtcggctggcaggccgtcgccacggttcctgaaatcctcaatggtaagacgtataatgcaacggtcgtggggctatcaccttgggtagagtacgagttcagggtggtcgccggtaattccatcggcattggagaaccgtcagagccttcagaactgttgcgcaccaaggccagcgtgccagtggttgctcctgtcaacatccacggaggcggggggagccgctctgaattggttatcacttgggaatctattcccgaagagctccaaaatggtgaggggttcggatacatcataatgtttaggcccgttggatcaactacctggagcaaagagaaagtgtcttccgtcgagagttccaggtttgtttacagaaatgaatctattatcccactctcgccatttgaagttaaggttggagtttataataatgagggcgaggggtccctgagtacggttactatagtctattcaggcgaggacgaaccccaactggcccctcgtggcaccagcctgcaaagcttctccgctagcgagatggaggtctcctggaacgctatcgcatggaatcgcaacaccggacgagtacttgggtatgaggtcttgtattggactgacgactcaaaggagtccatgatcgggaagatcagggtgagcggaaatgtcacaaccaagaatattaccggcttaaaggccaataccatatacttcgcctccgttagagcttacaataccgccggcactggaccctcatctccccccgtgaatgtaaccaccaaaaaatcgcccccttcacagccacccgccaacatcgcttggaagcttacaaactccaagctttgtttgaactgggagcacgtgaagacgatggagaatgaaagcgaggtccttggatataagattctgtatagacagaatcgacagagcaagacacatatactagagactaacaatacatccgccgaactgttggtcccatttgaagaagattatctgattgagattaggacagtaagtgacgggggcgatggaagtagcagcgaagagatcaggatcccaaagatgtcctcactgtcctcccgtggaattcaattcctggagccttccacccactttcttagtattgtgatcgtgatcttccactgctttgccatccaacctctgatctag

SEQ ID NO: 180222 - DNA, 3087 bp, Artificial Sequence
  derived and/or modified sequence
atgcgcttgctgtggaaactcgttatcctgctccctctcatcaatagcagtgcaggcgatggcttattgtctaggcccatattcacccaagagccacacgacgtgatctttcccttagacctgtctaaaagcgaagtaatattaaactgcgcggcaaatggctacccaagcccacactacaggtggaagcagaatgggacagacatcgactttacaatgtcctaccactaccggctcgacggaggcagcttggccattaattctcctcacaccgaccaggacatcggcatgtaccagtgcttggccacaaatcttttgggcaccattttgtctaggaaggcaaagctccagttcgcctatatagaggacttcgagacgaagactcgatctacggtctctgtccgggaaggccagggcgttgtcctactctgcggcccacctccacacttcggcgacctgagttacgcttggacttttaacgacaacccgctttatgtgcaagaggataacagacgctttgtcagccaggagaccggaaatctgtatatagcaaaagtggaaccaagtgacgtgggcaactacacctgtttcattactaacaaagaggcccagaggtcggtgcaaggcccaccaacgccacttgtgcagaggaccgacggcgtgatgggagagtacgagcctaaaattgaagtgaggttcccagaaaccattcaggctgcaaaggactcatccgtgaagctggaatgtttcgctctcggaaatcccgtacctgatataagctggcgccgactggacggcagtcccctgcccggtaaggtcaagtatagtaagagccaagcgattctggaaatccctaatttccagcaggaggatgaggggttttacgagtgcattgcttcaaacctgcgcggaagaaatctcgcgaaaggccaacttattttctacgctccccctgaatgggagcaaaagatccaaaacacccacctttccatctacgacaatctgctgtgggagtgtaaggcctccggcaaacccaacccttggtatacatggctcaagaacggcgaacgcttaaatccagaagaacgtattcagatagagaatggaacgctgattatcacaatgttgaacgtgtccgattccggcgtgtaccagtgtgcggcagaaaacaaatatcagatcatctatgccaacgcagagctcagggtcttggcgtctgctccggatttttctaagtcacccgttaagaagaaaagctttgtacaagttggaggcgatatcgtgatcggatgcaagccaaacgcctttcctcgtgccgctatttcttggaagcgtggcacggaaactcttagacagtctaagcgtatctttttgctggaagacggcagtctgaagatctacaacatcacccggtccgacgccggttcttacacttgcatagccacgaaccagtttggcacagcaaagaacaccggctccctgatcgtaaaggaaagaaccgtaattacagtgcctccaagtaagatggatgtcaccgtaggagagagcattgtgctgccatgtcaagtgagccacgacccttcaattgaagtggtttttgtgtggttctttaacggtgatgtgattgacctgaagaagggcgtcgctcactttgaacgaatcgggggagagagcgtgggagacctgatgataaggaatattcagctccatcactccggcaaatatttatgtacggtccaaaccactctggagtctctgtctgccgtggccgacataattgtgcgcggaccacccggaccacctgaggatgtgcaagtcgaggacatctccagtacaacaagccagctgtcatggcgagcagggcctgacaataacagcccgatccagatctttactatccagacaagaacacccttctccgtcgggtggcaagccgtggccaccgtgccagaaatcctgaatggcaaaacctacaatgctactgtagtggggctgagcccatgggtggagtacgaattcagggttgtagccggtaacagtatcggaattggcgaacccagcgagccctccgaattgttgcggactaaggcgagcgtgcctgtcgttgccccagtgaatattcacgggggaggaggctcccggtcggagcttgtgatcacctgggagtccatccctgaggagctgcagaatggggaaggctttggctacatcatcatgtttaggcccgtcggatctacgacctggtccaaggaaaaggtgagctcagttgaatcgagtaggttcgtctatcgcaatgaaagcatcatccccctgtcgccattcgaggtgaaggttggggtgtataataacgagggcgaaggctccctgagtactgttaccatagtgtactccggggaggatgaaccccaactcgcccctcgaggcacaagtcttcaaagtttctcagcatccgagatggaagtgagctggaatgccatcgcctggaatcgaaacactggacgtgtgctgggttacgaggtgctgtactggactgacgactccaaggaatccatgattgggaaaattcgcgtgagtggaaatgtgactacaaaaaacattacgggtctgaaggccaataccatctactttgccagcgtgagggcatataataccgccggtacagggccttcgagcccgcctgtgaatgtcaccacgaaaaagtcacctccaagtcaaccccctgccaatattgcctggaagttgaccaactccaagctgtgcctgaactgggagcacgttaagactatggaaaatgagtctgaagttctggggtacaagattttatataggcagaaccgccagtcgaaaactcacatcctggaaactaataacactagtgctgagctgctggttccctttgaggaggattacctcatcgagataaggacagtgagcgatggcggagacggcagtagcagtgaggagatccgcattcctaaaatgtcgagcctgtcttcccggggaattcaattcctagaaccaagcacccactttcttagcatcgtcatcgtcattttccattgttttgctatccagcctctgatatag

SEQ ID NO: 180223 - DNA, 3087 bp, Artificial Sequence
  derived and/or modified sequence
atgcgtctgctgtggaagttggtgatcctgctgcccctaatcaacagcagcgcaggggacgggctcttgtctcggccaatctttacacaggagcctcatgatgtgatattccccttggacctgtctaagagtgaggttatcctcaactgcgctgcaaatggatatcccagtccacattatagatggaagcagaacggaacagatatcgatttcacaatgagctaccactacaggctggatggagggtccctagctataaactccccccacaccgaccaggacatagggatgtaccaatgcttggccactaacctgttggggaccatcttgtcacggaaggccaagcttcagtttgcctacatagaggattttgaaacaaaaactcggtctactgtctctgtgcgcgagggccagggcgttgtgctgctgtgtggacctcccccacattttggtgatctgagctatgcctggacatttaatgataatccactgtacgtgcaagaggacaatcgtcgattcgtgagtcaggagacaggtaacctctatattgccaaggtcgaaccttccgacgtcggtaattacacctgctttatcactaataaggaggctcagaggtctgtgcagggtcctccaactccgcttgtgcaacgcaccgatggagttatgggcgaatatgagcctaaaattgaagtgagatttccagagactattcaggccgctaaggacagctcagtgaagctcgagtgtttcgccttgggaaatcccgtgccggatatttcctggaggagactggatggatctccactcccaggaaaggtaaaatactccaaatctcaggctattttggagatccctaacttccagcaggaggatgagggcttctacgagtgtattgcttccaacctgaggggacgcaacctcgcaaaaggtcagttgattttttacgctccacctgagtgggagcagaagatacagaacactcatctctcaatctacgacaatttactctgggagtgtaaggcatccggaaagcccaatccttggtacacatggctgaaaaacggcgagcgcctgaatccagaagaacgaatccaaatcgagaacggcaccctgatcatcactatgctcaacgtcagtgattcaggagtgtatcaatgtgctgcagaaaacaaataccagattatctacgcaaatgcagagctgcgcgtgttagcctccgcaccagactttagcaaatctcctgtaaaaaaaaaaagtttcgtgcaggtgggcggagacatcgtgattgggtgtaagcccaatgcttttccgcgagcagccatttcttggaaacgcggaactgagacactacgtcagtctaaaaggattttcttactcgaggacggatccctgaagatttacaacattaccagaagcgatgcgggatcatatacttgcatcgctaccaaccagttcggaacagcaaagaatacaggatcactcattgttaaagaacggacggtcattaccgtgccaccctcgaagatggatgttactgtgggcgagtcaattgtgctgccctgccaggtgtcacacgacccctctattgaggtggttttcgtttggttctttaatggcgacgttattgatctaaagaaaggcgtggcccatttcgagaggatcgggggtgaatctgtcggcgacctgatgatccggaatattcagctccaccatagcggaaagtatctctgcactgtacagacaaccttggaatctctgagtgccgtggcggatattattgtgaggggccctcccggtcctcccgaggatgtgcaggtcgaagatatttcttcaaccacatcccaattatcttggcgagccggaccagataataacagcccgatccagatattcacaatacaaacaagaaccccgttcagcgtggggtggcaggccgtcgctaccgtgcccgagatactcaacggaaaaacctataatgccaccgttgtggggctatccccatgggtggaatacgagttccgagtggtggccggaaattccattggcatcggcgagccaagtgagccttcggaactgcttcgcactaaggcctccgtaccagtggtggcacccgtcaatattcacggcggtgggggatctcggtctgaactggtcattacctgggagagcatcccggaagagctgcaaaacggggaggggttcggctacatcattatgtttaggccagtgggaagcacaacatggtccaaagaaaaagtgtcttctgtagagtcctccaggtttgtgtataggaacgaaagcatcataccgctttcgccttttgaggtgaaagtcggcgtatacaacaacgaaggagagggaagtctatctaccgttacaatcgtgtacagcggtgaagacgaacctcagctggccccaagaggaacttctctgcagtcattcagtgcgtcagagatggaggtgtcctggaatgccatcgcatggaatcgtaacacggggcgagtactgggctatgaagttctctactggacagacgactccaaggagagtatgatcggcaaaatccgcgtcagtgggaatgtcacaaccaaaaacattacggggctaaaggctaacacaatctacttcgcaagcgtgcgcgcttacaacacagcaggtactggtccatcctccccccctgtcaacgtgactaccaagaagagtcctccctcccaacctcctgccaacatcgcttggaagcttacgaactccaagttatgtttaaactgggagcatgtgaagactatggagaatgagtccgaagttctagggtacaaaatcttataccgtcagaaccgacagagcaagacccatatcctcgaaaccaataatacttcagccgagctgctggttccatttgaggaggactatctgattgaaatcaggaccgtgtccgacgggggagacggatccagtagcgaagaaattcgcatccccaaaatgagctccctaagctcacggggtatccagtttctcgaaccaagcacacacttcttgagcattgtaattgtgatttttcactgtttcgccatccagcccttaatttag

SEQ ID NO: 180224 - DNA, 2871 bp, Artificial Sequence
  derived and/or modified sequence
atgagctatcactataggctggatggagggtctttagccataaatagcccccatacagatcaggatataggtatgtaccaatgtctggccactaatctgcttggtaccattctgtccagaaaggccaaactccagtttgcctacatcgaagattttgagacaaagacccgctcaacggtttcggttagagaagggcaaggggtggtgctgctgtgtggtcctccccctcacttcggagacctgtcctacgcgtggaccttcaacgataacccgctctatgtccaggaagacaacagaagatttgtgagccaggagactggtaacctgtacattgctaaagtggagccctctgatgttggcaactatacatgtttcatcactaataaggaggcccagaggtctgtgcaaggccctccaaccccccttgtccagcggactgacggcgtgatgggcgaatatgaaccaaagattgaggtgcggttcccagaaaccatccaggccgcaaaggattcatcagtgaagctggaatgcttcgctctcggcaatcctgtcccggatatcagctggcggagactagatggcagccctttgcccggtaaggtgaaatacagcaaaagccaggcaatactggagattcctaactttcagcaggaggacgaaggtttttatgaatgtattgcctccaatctaaggggcagaaatcttgccaaggggcagttgatcttctatgcccctccagagtgggaacagaaaattcagaatacgcacttatctatttatgacaatctcttgtgggagtgtaaggcttcggggaagcctaatccctggtatacctggttgaaaaacggcgagaggctaaatccagaagagaggattcagattgaaaacggcacactcatcattaccatgctcaacgtcagtgactctggtgtgtaccaatgtgcagccgagaacaaataccagatcatctacgctaatgccgagctacgggtgttggcctcagcccctgatttctccaagtctcccgtgaaaaagaagtccttcgtgcaggttgggggagacattgtgatcggatgtaaacccaacgctttcccacgcgcagccatttcatggaaaaggggcaccgagacacttcgccagagtaaacgtatctttctgctcgaggacggttcgttgaagatatacaacatcaccagaagcgatgccggatcatatacgtgcatcgccacaaaccagtttggcactgctaaaaataccggctcactcatagtgaaagagaggaccgttattactgtgcctccgagtaagatggatgtgaccgtgggcgaatcgatagtactgccttgccaggtgtcacatgatccctcgatcgaggttgtcttcgtgtggttttttaacggggatgttatcgatctgaagaaaggcgtggcgcacttcgagcgaatcggaggggagagcgtgggggacttaatgatacgaaatattcagctgcatcattccggtaaatacctctgcactgtgcagactaccctggaaagcctttcagcggtggctgacatcatcgtaaggggtcccccagggcctcctgaggacgtgcaagtcgaggacatcagctccactacctcgcagttatcatggcgggctgggccagacaacaactcgcccattcagatatttaccatccagacaaggacacctttttccgtcggctggcaagccgtggcgacagtccccgagattctgaatggtaagacttataacgcgactgtggtcgggctgtccccatgggtcgaatatgagttcagagtcgtagcgggaaactccataggtatcggggagccttccgaacctagcgaattacttaggacaaaagcctctgtacctgtggtcgccccagtgaacattcacggagggggaggctcccgatccgagctggtgattacctgggaatccatccctgaagagctgcagaatggggagggattcggatatattatcatgttccgccctgttggaagtacaacctggtcaaaggagaaggtatctagtgtcgagtcatctcgctttgtttaccgaaacgagtcaatcataccactgtcaccatttgaagtgaaagtgggcgtgtataacaatgagggagagggtagcctttctactgtgacgattgtatatagtggggaagacgagccccagttagctcctcgcggtacgtccctgcaatcgttctccgcttcagagatggaagtctcctggaacgccattgcgtggaatcgtaacacagggagggtgcttggctacgaggtgctttattggacagacgatagcaaagaaagtatgatcggaaaaattcgggtgtccggcaacgtgaccaccaagaacattactggcctgaaggctaataccatctattttgcgtctgttcgggcttataatacggctggcaccggaccgtctagtcccccagtgaatgtcaccacaaagaaatctccaccctcgcaaccgcctgctaatatagcatggaaactgaccaatagcaagctttgcttaaactgggaacatgtgaaaaccatggagaatgaaagcgaggtcctgggctacaagattctgtataggcaaaaccggcagagcaaaacccacatactggaaactaataacaccagtgctgagctcctggttccattcgaggaggattatcttatagagatcaggaccgtctctgacggtggcgacggctcctctagcgaggagatccgaattccaaagatgagctccctctcctcaagagggatccagtttctcgagccctccacgcatttcttgtccatcgtgatcgttattttccactgctttgccattcagcccctcatctag

SEQ ID NO: 180225 - DNA, 3814 bp, Artificial Sequence
  derived and/or modified sequence
aagagagattttctgatgacccgacaggagtgactatctccagtcaaagaaagaggagggtgaatttaatctttcatggccctggaatggcagctgctctcagctctctctgattctgtgaaggttgatgaagatagagctggctttcaatgtagaaagaattttccttttgaatattccaaacgagagctttgcacatgtgcctcaagaactgattgtctggctccgacaggaatgcagcaggagaggagcgtatttcatgcttaagaccagagaagagccacgcaatactcagtggataaaaggcttgcagtcccagctgggaaaaagagtcccattatctcccagctgcatagacattccatacggcttggttctgcctggacgcacagcatgcctggctgagagcttgaaacagagttctgcagaaaaactgtaaagatcccgagacatttccctggtaagatctactcttgagatactgactggaagatagactgttttgttccacctgattgtatgggagaaatttttgaccttagaaagtggaaatgaggttgctatggaaactggtaattctgctgccactcataaactcttctgcaggtgatggtcttttaagccgtcctatttttactcaggagccacatgatgtcatttttcctttggatttatcaaaatctgaggtcatcctgaattgtgctgctaatggttacccttcgcctcattataggtggaagcaaaatggcacagacattgattttactatgagttatcactacaggttggatggaggcagtcttgcaatcaatagcccccacacagatcaagatattggcatgtaccagtgcctggccaccaatcttctggggacaattctgagtcggaaggcaaagctccaatttgcatatattgaagactttgaaactaaaacaagaagcacagtatctgtccgagaaggtcaaggtgtggtgcttctctgtggcccaccgccacattttggagatttatcttatgcatggaccttcaatgataaccccttatacgtccaagaggacaataggcgatttgtatctcaagagacgggaaacttgtacattgccaaagtggaaccatcagatgtgggcaactacacttgctttataactaacaaagaggcccagagaagtgttcaaggtccacccactccattagtgcagcgcactgatggtgtgatgggggaatatgaaccaaagattgaagtgcgttttcctgaaactatacaagctgcaaaggattcatctgtaaaactggaatgttttgcccttggaaatccagtccccgatattagttggagaaggttggacgggagcccgttgccagggaaagtcaagtacagcaaatcccaagctatccttgaaatcccgaacttccaacaagaagatgaaggcttttatgagtgcattgcaagcaaccttcgaggaagaaaccttgcaaagggtcaactcattttttatgctcctccagaatgggaacagaaaatccaaaatacacacctctctatctatgacaacttgctctgggaatgtaaagctagtggaaagccaaacccttggtatacatggttaaaaaatggtgaacgactcaacccagaggagagaattcaaatagaaaatgggacactcatcataacgatgctgaatgtgtcagattctggtgtgtaccaatgtgctgcagaaaacaaatatcagataatttatgcaaatgctgaattgagagttttagcctcagctccagatttctccaaaagtccagttaaaaaaaagtcttttgttcaagttggtggggatattgttatcggatgcaaaccaaatgcttttcccagggcagctatctcttggaaaagaggaacggagacccttagacaaagcaaaagaatatttctcttggaggatggcagcctcaagatatataatattaccaggtcagatgctggatcatatacatgcatagccacaaatcagtttggcactgcaaagaacactggcagcctcattgtaaaagagagaactgtcattaccgtcccaccttccaaaatggatgttacagttggcgagagtatagtgctaccatgccaggtgtcccatgacccctccattgaagtggtatttgtatggtttttcaatggagatgtcatagacttaaaaaaaggagtggctcattttgaaaggattggaggagaatctgttggggatttgatgataaggaatattcagttacatcattcaggaaaatatctctgcacagtacaaacaaccctagaaagtttatctgcagtagccgatatcattgttagaggtccaccaggtcctcctgaggatgtgcaagtggaagacatttccagtactacttctcaactaagttggagagcaggcccagataataacagtcccattcaaatatttactattcagactcggacaccattttctgtgggttggcaggctgttgctacagttccagaaattctcaatggtaagacatacaatgcaacagtggttggtttgagtccttgggtggaatatgaatttcgtgttgttgccggcaacagcattgggattggagaaccaagtgaaccatcagaattgttaagaactaaagcatcagtccctgttgtggcaccagtaaacatccatggaggtggaggaagtcggtctgaactcgtcattacgtgggagtcaattccagaagaactgcagaatggggagggatttggatatatcatcatgttccggccagtgggctcgacaacctggtccaaggagaaagtgtcatctgtggaatcatcaaggtttgtctacagaaatgaaagcatcatcccactgtctccctttgaagtcaaagtgggtgtgtataataatgaaggagaaggatccctgagtactgtgaccattgtctactctggggaagatgaacctcaactggccccaaggggaacttctctccagagtttttctgcttctgaaatggaggtttcatggaatgctattgcctggaatagaaacactggaagagtgctgggctatgaggtcttatactggacagatgactccaaagaatccatgataggtaaaattagagtcagtggaaatgtcacaaccaaaaacatcacggggctgaaagctaataccatctactttgcttccgtaagagcttacaacactgctgggacagggccctcaagccccccagtcaatgttaccaccaaaaagtctcctccaagccaaccaccagcaaacattgcctggaagctgacaaactctaaattatgcttgaactgggagcatgtaaaaaccatggaaaatgagtctgaagttttggggtacaagattctgtaccggcaaaacagacagagtaaaactcatattttggaaacaaacaatacatcagctgagcttctggttccatttgaagaagactacttaattgaaataagaacagtcagtgatggtggagatggaagcagcagtgaggaaattaggattccaaaaatgtcaagtttgagttccagaggaattcaattcttagaacctagcacccattttctttccattgtcattgtgatttttcactgttttgctattcagccacttatctgatgaataaaaccataaatctttgagagttttttgaaagcaaatcattctgtatatatgctctccagcctctgacacaagatgcgttcttaatacagacttgtttgcaaagaaaaaaaaaagtatattattaaaatcctgtaaatatctatggtatattaataaaacaattttaaaca

SEQ ID NO: 180226 - DNA, 4513 bp, Artificial Sequence
  derived and/or modified sequence
aatgcagtgaaaccagaggaagaaaaaaattacttcctttcctgttggaaacctaataagtagttagtctgacccagttttcaataagagagattttctgatgacccgacaggagtgactatctccagtcaaagaaagaggagggtgaatttaatctttcatggccctggaatggcagctgctctcagctctctctgattctgtgaaggttgatgaagatagagctggctttcaatgtagaaagaattttccttttgaatattccaaacgagagctttgcacatgtgcctcaagaactgattgtctggctccgacaggaatgcagcaggagaggagcgtatttcatgcttaagaccagagaagagccacgcaatactcagtggataaaaggcttgcagtcccagctgggaaaaagagtcccattatctcccagctgcatagacattccatacggcttggttctgcctggacgcacagcatgcctggctgagagcttgaaacagagttctgcagaaaaactgtaaagatcccgagacatttccctgactcttgagatactgactggaagatagactgttttgttccacctgattgtatgggagaaatttttgaccttagaaagtggaaatgaggttgctatggaaactggtaattctgctgccactcataaactcttctgcaggtgatggtcttttaagccgtcctatttttactcaggagccacatgatgtcatttttcctttggatttatcaaaatctgaggtcatcctgaattgtgctgctaatggttacccttcgcctcattataggtggaagcaaaatggcacagacattgattttactatgagttatcactacaggttggatggaggcagtcttgcaatcaatagcccccacacagatcaagatattggcatgtaccagtgcctggccaccaatcttctggggacaattctgagtcggaaggcaaagctccaatttgcatatattgaagactttgaaactaaaacaagaagcacagtatctgtccgagaaggtcaaggtgtggtgcttctctgtggcccaccgccacattttggagatttatcttatgcatggaccttcaatgataaccccttatacgtccaagaggacaataggcgatttgtatctcaagagacgggaaacttgtacattgccaaagtggaaccatcagatgtgggcaactacacttgctttataactaacaaagaggcccagagaagtgttcaaggtccacccactccattagtgcagcgcactgatggtgtgatgggggaatatgaaccaaagattgaagtgcgttttcctgaaactatacaagctgcaaaggattcatctgtaaaactggaatgttttgcccttggaaatccagtccccgatattagttggagaaggttggacgggagcccgttgccagggaaagtcaagtacagcaaatcccaagctatccttgaaatcccgaacttccaacaagaagatgaaggcttttatgagtgcattgcaagcaaccttcgaggaagaaaccttgcaaagggtcaactcattttttatgctcctccagaatgggaacagaaaatccaaaatacacacctctctatctatgacaacttgctctgggaatgtaaagctagtggaaagccaaacccttggtatacatggttaaaaaatggtgaacgactcaacccagaggagagaattcaaatagaaaatgggacactcatcataacgatgctgaatgtgtcagattctggtgtgtaccaatgtgctgcagaaaacaaatatcagataatttatgcaaatgctgaattgagagttttagcctcagctccagatttctccaaaagtccagttaaaaaaaagtcttttgttcaagttggtggggatattgttatcggatgcaaaccaaatgcttttcccagggcagctatctcttggaaaagaggaacggagacccttagacaaagcaaaagaatatttctcttggaggatggcagcctcaagatatataatattaccaggtcagatgctggatcatatacatgcatagccacaaatcagtttggcactgcaaagaacactggcagcctcattgtaaaagagagaactgtcattaccgtcccaccttccaaaatggatgttacagttggcgagagtatagtgctaccatgccaggtgtcccatgacccctccattgaagtggtatttgtatggtttttcaatggagatgtcatagacttaaaaaaaggagtggctcattttgaaaggattggaggagaatctgttggggatttgatgataaggaatattcagttacatcattcaggaaaatatctctgcacagtacaaacaaccctagaaagtttatctgcagtagccgatatcattgttagaggtccaccaggtcctcctgaggatgtgcaagtggaagacatttccagtactacttctcaactaagttggagagcaggcccagataataacagtcccattcaaatatttactattcagactcggacaccattttctgtgggttggcaggctgttgctacagttccagaaattctcaatggtaagacatacaatgcaacagtggttggtttgagtccttgggtggaatatgaatttcgtgttgttgccggcaacagcattgggattggagaaccaagtgaaccatcagaattgttaagaactaaagcatcagtccctgttgtggcaccagtaaacatccatggaggtggaggaagtcggtctgaactcgtcattacgtgggagtcaattccagaagaactgcagaatggggagggatttggatatatcatcatgttccggccagtgggctcgacaacctggtccaaggagaaagtgtcatctgtggaatcatcaaggtttgtctacagaaatgaaagcatcatcccactgtctccctttgaagtcaaagtgggtgtgtataataatgaaggagaaggatccctgagtactgtgaccattgtctactctggggaagatgaacctcaactggccccaaggggaacttctctccagagtttttctgcttctgaaatggaggtttcatggaatgctattgcctggaatagaaacactggaagagtgctgggctatgaggtcttatactggacagatgactccaaagaatccatgataggtaaaattagagtcagtggaaatgtcacaaccaaaaacatcacggggctgaaagctaataccatctactttgcttccgtaagagcttacaacactgctgggacagggccctcaagccccccagtcaatgttaccaccaaaaagtctcctccaagccaaccaccagcaaacattgcctggaagctgacaaactctaaattatgcttgaactgggagcatgtaaaaaccatggaaaatgagtctgaagttttggggtacaagattctgtaccggcaaaacagacagagtaaaactcatattttggaaacaaacaatacatcagctgagcttctggttccatttgaagaagactacttaattgaaataagaacagtcagtgatggtggagatggaagcagcagtgaggaaattaggattccaaaaatgtcaagtttgagttccagaggaattcaattcttagaacctagcacccattttctttccattgtcattgtgatttttcactgttttgctattcagccacttatctgatgaataaaaccataaatctttgagagttttttgaaagcaaatcattctgtatatatgctctccagcctctgacacaagatgcgttcttaatacagacttgtttgcaaagaaaaaaaaaagtatattattaaaatcctgtaaatatctatggtatattaataaaacaattttaaacacttttgaattttaaaatccgcacatgattacatgaattcctaggtgccacattaacctggggagttgtaactgctgtgtcttttaagttacttatatggagaaaataaataactcccctcaatgatgctgatgatgaatacaaacttggctcctagttaccataactcacatgtacatttttatgtattccagacaatcacttcagtatttaaaatttccaccctacttcaaaataaaatacaattatttgtttatagttgggattctttaaaaatacaaactattccaaagcatggggtgcttttatctctgaatcaagttggaataagaaatctttttactcaagaatatttcaatatacatgatgttcttctcagcccacttttcagaagattcagtcacaataaaggcagaaaaagtattttatggcaaagaaaaataaatgatgggaaatgagcacccacctaaaataatcttctaacaactctggtatatattaagcaattgctcatggcaaagttgaacatttgaactgctgcatgaacaaatctcaggtaattatgacaagttgattgcaatgtatgtggccttatttttataataaaacaatgtggaaacagaa

SEQ ID NO: 180227 - DNA, 3519 bp, Artificial Sequence
  derived and/or modified sequence
aataagagagattttctgatgacccgacaggagtgactatctccagtcaaagaaagaggagggtgaatttaatctttcatggccctggaatggcagctgctctcagctctctctgattctgtgaaggttgatgaagatagagctggctttcaatgtagaaagaattttccttttgaatattccaaacgagagctttgcacatgtgcctcaagaactgattgtctggctccgacaggaatgcagcaggagaggagcgtatttcatgcttaagaccagagaagagccacgcaatactcagtggataaaaggcttgcagtcccagctgggaaaaagagtcccattatctcccagctgcatagacattccatacggcttggttctgcctggacgcacagcatgcctggctgagagcttgaaacagagttctgcagaaaaactgtaaagatcccgagacatttccctggtgatggtcttttaagccgtcctatttttactcaggagccacatgatgtcatttttcctttggatttatcaaaatctgaggtcatcctgaattgtgctgctaatggttacccttcgcctcattataggtggaagcaaaatggcacagacattgattttactatgagttatcactacaggttggatggaggcagtcttgcaatcaatagcccccacacagatcaagatattggcatgtaccagtgcctggccaccaatcttctggggacaattctgagtcggaaggcaaagctccaatttgcatatattgaagactttgaaactaaaacaagaagcacagtatctgtccgagaaggtcaaggtgtggtgcttctctgtggcccaccgccacattttggagatttatcttatgcatggaccttcaatgataaccccttatacgtccaagaggacaataggcgatttgtatctcaagagacgggaaacttgtacattgccaaagtggaaccatcagatgtgggcaactacacttgctttataactaacaaagaggcccagagaagtgttcaaggtccacccactccattagtgcagcgcactgatggtgtgatgggggaatatgaaccaaagattgaagtgcgttttcctgaaactatacaagctgcaaaggattcatctgtaaaactggaatgttttgcccttggaaatccagtccccgatattagttggagaaggttggacgggagcccgttgccagggaaagtcaagtacagcaaatcccaagctatccttgaaatcccgaacttccaacaagaagatgaaggcttttatgagtgcattgcaagcaaccttcgaggaagaaaccttgcaaagggtcaactcattttttatgctcctccagaatgggaacagaaaatccaaaatacacacctctctatctatgacaacttgctctgggaatgtaaagctagtggaaagccaaacccttggtatacatggttaaaaaatggtgaacgactcaacccagaggagagaattcaaatagaaaatgggacactcatcataacgatgctgaatgtgtcagattctggtgtgtaccaatgtgctgcagaaaacaaatatcagataatttatgcaaatgctgaattgagagttttagcctcagctccagatttctccaaaagtccagttaaaaaaaagtcttttgttcaagttggtggggatattgttatcggatgcaaaccaaatgcttttcccagggcagctatctcttggaaaagaggaacggagacccttagacaaagcaaaagaatatttctcttggaggatggcagcctcaagatatataatattaccaggtcagatgctggatcatatacatgcatagccacaaatcagtttggcactgcaaagaacactggcagcctcattgtaaaagagagaactgtcattaccgtcccaccttccaaaatggatgttacagttggcgagagtatagtgctaccatgccaggtgtcccatgacccctccattgaagtggtatttgtatggtttttcaatggagatgtcatagacttaaaaaaaggagtggctcattttgaaaggattggaggagaatctgttggggatttgatgataaggaatattcagttacatcattcaggaaaatatctctgcacagtacaaacaaccctagaaagtttatctgcagtagccgatatcattgttagaggtccaccaggtcctcctgaggatgtgcaagtggaagacatttccagtactacttctcaactaagttggagagcaggcccagataataacagtcccattcaaatatttactattcagactcggacaccattttctgtgggttggcaggctgttgctacagttccagaaattctcaatggtaagacatacaatgcaacagtggttggtttgagtccttgggtggaatatgaatttcgtgttgttgccggcaacagcattgggattggagaaccaagtgaaccatcagaattgttaagaactaaagcatcagtccctgttgtggcaccagtaaacatccatggaggtggaggaagtcggtctgaactcgtcattacgtgggagtcaattccagaagaactgcagaatggggagggatttggatatatcatcatgttccggccagtgggctcgacaacctggtccaaggagaaagtgtcatctgtggaatcatcaaggtttgtctacagaaatgaaagcatcatcccactgtctccctttgaagtcaaagtgggtgtgtataataatgaaggagaaggatccctgagtactgtgaccattgtctactctggggaagatgaacctcaactggccccaaggggaacttctctccagagtttttctgcttctgaaatggaggtttcatggaatgctattgcctggaatagaaacactggaagagtgctgggctatgaggtcttatactggacagatgactccaaagaatccatgataggtaaaattagagtcagtggaaatgtcacaaccaaaaacatcacggggctgaaagctaataccatctactttgcttccgtaagagcttacaacactgctgggacagggccctcaagccccccagtcaatgttaccaccaaaaagtctcctccaagccaaccaccagcaaacattgcctggaagctgacaaactctaaattatgcttgaactgggagcatgtaaaaaccatggaaaatgagtctgaagttttggggtacaagattctgtaccggcaaaacagacagagtaaaactcatattttggaaacaaacaatacatcagctgagcttctggttccatttgaagaagactacttaattgaaataagaacagtcagtgatggtggagatggaagcagcagtgaggaaattaggattccaaaaatgtcaagtttgagttccagaggaattcaattcttagaacctagcacccattttctttccattgtcattgtgatttttcactgttttgctattcagccacttatctgatgaataaaaccataaatctttgag

SEQ ID NO: 180228 - DNA, 3087 bp, Artificial Sequence
  derived and/or modified sequence
atgagactgctgtggaagctggtgatcctgctgcccctgatcaacagcagcgccggcgacggcctgctgagcagacccatcttcacccaggagccccacgacgtgatcttccccctggacctgagcaagagcgaggtgatcctgaactgcgccgccaacggctaccccagcccccactacagatggaagcagaacggcaccgacatcgacttcaccatgagctaccactacagactggacggcggcagcctggccatcaacagcccccacaccgaccaggacatcggcatgtaccagtgcctggccaccaacctgctgggcaccatcctgagcagaaaggccaagctgcagttcgcctacatcgaggacttcgagaccaagaccagaagcaccgtgagcgtgagagagggccagggcgtggtgctgctgtgcggcccccccccccacttcggcgacctgagctacgcctggaccttcaacgacaaccccctgtacgtgcaggaggacaacagaagattcgtgagccaggagaccggcaacctgtacatcgccaaggtggagcccagcgacgtgggcaactacacctgcttcatcaccaacaaggaggcccagagaagcgtgcagggcccccccacccccctggtgcagagaaccgacggcgtgatgggcgagtacgagcccaagatcgaggtgagattccccgagaccatccaggccgccaaggacagcagcgtgaagctggagtgcttcgccctgggcaaccccgtgcccgacatcagctggagaagactggacggcagccccctgcccggcaaggtgaagtacagcaagagccaggccatcctggagatccccaacttccagcaggaggacgagggcttctacgagtgcatcgccagcaacctgagaggcagaaacctggccaagggccagctgatcttctacgccccccccgagtgggagcagaagatccagaacacccacctgagcatctacgacaacctgctgtgggagtgcaaggccagcggcaagcccaacccctggtacacctggctgaagaacggcgagagactgaaccccgaggagagaatccagatcgagaacggcaccctgatcatcaccatgctgaacgtgagcgacagcggcgtgtaccagtgcgccgccgagaacaagtaccagatcatctacgccaacgccgagctgagagtgctggccagcgcccccgacttcagcaagagccccgtgaagaagaagagcttcgtgcaggtgggcggcgacatcgtgatcggctgcaagcccaacgccttccccagagccgccatcagctggaagagaggcaccgagaccctgagacagagcaagagaatcttcctgctggaggacggcagcctgaagatctacaacatcaccagaagcgacgccggcagctacacctgcatcgccaccaaccagttcggcaccgccaagaacaccggcagcctgatcgtgaaggagagaaccgtgatcaccgtgccccccagcaagatggacgtgaccgtgggcgagagcatcgtgctgccctgccaggtgagccacgaccccagcatcgaggtggtgttcgtgtggttcttcaacggcgacgtgatcgacctgaagaagggcgtggcccacttcgagagaatcggcggcgagagcgtgggcgacctgatgatcagaaacatccagctgcaccacagcggcaagtacctgtgcaccgtgcagaccaccctggagagcctgagcgccgtggccgacatcatcgtgagaggcccccccggcccccccgaggacgtgcaggtggaggacatcagcagcaccaccagccagctgagctggagagccggccccgacaacaacagccccatccagatcttcaccatccagaccagaacccccttcagcgtgggctggcaggccgtggccaccgtgcccgagatcctgaacggcaagacctacaacgccaccgtggtgggcctgagcccctgggtggagtacgagttcagagtggtggccggcaacagcatcggcatcggcgagcccagcgagcccagcgagctgctgagaaccaaggccagcgtgcccgtggtggcccccgtgaacatccacggcggcggcggcagcagaagcgagctggtgatcacctgggagagcatccccgaggagctgcagaacggcgagggcttcggctacatcatcatgttcagacccgtgggcagcaccacctggagcaaggagaaggtgagcagcgtggagagcagcagattcgtgtacagaaacgagagcatcatccccctgagccccttcgaggtgaaggtgggcgtgtacaacaacgagggcgagggcagcctgagcaccgtgaccatcgtgtacagcggcgaggacgagccccagctggcccccagaggcaccagcctgcagagcttcagcgccagcgagatggaggtgagctggaacgccatcgcctggaacagaaacaccggcagagtgctgggctacgaggtgctgtactggaccgacgacagcaaggagagcatgatcggcaagatcagagtgagcggcaacgtgaccaccaagaacatcaccggcctgaaggccaacaccatctacttcgccagcgtgagagcctacaacaccgccggcaccggccccagcagcccccccgtgaacgtgaccaccaagaagagcccccccagccagccccccgccaacatcgcctggaagctgaccaacagcaagctgtgcctgaactgggagcacgtgaagaccatggagaacgagagcgaggtgctgggctacaagatcctgtacagacagaacagacagagcaagacccacatcctggagaccaacaacaccagcgccgagctgctggtgcccttcgaggaggactacctgatcgagatcagaaccgtgagcgacggcggcgacggcagcagcagcgaggagatcagaatccccaagatgagcagcctgagcagcagaggcatccagttcctggagcccagcacccacttcctgagcatcgtgatcgtgatcttccactgcttcgccatccagcccctgatctag

SEQ ID NO: 180229 - DNA, 2871 bp, Artificial Sequence
  derived and/or modified sequence
atgagctaccactacagactggacggcggcagcctggccatcaacagcccccacaccgaccaggacatcggcatgtaccagtgcctggccaccaacctgctgggcaccatcctgagcagaaaggccaagctgcagttcgcctacatcgaggacttcgagaccaagaccagaagcaccgtgagcgtgagagagggccagggcgtggtgctgctgtgcggcccccccccccacttcggcgacctgagctacgcctggaccttcaacgacaaccccctgtacgtgcaggaggacaacagaagattcgtgagccaggagaccggcaacctgtacatcgccaaggtggagcccagcgacgtgggcaactacacctgcttcatcaccaacaaggaggcccagagaagcgtgcagggcccccccacccccctggtgcagagaaccgacggcgtgatgggcgagtacgagcccaagatcgaggtgagattccccgagaccatccaggccgccaaggacagcagcgtgaagctggagtgcttcgccctgggcaaccccgtgcccgacatcagctggagaagactggacggcagccccctgcccggcaaggtgaagtacagcaagagccaggccatcctggagatccccaacttccagcaggaggacgagggcttctacgagtgcatcgccagcaacctgagaggcagaaacctggccaagggccagctgatcttctacgccccccccgagtgggagcagaagatccagaacacccacctgagcatctacgacaacctgctgtgggagtgcaaggccagcggcaagcccaacccctggtacacctggctgaagaacggcgagagactgaaccccgaggagagaatccagatcgagaacggcaccctgatcatcaccatgctgaacgtgagcgacagcggcgtgtaccagtgcgccgccgagaacaagtaccagatcatctacgccaacgccgagctgagagtgctggccagcgcccccgacttcagcaagagccccgtgaagaagaagagcttcgtgcaggtgggcggcgacatcgtgatcggctgcaagcccaacgccttccccagagccgccatcagctggaagagaggcaccgagaccctgagacagagcaagagaatcttcctgctggaggacggcagcctgaagatctacaacatcaccagaagcgacgccggcagctacacctgcatcgccaccaaccagttcggcaccgccaagaacaccggcagcctgatcgtgaaggagagaaccgtgatcaccgtgccccccagcaagatggacgtgaccgtgggcgagagcatcgtgctgccctgccaggtgagccacgaccccagcatcgaggtggtgttcgtgtggttcttcaacggcgacgtgatcgacctgaagaagggcgtggcccacttcgagagaatcggcggcgagagcgtgggcgacctgatgatcagaaacatccagctgcaccacagcggcaagtacctgtgcaccgtgcagaccaccctggagagcctgagcgccgtggccgacatcatcgtgagaggcccccccggcccccccgaggacgtgcaggtggaggacatcagcagcaccaccagccagctgagctggagagccggccccgacaacaacagccccatccagatcttcaccatccagaccagaacccccttcagcgtgggctggcaggccgtggccaccgtgcccgagatcctgaacggcaagacctacaacgccaccgtggtgggcctgagcccctgggtggagtacgagttcagagtggtggccggcaacagcatcggcatcggcgagcccagcgagcccagcgagctgctgagaaccaaggccagcgtgcccgtggtggcccccgtgaacatccacggcggcggcggcagcagaagcgagctggtgatcacctgggagagcatccccgaggagctgcagaacggcgagggcttcggctacatcatcatgttcagacccgtgggcagcaccacctggagcaaggagaaggtgagcagcgtggagagcagcagattcgtgtacagaaacgagagcatcatccccctgagccccttcgaggtgaaggtgggcgtgtacaacaacgagggcgagggcagcctgagcaccgtgaccatcgtgtacagcggcgaggacgagccccagctggcccccagaggcaccagcctgcagagcttcagcgccagcgagatggaggtgagctggaacgccatcgcctggaacagaaacaccggcagagtgctgggctacgaggtgctgtactggaccgacgacagcaaggagagcatgatcggcaagatcagagtgagcggcaacgtgaccaccaagaacatcaccggcctgaaggccaacaccatctacttcgccagcgtgagagcctacaacaccgccggcaccggccccagcagcccccccgtgaacgtgaccaccaagaagagcccccccagccagccccccgccaacatcgcctggaagctgaccaacagcaagctgtgcctgaactgggagcacgtgaagaccatggagaacgagagcgaggtgctgggctacaagatcctgtacagacagaacagacagagcaagacccacatcctggagaccaacaacaccagcgccgagctgctggtgcccttcgaggaggactacctgatcgagatcagaaccgtgagcgacggcggcgacggcagcagcagcgaggagatcagaatccccaagatgagcagcctgagcagcagaggcatccagttcctggagcccagcacccacttcctgagcatcgtgatcgtgatcttccactgcttcgccatccagcccctgatctag

SEQ ID NO: 180230 - protein, 133 aa, Artificial Sequence
  derived and/or modified sequence
MNYMPGTASLIEDIDKKHLVLLRDGRTLIGFLRSIDQFANLVLHQTVERIHVGKKYGDIPRGIFVVRGENVVLLGEIDLEKESDTPLQQVSIEEILEEQRVEQQTKLEAEKLKVQALKDRGLSIPRADTLDEY

SEQ ID NO: 180231 - DNA, 402 bp, Artificial Sequence
  derived and/or modified sequence
atgaattacatgccagggactgcctctctcattgaggacattgacaaaaagcatttagtactcctgcgcgacgggaggacgctgattggcttccttaggtcaattgaccaatttgcgaacctcgttttgcaccagactgtggaacgcattcatgtcggcaagaagtacggcgatatccctagaggcattttcgtggtgaggggcgagaacgttgtcttgctaggagagatcgacctcgagaaggagtctgacacacctttgcaacaagtatccatcgaggagatactcgaggagcagagggtggagcagcagaccaagctcgaggcagagaagctaaaagttcaggctctcaaggatcgtggcctgtccattccgagagctgatacgctagacgaatattag

SEQ ID NO: 180232 - DNA, 402 bp, Artificial Sequence
  derived and/or modified sequence
atgaactacatgcctggaacagccagcctgattgaggacatcgacaagaagcacctggtgctgctgagagatggccgcaccctgattggcttcctgcggagcattgaccagtttgccaacctggtgctgcaccagacagtggagcgcatccacgtgggcaagaagtacggggacatcccccggggcatctttgtggtgagaggagaaaatgtggtgctgctgggggagattgacctggagaaggagagtgacacccccctgcagcaggtgtccattgaggagatcctggaggagcagagggtggagcagcagaccaagctggaggccgagaagctgaaggtgcaggccctgaaggaccggggcctgagcatccccagggctgacaccctggatgagtactag

SEQ ID NO: 180233 - DNA, 1147 bp, Artificial Sequence
  derived and/or modified sequence
ccgaaagctgagggacggaggtcagtgactctggggtctcgggaacccggagacgaaggaagacaccgtgttccttaagagggagtatacgtttcctcgccatttatccaatggagtttcctcttacctacttaacaggaacagggaaagggtgtcccccaacggtacggctgccccgcctcttcctgggggcccacacgtgttacaggaagtgggtaagggtaatatggaggagcttccggcagcccccggcggctgaaagccggggcagaagtgctggtctcggtcgggattccgggcttggtcccaccgaggcggcgactgcggtaggagggaagaggttttggacgcgctggcctcccgccgctgtgcattgcagcattatttcagttcaaaatgaactatatgcctggcaccgccagcctcatcgaggacattgacaaaaagcacttggttctgcttcgagatggaaggacacttataggctttttaagaagcattgatcaatttgcaaacttagtgctacatcagactgtggagcgtattcatgtgggcaaaaaatacggtgatattcctcgagggatttttgtggtcagaggagaaaatgtggtcctactaggagaaatagacttggaaaaggagagtgacacacccctccagcaagtatccattgaagaaattctagaagaacaaagggtggaacagcagaccaagctggaagcagagaagttgaaagtgcaggccctgaaggaccgaggtctttccattcctcgagcagatactcttgatgagtactaatcttttgcccagaggctgttggctcttgaagagtaggggctgtcactgagtgaaagtgacatcctggccacctcacgcatttgatcacagactgtagagttttgaaaagtcacttttatttttaattattttacatatgcaacatgaagaaatcgtgtaggtgggttttttttttaataacaaaatcactgtttaaagaaacagtggcatagactccttcacacatcactgtggcaccagcaactacttctttatattgttcttcatatcccaaattagagtttacagggacagtcttcatttacttgtaaataaaatatgaatctcaaaagtgtcatgttatttccaa

SEQ ID NO: 180234 - DNA, 402 bp, Artificial Sequence
  derived and/or modified sequence
atgaactacatgcccggcaccgccagcctgatcgaggacatcgacaagaaacatctcgtccttctaagagatggtcgaacactgataggattcctgagatcgatcgatcaattcgccaacctggtgctccaccagacagttgaacgaatccacgttggcaaaaaatacggagatattccaagggggatattcgttgtgaggggcgagaacgtagttctgctgggggaaatcgacctcgaaaaagaaagcgacactcccttgcaacaggtgtcaatcgaggagatccttgaggaacagagggtggaacaacagactaagctcgaagccgaaaagctcaaagtgcaggcgctgaaggaccgcggtttatccatcccccgggccgatactttggatgaatattag

SEQ ID NO: 180235 - DNA, 402 bp, Artificial Sequence
  derived and/or modified sequence
atgaattacatgcccggaacagcatcattgatagaagacatcgataaaaagcacctggtgcttctgcgtgatgggagaactcttatcggctttctgcggtctatcgatcagtttgctaacttggtgcttcatcaaacagtagagcgaatccacgtcgggaagaaatatggtgacatacctaggggcatcttcgtcgtgaggggagagaatgtggtgttgctcggagaaattgacctcgagaaggagtccgatacccccctgcagcaggtgagcatcgaagagatcctggaggaacaaagggtggaacagcaaactaaacttgaagctgagaaactaaaagtacaggctctgaaggatcggggactaagcataccgagggctgatacgctggatgagtattag

SEQ ID NO: 180236 - DNA, 402 bp, Artificial Sequence
  derived and/or modified sequence
atgaactacatgcccggcaccgccagcctgatcgaggacatcgacaagaagcacctggtgctgctgagagacggcagaaccctgatcggcttcctgagaagcatcgaccagttcgccaacctggtgctgcaccagaccgtggagagaatccacgtgggcaagaagtacggcgacatccccagaggcatcttcgtggtgagaggcgagaacgtggtgctgctgggcgagatcgacctggagaaggagagcgacacccccctgcagcaggtgagcatcgaggagatcctggaggagcagagagtggagcagcagaccaagctggaggccgagaagctgaaggtgcaggccctgaaggacagaggcctgagcatccccagagccgacaccctggacgagtactag

SEQ ID NO: 180237 - protein, 102 aa, Artificial Sequence
  derived and/or modified sequence
MADDVDQQQTTNTVEEPLDLIRLSLDERIYVKMRNDRELRGRLHAYDQHLNMILGDVEETVTTIEIDEETYEEIYKSTKRNIPMLFVRGDGVVLVAPPLRVG

SEQ ID NO: 180238 - DNA, 309 bp, Artificial Sequence
  derived and/or modified sequence
atggcagacgatgttgaccagcagcagaccactaacactgtggaggaacccctggacctcatccggctgtctttagacgagcggatttatgtgaaaatgcgaaacgaccgcgaactcaggggcaggctccacgcctatgatcagcatcttaacatgattctgggggatgtggaagagacggtcacaactatagaaatcgatgaggaaacatatgaagaaatctacaaatcaaccaagcgaaacatccccatgctcttcgtgagaggtgacggggtcgttctggtggccccgccgttgcgcgtaggatag

SEQ ID NO: 180239 - DNA, 309 bp, Artificial Sequence
  derived and/or modified sequence
atggctgatgatgtggaccagcagcagaccaccaacacagtggaggagcccctggacctgatccggctgagcctggatgagcgcatctacgtgaagatgagaaatgaccgggagctgcggggccgcctgcacgcctatgaccagcacctgaacatgatcctgggagatgtggaggagaccgtgaccaccatcgagattgatgaggagacctatgaggagatctacaagagcaccaagaggaacatccccatgctgtttgtgagaggagatggagtggtgctggtggccccacccctgcgggtgggctag

SEQ ID NO: 180240 - DNA, 3815 bp, Artificial Sequence
  derived and/or modified sequence
gcgcagcaacctccaccaggcctccgcgtctggactcccgccctgcctctgggcctcctccgcccaccggcggcgtctcccgcgaagcccgctgggcctcgctctcaccctcctcctcctcctcacgccgggccttgctcttggccttggatttctggctgcgcagttcgcgtccccgcggctccccgccggccgcgcgtttccgagccatgttgcttgtctgggcaaattccacttcgcgagtgacgcacccggccgcgatgcgctagaacgccggccccgccccgaggcggtgcgcttggccacgccccttcgttggaggcctagtcacgcccctaaaggaagctccaccccatacccgtggccactaaaaaactgcgggaagcaggaaagagcacaacaggtttctctctatttccggtgtattgtatcctcacgtttccggagattgacgttgctcttgtgttctcgcgagaggcgggaaagggcgcagggtttgaaacatggcggacgacgtagaccagcaacaaactaccaacactgtagaggagcccctggatcttatcaggctcagcctagatgagcgaatttatgtgaaaatgagaaatgaccgagagcttcgaggcagattacatgcttatgatcaacatttaaatatgatcttgggagatgtggaagaaactgtgactactatagaaattgatgaagaaacatatgaagagatatataaatcaacgaaacggaatattccaatgctctttgtccggggagatggcgttgtcctggttgcccctccactgagagttggctgaaacaaagaatttgtcctgtatggaaaacgggagactttgtacagtggcctctctaaaagtacaaaacattcataagagaaacctgcatacattttgatattaagaaataattccggggattcttccactcctgaaatgagttgatttgcagataactcacaacttcttaagctaaatggtattttcatttttctcaagctctccaataaatatgaccaccaagatgcagaactctttcaggacttcttttgctccattattctcacagatacttactgatttttcttttctttaaattggtgtttccttgtagatttttttaagtgcggtcttctgtcttgtgaattatttaaagtaagcatgtcttaccttcacttagcacacatttgcagtgcacctactgtgtttgaggcaccaggtttgagtgctgggaaccagagttttatcaaaatgctttctgggccagacatggtggctcatgcctgtaatcccagcactttgggaggccaaggtgggtggatcacctgaggtcaggcgtttgagaccagcctggccaacatggtgaaaccctttctctactgaaaatataaaaattagccaggcgtggtggcgcatacttgtaatcccagctactcaggaggctgaggcagtagacgcttgaacccaggaggcagaggttgcagtgagccaagatcacaccattgcacttcaacctggtcaacagagcgagactccgtgtcaaaaaaaaaaaaaaaaaagttttctgccctcaagtcttctggggaggcagatgtttaaaccaacaattgcaggcagtaagattagtgctgatagaatcatgcacatgcaggatgccataggagcatggggaagagcacccaaatatgggagaaaggggcagagggacattgtaaacatcaaccctgcagtagaagacagagcaaagcatgatttctcttttctctggcctgatttaattctaaggtcagacgttcagcttgatcataacctgtttataattatgactcagaccatttttccactcttggatcattggccattaatgatgaggggtctcaaacaacatgtctcagtgacacagtaaagcagaaattggctgaaagcaaagctgtttttatttctagcttcagtcagcacataatgcttaaaacctaaagaggaaagtaaaagcgtgttacaatctctcaaactttatcaagacagggcttagaacctgacatcctccgctatggtcattccattttgaaatgtagaaaatccaacttgtggatggtttgtctgtaaatgagctgaatgtgtgtgcgtgttcattatcaagcacgatatgctcacaaatgcacagtactttaagccttgtgcaagaaagatgctttcagtaaacatatttaaaaggttttattttccttactaatggtacatgcccctgcaagttcatggagaagagaaaaacaagtgtgggtgagctgatggaggcttcatcttaggtgaggaggcaggagagacaccctcccttcacttgtgccatccccacgctttgtccttaagctgtagtggtcccaggagataacctgtttacagcagcccattcagtattgaaaaatgaactccctcctgcagaatgttagaagaaacaacctcaaagacctcaggccgcctgtggtcattagtatgtggcagcaagattgaacctgcctgcctcctacctgtgtgagcctgtggtgtgggtgtggtaccaaggccctggctctgggcagtctgttggctcctggtgttcactaaggcgtggggtgacaggccatctggcctcgctctgccagtctgcagttctccccagcactgcattcatttttagtggtttctgatagtcacactgaattcctggacactttcttctcttcattcttagttatctttctcctttttctcctggaactgatagtttacactaaaacttttggctgtgaggacttgattatacacatttctaaaacccatgaaccttaatatctgacactgttactctcatatgcacacacaactaaaacataccaacctacttcatttcctagctgctaagatacaaggggagggacaataaaaggttaactgcagaatagccacctatgtgtcaggaaatggagggaggggaggcaatgtgtgagtccttttggagctgggactcaatccacaacagagacagctcaagcagggccctgccatggtccacactgaggtttcctctgcagtggtgctgtccactgaggggttatggtgtgagggcccctgggagccacgccttggacttctgagtctgcagagcactcggctccagccagctggatggcaggtggtcagtggagctggtgactggtggtttctgcaatgaggtgtcagattagcctaagggaagcctcttcagcaagtatcatgcctggatcccggtcttggttgttttatgagaggccgatatgaattgccattgcctcccacaaagaaaaatggacaaaatatgggaccacatctttgagatgaaatgtgcccaaaatgaaaagtaacttgagtatcccaagttaaacttaatcattagctgcaaatggacgattttcaaatttcaaatagtgatttttgaagatttgcccaaactagagtactatccctcttcacactaagaggcagaaagtggtttcacacacccttttatttaatcagctaaagtgggtgcggtgacacacacctgtaaactcaaccactaaggagactgaggcgggaggattacttgagcccaggagttcgagatcagcctgagcaacataacaagaccctgtctcaaataatacttagctattacccatattgcttttagcctgctgccaggaggggagaaatgttattgtttgaacagatgtcagatgtgagtaatgctcagctgtgttcaatgtagaaaattaataaaagttccaggagtcatcctggctagatcaa

SEQ ID NO: 180241 - DNA, 309 bp, Artificial Sequence
  derived and/or modified sequence
atggccgacgacgtggaccagcagcagaccaccaacaccgtggaggagccactcgatctaatccggctttccctcgacgagaggatttacgttaagatgaggaacgaccgggagctgcgcggacgtcttcacgcttatgatcagcacctgaatatgatattgggcgatgtagaagagactgtgacgactattgaaattgacgaggaaacatacgaagaaatttacaagagcaccaagcgaaatattcccatgctcttcgttaggggcgacggcgttgtcctggtcgcaccaccattgagggtggggtag

SEQ ID NO: 180242 - DNA, 309 bp, Artificial Sequence
  derived and/or modified sequence
atggcagacgatgtagatcaacagcagaccaccaacactgtagaggagcccctggacttgatcagattgagcctcgacgaaaggatctacgtgaagatgagaaacgacagagagctccgcggacgcctccatgcctacgaccagcaccttaacatgatcctgggagatgtggaggagaccgtaacaacaattgagattgatgaagaaacttacgaggaaatttataagtccaccaagcgtaatatcccaatgttgttcgtgcggggtgacggcgtagtccttgtagccccaccattgcgggtgggctag

SEQ ID NO: 180243 - DNA, 309 bp, Artificial Sequence
  derived and/or modified sequence
atggccgacgacgtggaccagcagcagaccaccaacaccgtggaggagcccctggacctgatcagactgagcctggacgagagaatctacgtgaagatgagaaacgacagagagctgagaggcagactgcacgcctacgaccagcacctgaacatgatcctgggcgacgtggaggagaccgtgaccaccatcgagatcgacgaggagacctacgaggagatctacaagagcaccaagagaaacatccccatgctgttcgtgagaggcgacggcgtggtgctggtggccccccccctgagagtgggctag

SEQ ID NO: 180244 - protein, 476 aa, Artificial Sequence
  derived and/or modified sequence
MWTGYKILIFSYLTTEIWMEKQYLSQREVDLEAYFTRNHTVLQGTRFKRAIFQGQYCRNFGCCEDRDDGCVTEFYAANALCYCDKFCDRENSDCCPDYKSFCREEKEWPPHTQPWYPEGCFKDGQHYEEGSVIKENCNSCTCSGQQWKCSQHVCLVRSELIEQVNKGDYGWTAQNYSQFWGMTLEDGFKFRLGTLPPSPMLLSMNEMTASLPATTDLPEFFVASYKWPGWTHGPLDQKNCAASWAFSTASVAADRIAIQSKGRYTANLSPQNLISCCAKNRHGCNSGSIDRAWWYLRKRGLVSHACYPLFKDQNATNNGCAMASRSDGRGKRHATKPCPNNVEKSNRIYQCSPPYRVSSNETEIMKEIMQNGPVQAIMQVREDFFHYKTGIYRHVTSTNKESEKYRKLQTHAVKLTGWGTLRGAQGQKEKFWIAANSWGKSWGENGYFRILRGVNESDIEKLIIAAWGQLTSSDEP

SEQ ID NO: 180245 - protein, 203 aa, Artificial Sequence
  derived and/or modified sequence
MEKQYLSQREVDLEAYFTRNHTVLQGTRFKRAIFQGQYCRNFGCCEDRDDGCVTEFYAANALCYCDKFCDRENSDCCPDYKSFCREEKEWPPHTQPWYPEGCFKDGQHYEEGSVIKENCNSCTCSGQQWKCSQHVCLVRSELIEQVNKGDYGWTAQNYSQFWGMTLEDGFKFRLGTLPPSPMLLSMNEMTVSVPSDSRMCMYL

SEQ ID NO: 180246 - DNA, 1431 bp, Artificial Sequence
  derived and/or modified sequence
atgtggaccggctacaagatcctgatcttcagctacctgaccaccgagatctggatggagaagcagtacctgagccagagagaggtggacctggaggcctacttcaccagaaaccacaccgtgctgcagggcaccagattcaagagagccatcttccagggccagtactgcagaaacttcggctgctgcgaggacagagacgacggctgcgtgaccgagttctacgccgccaacgccctgtgctactgcgacaagttctgcgacagagagaacagcgactgctgccccgactacaagagcttctgcagagaggagaaggagtggcccccccacacccagccctggtaccccgagggctgcttcaaggacggccagcactacgaggagggcagcgtgatcaaggagaactgcaacagctgcacctgcagcggccagcagtggaagtgcagccagcacgtgtgcctggtgagaagcgagctgatcgagcaggtgaacaagggcgactacggctggaccgcccagaactacagccagttctggggcatgaccctggaggacggcttcaagttcagactgggcaccctgccccccagccccatgctgctgagcatgaacgagatgaccgccagcctgcccgccaccaccgacctgcccgagttcttcgtggccagctacaagtggcccggctggacccacggccccctggaccagaagaactgcgccgccagctgggccttcagcaccgccagcgtggccgccgacagaatcgccatccagagcaagggcagatacaccgccaacctgagcccccagaacctgatcagctgctgcgccaagaacagacacggctgcaacagcggcagcatcgacagagcctggtggtacctgagaaagagaggcctggtgagccacgcctgctaccccctgttcaaggaccagaacgccaccaacaacggctgcgccatggccagcagaagcgacggcagaggcaagagacacgccaccaagccctgccccaacaacgtggagaagagcaacagaatctaccagtgcagccccccctacagagtgagcagcaacgagaccgagatcatgaaggagatcatgcagaacggccccgtgcaggccatcatgcaggtgagagaggacttcttccactacaagaccggcatctacagacacgtgaccagcaccaacaaggagagcgagaagtacagaaagctgcagacccacgccgtgaagctgaccggctggggcaccctgagaggcgcccagggccagaaggagaagttctggatcgccgccaacagctggggcaagagctggggcgagaacggctacttcagaatcctgagaggcgtgaacgagagcgacatcgagaagctgatcatcgccgcctggggccagctgaccagcagcgacgagccctag

SEQ ID NO: 180247 - DNA, 1431 bp, Artificial Sequence
  derived and/or modified sequence
atgtggaccggatacaagattctgatcttcagctatcttaccaccgagatatggatggagaagcagtacctctcacagagggaagtggacctggaagcatattttacccgcaaccacactgtgcttcagggaacccgatttaagagagctatttttcagggacaatattgccgtaattttgggtgttgcgaagaccgcgatgacgggtgcgtaacagaattctacgccgctaatgccctgtgctactgcgataagttctgcgacagagaaaattctgactgctgccccgattataagtctttctgtagggaagaaaaagaatggccaccgcacacgcagccctggtatcccgagggttgcttcaaagatggccagcattacgaggagggttccgtgattaaggaaaactgcaatagctgcacatgctccggacaacaatggaaatgtagccaacatgtctgtctggtgcggtccgagcttatcgagcaggtgaataaaggcgactatggatggaccgcacagaactatagtcaattttggggaatgactctcgaggacgggttcaaattccgactgggcactttgcccccaagccctatgttattgagtatgaacgagatgacagccagcttaccagctacaacagacctaccagaattcttcgtcgccagttacaaatggccaggatggacgcatggacctttagatcagaagaattgcgctgcctcgtgggcgttttctactgccagcgtcgctgcggatcggattgcaatccaatccaagggcagatacactgccaatctgtctccccagaatctgatctcgtgctgtgctaagaataggcatgggtgcaacagcggctccatcgacagggcctggtggtatctgaggaagaggggtctagtatcccatgcttgttaccccttgttcaaggaccaaaatgccacaaacaacggctgtgccatggcctcacgcagcgatggtaggggaaagcgccacgccaccaagccctgccctaacaatgttgaaaagagcaaccggatataccagtgtagcccaccctatcgcgtaagcagcaacgaaactgaaattatgaaagaaatcatgcagaatggaccggttcaggccatcatgcaggtgcgagaggacttctttcactataagactggtatctaccgccacgtgacctccacaaacaaggagtccgagaaatatcgaaagctccagactcacgctgtgaagctgacagggtgggggacattgagaggtgctcaaggtcagaaagagaaattttggatcgctgctaactcatgggggaagtcatggggggagaatgggtactttagaatcctgcgaggcgtaaatgaaagcgatattgagaagcttatcatagcagcatggggacagctgacatcatctgacgaaccctag

SEQ ID NO: 180248 - DNA, 1431 bp, Artificial Sequence
  derived and/or modified sequence
atgtggacaggctacaagatcctgatcttctcctacctgaccacagagatctggatggagaagcagtacctgagccagcgggaggtggacctggaggcctacttcaccaggaaccacacagtgctgcagggcacccgcttcaagagggccatcttccagggccagtactgcaggaactttggctgctgtgaggacagagatgatggctgtgtgacagagttctacgccgccaatgccctgtgctactgtgacaagttctgtgaccgggagaacagcgactgctgcccagactacaagagcttctgccgggaggagaaggagtggccaccccacacccagccctggtacccagagggctgcttcaaggatggccagcactatgaggagggcagcgtcatcaaggagaactgcaacagctgcacctgcagcggccagcagtggaagtgcagccagcacgtgtgcctggtgcgctctgagctgattgagcaggtgaacaagggggactatggctggacagcccagaactacagccagttctggggcatgaccctggaggatggcttcaagttccggctgggcaccctgccccccagccccatgctgctgtccatgaatgagatgacagccagcctgcctgccaccacagacctgcctgagttctttgtggccagctacaagtggccaggctggacccacggccccctggaccagaagaactgtgccgcctcctgggccttcagcacagcctctgtggccgctgaccgcatcgccatccagagcaagggccgctacacagccaacctgagcccccagaacctgatcagctgctgtgccaagaacagacatggctgcaacagcggcagcattgaccgggcctggtggtacctgaggaagaggggcctggtgagccacgcctgctaccccctcttcaaggaccagaatgccaccaacaacggctgtgccatggccagcagaagtgatggccggggcaagagacatgccaccaagccctgccccaacaacgtggagaagagcaaccgcatctaccagtgcagccccccctacagagtgagcagcaatgaaacagagatcatgaaggagatcatgcagaatggacctgtgcaggccatcatgcaggtgcgggaggacttcttccactacaagacaggcatctaccgccacgtgaccagcaccaacaaggagagcgagaagtacaggaagctgcagacccatgctgtgaagctgaccggctggggcaccctgcggggggcccagggccagaaggagaagttctggattgctgccaacagctggggcaagtcctggggagaaaatggctacttccgcatcctgcggggcgtgaatgaaagtgacatcgagaagctgatcatcgccgcctggggccagctgaccagcagtgatgagccctag

SEQ ID NO: 180249 - DNA, 1431 bp, Artificial Sequence
  derived and/or modified sequence
atgtggaccggctacaagatcctgatcttcagctacctgaccaccgaaatctggatggagaaacagtacttaagccagcgcgaagtagacctggaagcctattttacccggaatcacacagtccttcagggtactcggttcaagcgggcaatcttccagggacagtattgtagaaatttcggttgctgtgaggatcgcgatgatggctgcgttaccgaattctacgctgcgaacgccctgtgttactgcgacaagttttgcgaccgcgaaaacagcgactgctgccccgactataaatccttctgtagggaggaaaaggaatggcctccccacacccaaccctggtaccccgaaggttgtttcaaggatggtcagcattatgaggagggctctgtcattaaagaaaactgcaactcttgtacatgctcaggccaacagtggaaatgttcacagcacgtttgcttggtgcgcagtgagctgatcgagcaggtgaacaaaggcgactacggttggacagcccaaaactactctcagttttggggaatgacactagaggacggttttaaatttcggcttggaacactgccccccagccccatgctcctgagcatgaacgaaatgacagcctccttgcctgctacaacggatcttccagaattcttcgttgcgtcatacaaatggccagggtggacccacgggccacttgatcagaagaactgtgccgccagctgggccttcagcaccgccagtgtggccgcggataggatcgcaatacagtcaaagggccggtatacagctaacctcagccctcagaacctgataagttgctgcgctaaaaatcggcatggctgtaatagtggttctatagacagagcttggtggtacctgcgaaaacgcgggctggtgagtcatgcctgttacccattatttaaggaccaaaatgctacaaacaatggttgcgcaatggctagccgctcggacggtcgaggtaagcgccatgcaactaaaccttgtcccaacaatgttgagaagtcaaatcgcatttatcagtgcagtcccccgtacagagtgtcctcaaatgagactgagattatgaaggaaatcatgcagaatggtcctgtgcaggcgatcatgcaggttagggaagacttttttcattacaaaacagggatttaccgccatgtcaccagcactaataaggagtctgaaaagtaccgtaaactccaaacgcatgcagtaaagttaacggggtggggcaccctcagaggcgcacaagggcagaaagagaaattctggattgcagcaaactcctggggtaaaagttggggggaaaatgggtactttcgcattctccgcggggtgaatgagtctgatattgagaagctcatcatcgccgcttggggccagctaacctcatctgatgaaccatag

SEQ ID NO: 180250 - DNA, 1431 bp, Artificial Sequence
  derived and/or modified sequence
atgtggaccgggtacaagatcctcatcttctcttacctgaccacagaaatttggatggaaaaacaatatttatcccaaagggaggtcgacttggaagcttatttcaccagaaatcacaccgtgttacagggcacacgctttaagagagctatcttccaaggccagtactgtaggaatttcggatgctgcgaggatcgggacgatggctgcgtgacagagttctacgcagcaaacgccctgtgctactgcgacaagttttgtgatagagaaaactccgattgttgtcctgactacaaatcattttgtcgcgaagaaaaggagtggcctccccacacccagccctggtaccccgagggatgctttaaagatgggcagcattacgaagagggatctgtgataaaggagaactgtaactcctgcacctgttccggccaacagtggaaatgcagccagcacgtgtgcctggtacgttctgagctcatcgaacaggtgaacaagggcgactacggctggaccgcccagaactactcacaattctgggggatgacactagaagacggatttaagtttaggctgggcactctgcctccatcccctatgctgctttccatgaacgagatgacagctagtctgcccgcaacaacagatttaccagagttttttgtggctagttacaaatggcccggatggacccatggaccactggatcagaagaactgcgctgccagttgggcctttagcacagcctcagtagctgctgaccggatcgcaatacagtccaagggccgatataccgccaacctgagccctcagaacctgatctcatgctgtgccaagaatcgccatggatgcaattctggctcaatagatcgtgcctggtggtacctgagaaaacggggtctcgtgtctcacgcctgctatcctctcttcaaagaccagaacgctacaaataacgggtgcgcgatggcctcccgcagtgacggtcgcggaaaaagacatgctactaagccttgccctaacaacgtcgaaaagtccaacagaatctaccagtgcagcccaccctatcgcgtatcgagcaatgagaccgagatcatgaaagagattatgcagaacggtcccgtgcaagccatcatgcaagtgagagaggacttctttcactacaaaactggtatctatagacacgttaccagcaccaacaaagagtctgagaaatatagaaaactgcagacacatgctgtgaagctgactggttgggggactctgcggggtgcacaaggccaaaaagagaagttctggatcgcagcgaatagctggggaaaaagttggggggagaatgggtacttccgaattctgaggggagtgaatgaatctgatatcgagaagttgatcattgctgcctggggccagctcaccagcagtgacgagccatag

SEQ ID NO: 180251 - DNA, 1754 bp, Artificial Sequence
  derived and/or modified sequence
gtcttaatgactagaattcaggttccaaggagaagcccacaaggctaagggtattggatataacggaaagtggaagctatacctgacttccagagaatgtggaccggatataagatcttaatcttctcttatcttactacagaaatctggatggagaagcagtatttatctcaaagagaagtggacctagaggcttatttcactaggaatcacaccgttttgcaaggtactcgattcaaaagagccattttccaagggcaatactgtagaaattttggctgttgtgaagacagagatgatggctgtgtcactgagttctatgcggcgaatgcgttgtgctactgtgataaattctgtgacagagaaaattctgattgctgtcctgactacaagtccttttgccgtgaagagaaagaatggcctcctcacacacagccttggtatccagaaggttgcttcaaagatggtcaacattatgaagagggatcagtaattaaagaaaactgcaactcctgcacatgctcaggacagcaatggaaatgttcccagcatgtatgccttgttcgttcagaattaattgaacaggtcaataaaggagactatggatggacagcacagaattacagccaattttggggaatgactttagaagatggttttaaatttcgccttggcactttgccacctagtcccatgctcctgagcatgaatgaaatgacagcttctttacctgcaacaactgatcttccagagttttttgttgcttcttataaatggcctggatggactcatggcccattggatcaaaaaaattgtgctgcatcctgggcattttccactgcaagtgtggctgctgaccgaatagcaattcagtctaagggtcgatacacggccaatctatcccctcagaatttgatctcttgctgtgccaagaaccgtcatggatgcaatagtggaagcatcgatagggcttggtggtacctgagaaaacgtggactggtatcccacgcatgctacccacttttcaaagaccaaaatgctaccaacaatggatgtgccatggcaagcaggtctgatgggcgaggaaaacggcatgccacgaagccatgtcccaacaacgtagaaaaatctaacaggatctatcaatgttctcctccatacagagtctcttccaacgaaactgagataatgaaagaaatcatgcaaaatggaccagttcaagccataatgcaagtccgtgaagatttcttccattataagacagggatatacagacatgttaccagcacaaataaagaatcagaaaaatatcgaaagcttcagacacatgcagtcaaactcactggatggggcacactgagaggagcacaagggcagaaagaaaaattttggattgctgccaattcctggggaaagtcatggggagagaatggctatttcaggattcttcgaggagtaaatgagtccgacattgaaaagttgattatcgcagcttggggccaactgacgagttctgatgaaccataacatatcattaaatttccataaggtcatgcctttaagtaaccccctaaattgaagtttagcaatatgacattcttggtgacagtggaatctttgtctcttcaccgtgttaacataatctatctattttcttattttcccctctggtctatgcttctgcttccttcatattactgagcattaacaacaccaataaaggacagcagagtccctaaatgtctttaaagttc

SEQ ID NO: 180252 - DNA, 692 bp, Artificial Sequence
  derived and/or modified sequence
taatcttctcttatcttactacagaaatctggatggagaagcagtatttatctcaaagagaagtggacctagaggcttatttcactaggaatcacaccgttttgcaaggtactcgattcaaaagagccattttccaagggcaatactgtagaaattttggctgttgtgaagacagagatgatggctgtgtcactgagttctatgcggcgaatgcgttgtgctactgtgataaattctgtgacagagaaaattctgattgctgtcctgactacaagtccttttgccgtgaagagaaagaatggcctcctcacacacagccttggtatccagaaggttgcttcaaagatggtcaacattatgaagagggatcagtaattaaagaaaactgcaactcctgcacatgctcaggacagcaatggaaatgttcccagcatgtatgccttgttcgttcagaattaattgaacaggtcaataaaggagactatggatggacagcacagaattacagccaattttggggaatgactttagaagatggttttaaatttcgccttggcactttgccacctagtcccatgctcctgagcatgaatgaaatgacagtaagtgttccttctgattcacgtatgtgcatgtatttgtaaaagtgtgtttgtgtgtgcattaaaagcaattataaatcactaaaataa

SEQ ID NO: 180253 - protein, 296 aa, Artificial Sequence
  derived and/or modified sequence
MLSPKDILRKDLKLVHGYPMTCAFASNWEKIEQFHSRPDDIVIATYPKSGTTWVSEIIDMILNDGDIEKCKRGFITEKVPMLEMTLPGLRTSGIEQLEKNPSPRIVKTHLPTDLLPKSFWENNCKMIYLARNAKDVSVSYYHFDLMNNLQPFPGTWEEYLEKFLTGKVAYGSWFTHVKNWWKKKEEHPILFLYYEDMKENPKEEIKKIIRFLEKNLNDEILDRIIHHTSFEVMKDNPLVNYTHLPTTVMDHSKSPFMRKGTAGDWKNYFTVAQNEKFDAIYETEMSKTALQFRTEI

SEQ ID NO: 180254 - protein, 155 aa, Artificial Sequence
  derived and/or modified sequence
MLSPKDILRKDLKLVHGYPMTCAFASNWEKIEQFHSRPDDIVIATYPKSGTTWVSEIIDMILNDGDIEKCKRGFITEKVPMLEMTLPGLRTSGIEQLEKNPSPRIVKTHLPTDLLPKSFWENNCKMIYLARNAKDVSVSYYHFDLMNNLQPFPGT

SEQ ID NO: 180255 - DNA, 891 bp, Artificial Sequence
  derived and/or modified sequence
atgctgagccccaaggacatcctgagaaaggacctgaagctggtgcacggctaccccatgacctgcgccttcgccagcaactgggagaagatcgagcagttccacagcagacccgacgacatcgtgatcgccacctaccccaagagcggcaccacctgggtgagcgagatcatcgacatgatcctgaacgacggcgacatcgagaagtgcaagagaggcttcatcaccgagaaggtgcccatgctggagatgaccctgcccggcctgagaaccagcggcatcgagcagctggagaagaaccccagccccagaatcgtgaagacccacctgcccaccgacctgctgcccaagagcttctgggagaacaactgcaagatgatctacctggccagaaacgccaaggacgtgagcgtgagctactaccacttcgacctgatgaacaacctgcagcccttccccggcacctgggaggagtacctggagaagttcctgaccggcaaggtggcctacggcagctggttcacccacgtgaagaactggtggaagaagaaggaggagcaccccatcctgttcctgtactacgaggacatgaaggagaaccccaaggaggagatcaagaagatcatcagattcctggagaagaacctgaacgacgagatcctggacagaatcatccaccacaccagcttcgaggtgatgaaggacaaccccctggtgaactacacccacctgcccaccaccgtgatggaccacagcaagagccccttcatgagaaagggcaccgccggcgactggaagaactacttcaccgtggcccagaacgagaagttcgacgccatctacgagaccgagatgagcaagaccgccctgcagttcagaaccgagatctag

SEQ ID NO: 180256 - DNA, 468 bp, Artificial Sequence
  derived and/or modified sequence
atgctgagccccaaggacatcctgagaaaggacctgaagctggtgcacggctaccccatgacctgcgccttcgccagcaactgggagaagatcgagcagttccacagcagacccgacgacatcgtgatcgccacctaccccaagagcggcaccacctgggtgagcgagatcatcgacatgatcctgaacgacggcgacatcgagaagtgcaagagaggcttcatcaccgagaaggtgcccatgctggagatgaccctgcccggcctgagaaccagcggcatcgagcagctggagaagaaccccagccccagaatcgtgaagacccacctgcccaccgacctgctgcccaagagcttctgggagaacaactgcaagatgatctacctggccagaaacgccaaggacgtgagcgtgagctactaccacttcgacctgatgaacaacctgcagcccttccccggcacctag

SEQ ID NO: 180257 - DNA, 891 bp, Artificial Sequence
  derived and/or modified sequence
atgctttccccaaaagacatcctgcggaaggacctgaagctggtccacgggtaccctatgacttgtgcctttgcaagcaattgggaaaagatcgagcaattccacagcaggcctgacgatattgtgatcgccacatatcctaagagcggcaccacctgggtttctgagatcatcgatatgatcctaaacgatggggatatcgaaaagtgcaagcgcggctttatcaccgagaaagtccccatgctcgagatgactttgccggggctcaggaccagtgggattgaacagctcgagaaaaaccccagtccgcgcatagtgaaaacacacctgcccacagatcttttacccaaatccttctgggaaaacaactgtaaaatgatatatttggcacgcaatgcaaaggacgtgtcagtgtcatactatcattttgatctgatgaacaacttgcagccattcccagggacctgggaagaatatttggagaaattcctgacaggcaaggtagcatatggatcttggttcacccatgtaaagaattggtggaaaaagaaggaagaacatcccatcttgtttctgtattacgaagatatgaaggaaaaccccaaagaagaaatcaagaaaatcatccgattccttgagaagaacctgaatgacgagatcctggacagaattatccaccatacatctttcgaagtcatgaaggacaaccctttagtgaattatacccacctgcctaccacagtaatggatcatagtaaatctccttttatgaggaaaggcacagccggcgattggaaaaattacttcacggtggctcagaacgaaaaatttgatgctatatatgaaacagaaatgtctaaaaccgccttgcaattcaggacagaaatttag

SEQ ID NO: 180258 - DNA, 468 bp, Artificial Sequence
  derived and/or modified sequence
atgctctcccccaaggacatcctccggaaagatctgaaacttgtgcatgggtaccccatgacctgtgctttcgcgagcaactgggagaagatcgaacagttccactccagacctgacgatatcgtgattgccacctaccccaaaagtggcacaacctgggtgtcagagattattgacatgatactgaatgatggcgacattgaaaaatgtaaacgcggattcattacagagaaagtgcccatgctggagatgaccctgcccggacttaggacctccgggattgaacagctggagaagaaccctagcccccggatagtcaaaacccacctgccgacagaccttctgccaaagtcattttgggagaataattgcaagatgatctacttagccaggaatgccaaagacgtgagcgtgagttattaccacttcgacctcatgaacaacctgcaacccttccctggcacgtag

SEQ ID NO: 180259 - DNA, 891 bp, Artificial Sequence
  derived and/or modified sequence
atgctgagccccaaggacatcctgaggaaggacctgaagctggtgcacggctaccccatgacctgtgcctttgccagcaactgggagaagattgagcagttccacagcaggccagatgacatcgtgattgccacctaccccaagagcggcaccacctgggtgtctgagatcatcgacatgatcctgaatgatggagacatcgagaagtgcaagaggggcttcatcacagagaaggtgcccatgctggagatgaccctgcccggcctgcggaccagcggcatcgagcagctggagaagaaccccagccccagaattgtgaagacccacctgcccacagacctgctgcccaagagcttctgggagaacaactgcaagatgatctacctggccagaaatgccaaggatgtgtctgtgtcctactaccactttgacctgatgaacaacctgcagcccttccctggcacctgggaggagtacctggagaagttcctgaccgggaaggtggcctacggctcctggttcacccacgtgaagaactggtggaagaagaaggaggagcaccccatcctcttcctgtactatgaggacatgaaggagaaccccaaggaggagatcaagaagatcatccgcttcctggagaagaacctgaatgatgagatcctggaccgcatcatccaccacaccagctttgaggtgatgaaggacaaccccctggtgaactacacccacctgcccaccaccgtgatggaccacagcaagagccccttcatgaggaaaggaacagctggggactggaagaactacttcaccgtggcccagaatgagaagtttgatgccatctatgaaacagagatgagcaagacagccctgcagttcagaacagagatctag

SEQ ID NO: 180260 - DNA, 468 bp, Artificial Sequence
  derived and/or modified sequence
atgctgagccccaaggacatcctgaggaaggacctgaagctggtgcacggctaccccatgacctgtgcctttgccagcaactgggagaagattgagcagttccacagcaggccagatgacatcgtgattgccacctaccccaagagcggcaccacctgggtgtctgagatcatcgacatgatcctgaatgatggagacatcgagaagtgcaagaggggcttcatcacagagaaggtgcccatgctggagatgaccctgcccggcctgcggaccagcggcatcgagcagctggagaagaaccccagccccagaattgtgaagacccacctgcccacagacctgctgcccaagagcttctgggagaacaactgcaagatgatctacctggccagaaatgccaaggatgtgtctgtgtcctactaccactttgacctgatgaacaacctgcagcccttccctggcacctag

SEQ ID NO: 180261 - DNA, 891 bp, Artificial Sequence
  derived and/or modified sequence
atgctgagccccaaggacatcctgcggaaggacctgaagctggtgcatgggtacccgatgacctgtgcctttgctagtaattgggagaagatcgagcaatttcactcacgtcctgacgacattgtgatcgcaacctaccctaagagtgggaccacctgggtgtccgagatcatagatatgattttgaatgacggggacatcgagaagtgcaagagaggattcatcaccgagaaggtccctatgctggaaatgacattaccagggctgcgtacttccggcatcgaacagctcgaaaaaaatccgagcccaagaattgtcaaaacgcatctgcctacagaccttttgccgaaaagtttttgggaaaacaactgtaagatgatttatctggctcgtaatgcaaaggatgtttctgtctcatactaccacttcgatctgatgaacaacctccaacctttccctggcacctgggaggaatatcttgagaagtttttaacaggtaaggtggcctatggcagctggttcacacacgtaaaaaattggtggaagaaaaaggaggagcatccaatcctttttctctactatgaagacatgaaagaaaatcccaaggaggagatcaaaaagataatcagattccttgaaaagaatttgaacgatgagatcctggatcgaatcatccaccacacttcctttgaggttatgaaagataacccactagtcaactatactcacctgcctaccacagtcatggatcacagcaaaagccctttcatgaggaagggcaccgcaggcgactggaagaactactttaccgtggcacaaaatgagaagttcgatgctatttacgagactgagatgtctaagaccgctttgcagttccggacagagatctag

SEQ ID NO: 180262 - DNA, 468 bp, Artificial Sequence
  derived and/or modified sequence
atgctgagccccaaggacatcctgcggaaggacctgaagctggtgcacggatacccaatgacttgtgccttcgcaagtaactgggaaaaaatagagcagtttcacagtaggccagatgacattgtaatcgcaacatatcctaagagcgggactacgtgggtgtctgagattatcgatatgatcctcaacgacggcgatattgaaaaatgcaagcgaggcttcattaccgagaaggtgccaatgttagagatgacgcttcccggcctgaggacatctggcatcgagcagctggagaaaaatccatccccccgcatcgtaaaaacacatctccctaccgacctgctgccaaaatcattctgggaaaacaactgcaaaatgatctacttggcaaggaacgccaaggacgtatctgtgagctactaccacttcgatctaatgaataatctgcagccgttccccggaacatag

SEQ ID NO: 180263 - DNA, 891 bp, Artificial Sequence
  derived and/or modified sequence
atgctttcccccaaagacatattgagaaaggacctgaaacttgttcatggctacccgatgacctgcgcttttgccagtaactgggagaaaattgaacagttccattctcgcccagatgacatcgtaattgctacgtacccaaagagcggaaccacatgggtctcagaaatcattgatatgatacttaatgacggcgacattgagaaatgtaaacgtggctttataactgagaaggtgcccatgctcgaaatgacacttccaggtctcagaacctctggaatcgaacagctggagaagaacccctccccaaggattgtcaaaacccacctacctaccgatctactgccgaaatctttctgggaaaacaactgtaaaatgatttacctggcaaggaacgcgaaagacgttagcgtcagctactaccactttgatcttatgaacaacttgcagccatttcctggcacgtgggaagagtatcttgaaaagtttctgaccggcaaagtcgcctacggaagttggtttactcacgtcaagaactggtggaagaaaaaggaagagcatcctatcctgttcctgtactatgaggatatgaaagaaaaccccaaggaagagattaagaagatcattcgattcttagaaaagaaccttaacgatgaaattcttgataggataattcatcatacgtctttcgaggtgatgaaggataatcccctcgttaattatactcatctccctactaccgtgatggaccacagcaagagtccctttatgcgcaagggcactgcaggggattggaagaactacttcaccgtagcacaaaatgagaaattcgacgcaatttatgaaaccgaaatgtcgaagaccgccctgcagtttcgcacagaaatctag

SEQ ID NO: 180264 - DNA, 468 bp, Artificial Sequence
  derived and/or modified sequence
atgctcagtccgaaggacatactgcggaaagacttgaaactggtgcatggatatcctatgacgtgtgccttcgcgtctaactgggaaaagatcgaacagtttcattcacgccctgacgacatcgtaatcgcgacatatcctaaatctggcactacatgggtgagtgaaatcattgacatgatcttgaatgacggagatatcgaaaagtgcaagagagggttcatcaccgaaaaagttcccatgctggagatgacacttccagggcttagaacttctgggatcgagcagctggaaaagaaccccagcccgagaattgtgaagacgcatttgccaacagatcttctgccgaagagcttttgggagaacaactgtaagatgatctacctggccagaaacgccaaggacgtgtcggtgtcatattaccatttcgacttgatgaataacctgcagccatttcccggtacatag

SEQ ID NO: 180265 - DNA, 1429 bp, Artificial Sequence
  derived and/or modified sequence
ggaacttgcctcatgtgtgtgtatgtgtgtgtgtgtgattgtgggtgtgggtagtttaacctttttatatcttagctgcctgtaaactcagtgattgctacgttcagatcaaaccttgaacttttttttttctggtgccaggagccttcctgtgctccccattgcctgccagaaccaccaccgtttcccatggttactctacagcagcttcactgcctgaaaatgaaaactgaacaaagggattaaattgtgagaacaactgtcaatctattatatatttgtacaatctggtattaaaatgctttccccaaaagatattctgcgaaaagatctgaagttggtccatggttatcccatgacctgtgcttttgcaagcaactgggaaaaaattgaacagttccatagcagaccagatgacattgtgatagccacttatcctaaatcaggtactacttgggttagtgaaattatagacatgattctaaatgatggagatattgaaaaatgtaagcgaggttttattactgaaaaagttccaatgttggaaatgactctccctggattaagaacatcaggtatagaacaattggagaagaatccatcaccccggattgtgaaaacacatctaccgactgatcttcttcctaaatctttctgggaaaacaattgcaagatgatttatctggctcgtaatgccaaggatgtttcagtctcatattaccattttgacttaatgaataatttacagccttttcctggtacctgggaagaatatctggagaaattcttaactggaaaagtggcctatggttcctggtttactcatgttaaaaactggtggaagaaaaaggaagaacacccaatactttttttgtactatgaagatatgaaagagaatccaaaggaggaaatcaagaagatcattagatttctagagaagaacctgaatgatgagatcttggataggatcatccatcacacctcatttgaagtgatgaaggacaatcctttggtaaattatacacatctaccaactacagtgatggatcatagcaaatccccttttatgcgtaaagggacggctggtgactggaagaattacttcaccgtggcccaaaatgagaaatttgatgctatttatgagacagaaatgtccaaaactgcacttcaattccgcacagagatttaaagtgtctaaatcacacatctgaagaaataagagattgtctgtagttgattgaaacgagggcagttatgaattgatttgggcaatcaaatgaatttataaaggagaataatatgcttttaatatgttgattcttttcaatgttattaatcagatcccagttttgttcctttgattctgagtttccaaattctctaaggctaaagttcattgttaactttttgtaacaaaggaacaatgtaa

SEQ ID NO: 180266 - DNA, 694 bp, Artificial Sequence
  derived and/or modified sequence
cttgaacttttttttttctggtgccaggagccttcctgtgctccccattgcctgccagaaccaccaccgtttcccatggttactctacagcagcttcactgcctgaaaatgaaaactgaacaaagggattaaattgtgagtggaactgaagcatgcaaggaatggaggtcttctcaagaaactaacaactgtcaatctattatatatttgtacaatctggtattaaaatgctttccccaaaagatattctgcgaaaagatctgaagttggtccatggttatcccatgacctgtgcttttgcaagcaactgggaaaaaattgaacagttccatagcagaccagatgacattgtgatagccacttatcctaaatcaggtactacttgggttagtgaaattatagacatgattctaaatgatggagatattgaaaaatgtaagcgaggttttattactgaaaaagttccaatgttggaaatgactctccctggattaagaacatcaggtatagaacaattggagaagaatccatcaccccggattgtgaaaacacatctaccgactgatcttcttcctaaatctttctgggaaaacaattgcaagatgatttatctggctcgtaatgccaaggatgtttcagtctcatattaccattttgacttaatgaataatttacagccttttcctggtacctg

SEQ ID NO: 180267 - protein, 258 aa, Artificial Sequence
  derived and/or modified sequence
MRLSSSPPRGPQQLSSFGSVDWLSQSSCSGPTHTPRPADFSLGSLPGPGQTSGAREPPQAVSIKEAAGSSNLPAPERTMAGLSKEPNTLRAPRVRTAFTMEQVRTLEGVFQHHQYLSPLERKRLAREMQLSEVQIKTWFQNRRMKHKRQMQDPQLHSPFSGSLHAPPAFYSTSSGLANGLQLLCPWAPLSGPQALMLPPGSFWGLCQVAQEALASAGASCCGQPLASHPPTPGRPSLGPALSTGPRGLCAMPQTGDAF

SEQ ID NO: 180268 - DNA, 2428 bp, Artificial Sequence
  derived and/or modified sequence
acctggccgccatgcgcctctcctcctccccacctcgtggcccgcagcagctctccagctttggctccgtggactggctctcccagagcagctgctcagggccgacccacacccccaggcctgccgacttctccctggggagcctccctggcccaggccagacatccggcgcccgggagccccctcaggccgtcagcatcaaggaggccgccgggtcctcaaatctgcctgcgccggagaggaccatggccgggttgagtaaggagccaaataccttgcgggccccccgtgtccgcacagccttcaccatggagcaggtccgcaccttggagggcgtcttccagcaccaccagtacctgagccctctggagcggaagaggctggccagggagatgcagctctcagaggtccagataaaaacctggtttcagaatcgccgcatgaaacacaaacggcaaatgcaggacccccagctgcacagccccttctcggggtctctccatgcgcccccagctttctactcaacgtcttctggccttgccaatggcctgcagctgctgtgcccttgggcacccctgtccgggccccaggctctgatgctgccccctggctccttctggggtctctgccaagtggcacaagaggccctggcatctgcgggagcttcctgctgcgggcagcctctggcgtcccacccccctaccccaggccggccttcgctgggaccagccctgtccacggggccccggggcctgtgtgctatgccacagacgggggatgcattttgaggaggcacctctgactcccacactcgcggtcttgctgatcgcacctggctcctacctggaggactcagttgttctgtttacatcctggtggcacctctcaccctgacccacacaaaggttctggagattactggagaatatatataaatatatatatgtacgtatatatgtaaatacacatatacgtatatataaatatatatatacatatgtgtgtgtatatatatatatatttttttttttttttttttttttgagacggagtgttgctctgtcacccaggctggagtgcaatgacgcaatctcggctcactgcaacctccgcctcctgggttcaagcgattctccagcctcagcctcccgagtagctgggattacagacacccgccaccacgcccggctaattttttctatttttagtagaaatggggtttcaccatgttagccaggctggtctcaaactcctgaccctgtgatccgcccgcctcggcctcccaaagtgctgggattacaggcatgagccactgcacccggccctgagaatatatttattaaagccacctcttcactgaaagttaccgaaagagtcggtttaggaaggaaacgaagggtcagtgaacagagtcaaatgcagaagtgggcttgtcatgggtagggctttcggcgtacgataaaaggatcatttgttttttaaaaggggttggaaaaactggttttccagttggaaacagtaaaggttgtaagctttgtgtgtacaaaagaaaacagggaatgcaggtgtgtttatagcgttgtggttcaagtccctcttaacaagaactccaaagctggaaagcaggagggaacaaaggtgaacatgaaggcgaggatgctggggccctgcagtgcgctctaggctgtgcgtgagccgggactgtacccacagcttgctgagggctgctcttcttgggccagggaaagcagggcagccgggacctgcggctgtgcctggactgaagctgtcccgcaggtccccaccctccaacacgtgctcacctgtccccctcctcgcagcagcctcgggacaaaacaatgactcaaggacagcacttctcgcagaaggtctggaagtgcccagaatgggaggcacggaagcccctcccggggaggactcccgcgttgatggaccgttcttggtgcagactcctgactgcgtgcatgaaacctgagacaagtgcaattccttccatgtcgccccagagtgcccaggaggcaggcagtgcggggtgcccaggcagacgggttcagcctgcagaactggaggcgacctgtgaaacccacccgggcaccccaacaggaacagaagcgtggtcctgcggctgcgtccccagcgagtttcactttccccttgctcgtttctcccttgttgtaagtgtttacaactggcatgtgcttttaaacgtcaggtaagaggggaacagctgctgtacatcgtcctggcgagtgacaatgtgacagaagcctgggcgaggccctcggagggcagcagctggacaggggctactgggtttggcctggacagcactgatttgtggatgtggatgggggcacgttgtccgtgataaaagtacaagtgcccctcacaaaaaaaaaaaaaaaaa

SEQ ID NO: 180269 - DNA, 777 bp, Artificial Sequence
  derived and/or modified sequence
atgagactgagcagcagcccccccagaggcccccagcagctgagcagcttcggcagcgtggactggctgagccagagcagctgcagcggccccacccacacccccagacccgccgacttcagcctgggcagcctgcccggccccggccagaccagcggcgccagagagcccccccaggccgtgagcatcaaggaggccgccggcagcagcaacctgcccgcccccgagagaaccatggccggcctgagcaaggagcccaacaccctgagagcccccagagtgagaaccgccttcaccatggagcaggtgagaaccctggagggcgtgttccagcaccaccagtacctgagccccctggagagaaagagactggccagagagatgcagctgagcgaggtgcagatcaagacctggttccagaacagaagaatgaagcacaagagacagatgcaggacccccagctgcacagccccttcagcggcagcctgcacgccccccccgccttctacagcaccagcagcggcctggccaacggcctgcagctgctgtgcccctgggcccccctgagcggcccccaggccctgatgctgccccccggcagcttctggggcctgtgccaggtggcccaggaggccctggccagcgccggcgccagctgctgcggccagcccctggccagccacccccccacccccggcagacccagcctgggccccgccctgagcaccggccccagaggcctgtgcgccatgccccagaccggcgacgccttctag

SEQ ID NO: 180270 - DNA, 777 bp, Artificial Sequence
  derived and/or modified sequence
atgcggctgtcttcttcaccgcctagaggtccacaacagctgagcagcttcggatctgtggattggctgtctcagtcatcttgcagcggccctacacacactcctaggcccgccgattttagtctggggtcactccctggaccaggccagaccagcggtgctagggaaccgcctcaagcagtttctataaaggaggccgccggcagcagcaatcttcccgcgcccgagagaacaatggctggtctctcaaaagaacccaacactctgagggctcctagggttcgcacggccttcacaatggaacaagtgcggacactagaaggagtgttccaacaccaccagtacctgtctccccttgagaggaaacgactggcccgcgagatgcagctctcggaggtgcaaattaagacatggtttcaaaacagacggatgaagcacaaaagacagatgcaggatccgcagcttcacagcccgttctctgggtccctccatgctccacccgctttctatagcactagtagcggcctagccaacggcctgcaactactctgtccttgggcgccactgagtggcccccaggcgcttatgctgccccccgggagtttctgggggctttgccaggtggctcaggaggccctggcctctgcgggagcttcctgctgtggtcaaccattagccagtcaccccccaacaccaggtcgaccttccctcggtcccgccctgtcaaccgggcctcggggtttatgtgcgatgcctcagacaggggatgccttttag

SEQ ID NO: 180271 - DNA, 777 bp, Artificial Sequence
  derived and/or modified sequence
atgaggctgagcagcagccccccccggggcccccagcagctgagcagctttggatctgtggactggctgagccagagcagctgcagcggccccacccacacccccaggcctgctgacttcagcctgggcagcctgcccggccctggccagaccagcggggcccgggagcccccccaggccgtgtccatcaaggaggccgccggcagcagcaacctgcctgcccctgagaggaccatggccggcctgagcaaggagcccaacaccctgcgggccccccgggtgaggacagccttcaccatggagcaggtgaggaccctggagggcgtcttccagcaccaccagtacctgagccccctggagaggaagaggctggcccgggagatgcagctgtctgaggtgcagatcaagacctggttccagaacagaaggatgaagcacaagaggcagatgcaggacccccagctgcacagccccttcagcggcagcctgcacgcccccccagccttctacagcaccagcagcggcctggccaacggcctgcagctgctgtgcccctgggcccccctgagcggcccccaggccctgatgctgcccccaggcagcttctggggcctgtgccaggtggcccaggaggccctggccagcgctggggccagctgctgcggccagcccctggccagccacccccccaccccaggccggcccagcctgggccctgccctgagcacaggcccccggggcctgtgtgccatgccccagacaggagatgccttctag

SEQ ID NO: 180272 - DNA, 777 bp, Artificial Sequence
  derived and/or modified sequence
atgcggctgagcagcagccccccccggggcccccagcagctgagctctttcggtagcgttgactggctttcccaatcttcatgtagcggtccaacacacacacctaggccggcagacttttcactgggttccttgcccgggcctggtcagacatccggagccagggaacctccccaggccgtgtctatcaaggaagctgctgggagctctaacctcccagcaccagaaagaacgatggcaggcctgtcaaaggagcctaatacacttcgggctcctagggtgcgcactgcttttaccatggagcaggttcggacattggaaggagtgttccagcaccaccagtatttgtcccctctcgagcgcaagagattggcgagggaaatgcagttgtctgaggtccaaatcaagacctggtttcagaatagacgcatgaagcataagcggcagatgcaggatccccagctccattcacccttctccgggtctctgcatgcccccccagccttttattccacttcttccggtctcgccaacggcctgcaactcctgtgcccctgggccccactgagtggtccccaggccctgatgctccctcccggatctttttggggcttgtgccaggttgctcaggaggctttggccagcgccggcgcatcttgctgcggtcagccactggcaagccatcctcccacgccaggaagaccaagcctcggcccagcactctcaacggggccacgtggcctatgcgcaatgccccagacaggagatgcattttag

SEQ ID NO: 180273 - DNA, 777 bp, Artificial Sequence
  derived and/or modified sequence
atgcggttgtcatcctctccaccacggggacctcagcagctcagctcctttggcagtgtcgactggttatctcagtcctcatgttcaggccctacccatacgcctaggccagcagacttctcacttggaagcctccctggacctggacagactagcggggcacgcgagccaccccaggctgtatcgattaaggaagcggctggctctagtaacctgcctgccccagagcggacgatggccggattatccaaggaaccaaataccctgcgtgcgcctagggtgaggaccgcctttacaatggaacaggtgagaacactcgagggcgtcttccaacaccaccagtacctgagcccactggaaagaaagcggttagcccgtgaaatgcaactgtcggaagtgcagatcaagacctggttccagaacagaaggatgaagcataagcgtcagatgcaagacccacagctccatagtccttttagcgggtccttgcatgcaccacccgctttttatagcacgagttctggacttgccaatggactgcagctcctgtgtccttgggctccgttatccggaccccaggcactgatgctccctcctgggagcttctggggattatgccaagtggcacaggaagctctcgcctccgcaggagcttcctgctgtggccagcccctagcttcccacccccctactcctgggcgaccaagcctgggcccagctctcagcactgggccacggggtctctgtgccatgccacagaccggcgatgccttttag

SEQ ID NO: 180274 - DNA, 2644 bp, Artificial Sequence
  derived and/or modified sequence
aaccagggcccgcagccccgcccctcccccagacatcgaggagccggggaggtgtgaacggcctcctttgtgcctctgaatcgaaggcaattaggcgctgcttatctgggcattagccgtgtatgcaaaccgggctcccgccccctcctcctgggcttataaacgccgccgcctggcgaggcccgaggtggatcctgcgcctggccagccccgcctggccttccctccggcccacctggccgccatgcgcctctcctcctccccacctcgtggcccgcagcagctctccagctttggctccgtggactggctctcccagagcagctgctcagggccgacccacacccccaggcctgccgacttctccctggggagcctccctggcccaggccagacatccggcgcccgggagccccctcaggccgtcagcatcaaggaggccgccgggtcctcaaatctgcctgcgccggagaggaccatggccgggttgagtaaggagccaaataccttgcgggccccccgtgtccgcacagccttcaccatggagcaggtccgcaccttggagggcgtcttccagcaccaccagtacctgagccctctggagcggaagaggctggccagggagatgcagctctcagaggtccagataaaaacctggtttcagaatcgccgcatgaaacacaaacggcaaatgcaggacccccagctgcacagccccttctcggggtctctccatgcgcccccagctttctactcaacgtcttctggccttgccaatggcctgcagctgctgtgcccttgggcacccctgtccgggccccaggctctgatgctgccccctggctccttctggggtctctgccaagtggcacaagaggccctggcatctgcgggagcttcctgctgcgggcagcctctggcgtcccacccccctaccccaggccggccttcgctgggaccagccctgtccacggggccccggggcctgtgtgctatgccacagacgggggatgcattttgaggaggcacctctgactcccacactcgcggtcttgctgatcgcacctggctcctacctggaggactcagttgttctgtttacatcctggtggcacctctcaccctgacccacacaaaggttctggagattactggagaatatatataaatatatatatgtacgtatatatgtaaatacacatatacgtatatataaatatatatatacatatgtgtgtgtatatatatatatatttttttttttttttttttttttgagacggagtgttgctctgtcacccaggctggagtgcaatgacgcaatctcggctcactgcaacctccgcctcctgggttcaagcgattctccagcctcagcctcccgagtagctgggattacagacacccgccaccacgcccggctaattttttctatttttagtagaaatggggtttcaccatgttagccaggctggtctcaaactcctgaccctgtgatccgcccgcctcggcctcccaaagtgctgggattacaggcatgagccactgcacccggccctgagaatatatttattaaagccacctcttcactgaaagttaccgaaagagtcggtttaggaaggaaacgaagggtcagtgaacagagtcaaatgcagaagtgggcttgtcatgggtagggctttcggcgtacgataaaaggatcatttgttttttaaaaggggttggaaaaactggttttccagttggaaacagtaaaggttgtaagctttgtgtgtacaaaagaaaacagggaatgcaggtgtgtttatagcgttgtggttcaagtccctcttaacaagaactccaaagctggaaagcaggagggaacaaaggtgaacatgaaggcgaggatgctggggccctgcagtgcgctctaggctgtgcgtgagccgggactgtacccacagcttgctgagggctgctcttcttgggccagggaaagcagggcagccgggacctgcggctgtgcctggactgaagctgtcccgcaggtccccaccctccaacacgtgctcacctgtccccctgctcgcagcagcctcgggacaaaacaatgactcaaggacagcacttcttgcagaaggtctggaagtgcccagaatgggaggcacggaagcccctcccggggaggactcccgcgttgatggaccgttcttggtgcagactcctgactgcgtgcatgaaacctgagacaagtgcaattccttccatgtcgccccagagtgcccaggaggcaggcagtgcggggtgcccaggcagacgggttcagcctgcagaactggaggcgacctgtgaaacccacccgggcaccccaacaggaacagaagcgtggtcctgcggctgcgtccccagcgagtttcactttccccttgctcgtttctcccttgttgtaagtgtttacaactggcatgtgcttttaaacgtcaggtaagaggggaacagctgctgtacatcgtcctggcgagtgacaatgtgacagaagcctgggcgaggccctcggagggcagcagctggacagggactactgggtttggcctggacagcactgatttgtggatgtggatgggggcacgttgtccgtgataaaagtacaagtgcccctcac

SEQ ID NO: 180275 - protein, 392 aa, Artificial Sequence
  derived and/or modified sequence
MVEADRPGKLFIGGLNLETDEKALEAEFGKYGRIVEVLLMKDRETNKSRGFAFVTFESPADAKAAARDMNGKSLDGKAIKVAQATKPAFESSRRGPPPPRSRGRPRFLRGTRGGGGGPRRSPSRGGPDDDGGYTADFDLRPSRAPMPMKRGPPPRRVGPPPKRAAPSGPARSSGGGMRGRALAVRGRDGYSGPPRREPLPPRRDPYLGPRDEGYSSRDGYSSRDYREPRGFAPSPGEYTHRDYGHSSVRDDCPLRGYSDRDGYGGRDRDYGDHLSRGSHREPFESYGELRGAAPGRGTPPSYGGGGRYEEYRGYSPDAYSGGRDSYSSSYGRSDRYSRGRHRVGRPDRGLSLSMERGCPPQRDSYSRSGCRVPRGGGRLGGRLERGGGRSRY

SEQ ID NO: 180276 - DNA, 2215 bp, Artificial Sequence
  derived and/or modified sequence
aacagccgaccaatcacaggcagcaggggcgcgccctgcagcggggctccggctgcggttccgtggactcggcgactaggcgccgcctgaccagtaggagccgccctcgacgagcgagctcgaaggctgcgactggcgccgcctcaccgcctcccaccgccactgaccgaccgttcgaccggcaaacatggttgaagcggatcgcccggggaagctgttcattgggggcctcaacctcgaaaccgacgagaaagccctcgaagccgagtttggcaagtatggccgcatcgtcgaggtgctcctgatgaaagaccgagaaaccaacaagtcgaggggcttcgcgttcgtcacctttgaaagccccgcagacgccaaggccgccgccagagacatgaacggcaagtccctggatggtaaggccatcaaggtggcccaggccaccaaaccggcgttcgagagcagccggcggggcccgccgcctccccgcagccgcggtcgcccgaggttcctgcgcggaacccgcgggggtggcggcggcccgcggcgttccccatcccggggcgggcccgatgatgacggcggctacacggcggatttcgacctgcggccctccagggccccgatgcccatgaagcgtgggccgccgccgcgcagggtcggcccaccccccaagagggccgcgccgtcgggcccggctcgcagcagcggcggtggaatgcgcgggagggccctggccgtgcgggggcgagacggctactcaggcccaccgcgccgggagccgctgcccccgcgccgcgacccctacctgggcccgcgggatgagggctactcgtccagagacggctactcgagccgagactaccgcgaaccccggggttttgccccctcgcccggagagtacacccaccgcgattacggccactccagtgtccgggacgactgtcccttgagaggctacagcgaccgagacggctacggaggtcgcgaccgtgactacggggatcatctgagcagaggctcccatcgagagccctttgagagctacggagagctgcgcggcgccgccccaggacgggggacaccgccatcttacggaggaggaggccgctacgaggagtaccggggctactcacccgatgcctacagcggcggccgcgacagttacagcagcagttatggccggagcgaccgctactcgaggggccgacaccgggtgggcagaccagatcgtgggctctctctgtccatggaaaggggctgccctccccagcgtgattcttacagccggtcaggctgcagggtgcccaggggcggaggccgtctaggaggccgcttggagagaggaggaggccggagcagatactaagcaggaacagacttgggaccaaaaatcccttttcaacgaaactaacaaaaagaagaacctgttgtatggtaactacccaaggactagtacaaggaagagttgtttttaccttttaagaatttcctgttaagatcgtctccatttttatgcttttgggagaaaaaacttaaaattcgtttagtttagttttggaattgttaacgtttctttcaacaagctcctgttaaaagtatatgaacctgagtactagtcttcttacatttacaagtagaaattcgattaatggcttcttcccttgtaaattttcttgataaatgaggcaaacagttctaagatctttgataaacatctgctcacctaaaatggaaaaacggatcattctgctcatttaaaccaactagattttgggtggagagtgggagggattggtgtatgctactcttaagatttcagggtatctttcaaactgaatctttgtttccagtattaaaaagcaaacaaccagcaacaacaacaacaaaagtgatttagatcaaatgtttatgtaaagaaaattattttcactcagtaaatctgaaaagtaaatggataatgttggccatgttttgcctttttgctttttctttgggaatctacaggatcacctgtcccctcactcccaaaagtactatctatgttttgaacaacagtggaatactatatcaaaggtttggccaaccaaccacaaagctacaaaacaagcaaatcccaaatccttcaattgatagcattcattttcactaccaacaaatttattaagaaacaagtagaaaataaatcagtggtcgacttggggaccgtaatggcttc

SEQ ID NO: 180277 - DNA, 1179 bp, Artificial Sequence
  derived and/or modified sequence
atggttgaagccgacaggcccggaaagctgtttatcggcggccttaacctggagacggatgagaaagctctggaagccgaatttggcaagtacgggagaatcgttgaggttttgctgatgaaagatcgggagacgaacaagtcaaggggatttgccttcgtgacttttgaatcccccgcagatgcaaaagccgcagccagagacatgaacggcaagagtctcgatggcaaggcaattaaggtggctcaggcgaccaaacccgcattcgaaagttctcgacgaggccccccccccccacggtcacgcggaagacctagattcctgagaggaacccgcggtggtgggggcggccctcgacgctccccttctagggggggcccagatgacgatggtgggtatacagccgatttcgacctgcgcccttctcgtgcccctatgcccatgaagagagggcctcccccaagacgggttgggccgccacctaagagagccgcgccaagcggacctgctaggtcgtcagggggaggtatgcgaggacgggccttggccgtcagaggaagggacggatactccggcccccctagaagggagcctctgccacccaggagggatccatacttggggcctagagacgagggctattcctcacgtgatggatacagtagccgagattacagagaaccacggggctttgcccccagccctggcgagtacacccacagggattatggccattctagcgtgcgggatgactgtcccctgcgaggatattcagaccgggatggctatggagggcgagaccgcgattatggcgatcatctgagccgtggaagtcaccgtgagccgttcgaaagttacggggaactgcggggagcagctcccggtaggggcacaccaccaagctacggaggcgggggcagatacgaagagtacagagggtatagtcctgacgcatactcaggggggcgagactcatacagttcaagctatggaagatcagacagatactctaggggacggcaccgtgtgggtcggcctgaccggggcctgtccctgagcatggaaagaggctgtccacctcaacgggattcttattcgcgtagcgggtgtagggtgccgaggggcggtggacgactgggaggaagactcgagcgcggtggcggtagatccagatattag

SEQ ID NO: 180278 - DNA, 1179 bp, Artificial Sequence
  derived and/or modified sequence
atggtggaggccgacaggcctgggaagctgttcatcggcggcctgaacctggagacagatgagaaggccctggaggccgagtttgggaagtatggccgcatcgtggaggtgctgctgatgaaggaccgggagaccaacaagagccggggctttgcctttgtgacctttgagagccctgcagatgccaaggctgctgcccgggacatgaatggcaagagcctggatggcaaggccatcaaggtggcccaggccaccaagccagcctttgagagcagcagaagaggccccccaccacccaggagccggggccggccccgcttcctgcggggcacccggggcggcggcggcggccccaggaggagccccagcagaggaggcccagatgatgatggcggctacacagctgactttgacctgcggcccagccgggcccccatgcccatgaagaggggccccccaccaagaagagtgggccccccacccaagagagctgcccccagcggccctgcccggagcagcggcggcggcatgaggggccgggccctggccgtgcggggcagagatggctacagcggccccccaagaagagagcccctgcccccccggcgggacccctacctgggccccagagatgagggctacagcagcagagatggctacagcagccgggactaccgggagccccggggctttgcccccagccctggagagtacacccaccgggactatggccacagctctgtgagagatgactgccccctgcggggctacagcgacagagatggctatggaggccgggaccgggactatggagaccacctgagccggggcagccaccgggagccctttgagagctatggagagctgcggggggccgcccctggccggggcaccccacccagctatggaggcggcggccgctatgaggagtaccggggctacagcccagatgcctacagcggcggccgggacagctacagcagcagctatggccgcagtgaccgctacagccggggccgccaccgggtgggccgcccagaccggggcctgagcctgtccatggagcggggctgccccccccagagggacagctacagccgcagcggctgccgggtgccccggggcggcggccgcctgggcggccgcctggagcggggcggcggccgcagccgctactag

SEQ ID NO: 180279 - DNA, 1179 bp, Artificial Sequence
  derived and/or modified sequence
atggtggaggccgaccggcccggcaagctgttcatcggcggcctgaatctggagactgacgaaaaggcactcgaggccgagttcgggaaatatgggaggattgtggaggtgctcttaatgaaagatcgtgagaccaacaagtcgcgcggattcgcgttcgtcacattcgaatcacccgcagatgccaaggccgctgcccgtgatatgaacggcaaaagcttagacggcaaagccattaaggtcgctcaggctactaaacccgccttcgagagttctcgccgtggcccacccccacccagaagtcgtggtaggcctcggttcctcagagggacccgcggcggcggcgggggaccacggcggtccccgagtcgtggaggtcccgacgatgatgggggatacacggccgatttcgacctgcggccatccagggctcctatgcctatgaaacgcgggcctcccccacgacgtgttggcccccccccaaaaagggcggccccaagcggaccagcgagatcatcgggggggggaatgagaggaagagccctcgctgtcagaggacgtgatggatactcaggcccaccaagacgggagccactccctcctagaagggatccctacttaggccctcgggatgaggggtacagcagtcgcgacggatatagtagccgcgattatcgcgaacccagaggctttgccccaagccccggagagtacacccaccgcgactacgggcattccagtgttcgcgatgattgcccactgcgcggttattccgaccgcgacgggtatggagggagagaccgcgactacggcgaccacctcagtagagggtcccaccgcgaaccatttgagagctatggcgagctgcgcggggcagccccaggacgggggacaccacccagttacggtggtgggggccgatacgaggaatatcgtgggtactcccctgatgcctattctggtggccgggactcctactcgtcttcatacggacggtccgataggtactcacgcggccgccacagagtcggccggcctgaccggggcctgagcctgtccatggaacgaggctgccccccacagcgggatagctactcgcgatctggatgcagggttccccgtggaggggggcgcttaggcgggagactggaacgggggggcggacgctcgcggtactag

SEQ ID NO: 180280 - DNA, 1179 bp, Artificial Sequence
  derived and/or modified sequence
atggtggaggctgatagacccggtaaactctttataggcggacttaacctggagaccgacgaaaaagcgttagaggcggaatttgggaaatacgggcgtattgttgaggtgctgttaatgaaagatagagaaacaaacaagagccggggatttgcgttcgttacctttgagtcaccagcagacgccaaggccgcagcaagggacatgaatgggaagagtctggacggaaaggcaattaaggtcgcacaggctactaaacctgcattcgagagcagccggcgaggtcccccaccccctaggtcacgaggtcggcctaggttcctgcgcggaacgcgcggtggcggtggcggaccacggagatccccaagtcgtggaggacccgatgacgacggtgggtacaccgcagattttgacctgagaccctcgagagcccctatgcccatgaagcggggtccccctccccgtagggtgggaccaccacctaaaagagccgctccctcaggtccggctaggtctagtggcggaggaatgagagggagagccctggcggtgcgcggaagggacggatactctggcccacctaggcgcgagcctctcccccctcgccgtgacccatatctcgggcctagagatgaggggtactctagcagagacggctatagttcgcgcgactatcgggagcccaggggattcgctccatcccctggggagtacacccatcgagactacggccatagttcggttagggacgactgtccactgcgcggatactccgatagagatggatacggcggacgggatagagattatggggatcatctgtctaggggtagccatcgtgagcccttcgaatcctatggcgagctgcgcggtgccgctccaggtagagggacacctcccagctatggtggcggtggaaggtacgaagaatatagaggatactcacccgacgcatactctggtggaagagattcctactcctcgagctacggcaggtctgatcgatattcccgcggtcgccacagggtgggtcgaccagaccggggactatcactatccatggagcgtgggtgccctccacaacgggatagctacagccgcagtggatgccgcgttccacgaggcggtggacgattgggaggccgtttagagcggggtggtggacggagccgttattag

SEQ ID NO: 180281 - DNA, 1179 bp, Artificial Sequence
  derived and/or modified sequence
atggtggaggccgacagacccggcaagctgttcatcggcggcctgaacctggagaccgacgagaaggccctggaggccgagttcggcaagtacggcagaatcgtggaggtgctgctgatgaaggacagagagaccaacaagagcagaggcttcgccttcgtgaccttcgagagccccgccgacgccaaggccgccgccagagacatgaacggcaagagcctggacggcaaggccatcaaggtggcccaggccaccaagcccgccttcgagagcagcagaagaggcccccccccccccagaagcagaggcagacccagattcctgagaggcaccagaggcggcggcggcggccccagaagaagccccagcagaggcggccccgacgacgacggcggctacaccgccgacttcgacctgagacccagcagagcccccatgcccatgaagagaggccccccccccagaagagtgggccccccccccaagagagccgcccccagcggccccgccagaagcagcggcggcggcatgagaggcagagccctggccgtgagaggcagagacggctacagcggcccccccagaagagagcccctgccccccagaagagacccctacctgggccccagagacgagggctacagcagcagagacggctacagcagcagagactacagagagcccagaggcttcgcccccagccccggcgagtacacccacagagactacggccacagcagcgtgagagacgactgccccctgagaggctacagcgacagagacggctacggcggcagagacagagactacggcgaccacctgagcagaggcagccacagagagcccttcgagagctacggcgagctgagaggcgccgcccccggcagaggcaccccccccagctacggcggcggcggcagatacgaggagtacagaggctacagccccgacgcctacagcggcggcagagacagctacagcagcagctacggcagaagcgacagatacagcagaggcagacacagagtgggcagacccgacagaggcctgagcctgagcatggagagaggctgccccccccagagagacagctacagcagaagcggctgcagagtgcccagaggcggcggcagactgggcggcagactggagagaggcggcggcagaagcagatactag

SEQ ID NO: 180282 - protein, 232 aa, Artificial Sequence
  derived and/or modified sequence
MKERRAPQPVVARCKLVLVGDVQCGKTAMLQVLAKDCYPETYVPTVFENYTACLETEEQRVELSLWDTSGSPYYDNVRPLCYSDSDAVLLCFDISRPETVDSALKKWRTEILDYCPSTRVLLIGCKTDLRTDLSTLMELSHQKQAPISYEQGCAIAKQLGAEIYLEGSAFTSEKSIHSIFRTASMLCLNKPSPLPQKSPVRSLSKRLLHLPSRSELISSTFKKEKAKSCSIM

SEQ ID NO: 180283 - protein, 126 aa, Artificial Sequence
  derived and/or modified sequence
WRTEILDYCPSTRVLLIGCKTDLRTDLSTLMELSHQKQAPISYEQGCAIAKQLGAEIYLEGSAFTSEKSIHSIFRTASMLCLNKPSPLPQKSPVRSLSKRLLHLPSRSELISSTFKKEKAKSCSIM

SEQ ID NO: 180284 - DNA, 699 bp, Artificial Sequence
  derived and/or modified sequence
atgaaggagagaagagccccccagcccgtggtggccagatgcaagctggtgctggtgggcgacgtgcagtgcggcaagaccgccatgctgcaggtgctggccaaggactgctaccccgagacctacgtgcccaccgtgttcgagaactacaccgcctgcctggagaccgaggagcagagagtggagctgagcctgtgggacaccagcggcagcccctactacgacaacgtgagacccctgtgctacagcgacagcgacgccgtgctgctgtgcttcgacatcagcagacccgagaccgtggacagcgccctgaagaagtggagaaccgagatcctggactactgccccagcaccagagtgctgctgatcggctgcaagaccgacctgagaaccgacctgagcaccctgatggagctgagccaccagaagcaggcccccatcagctacgagcagggctgcgccatcgccaagcagctgggcgccgagatctacctggagggcagcgccttcaccagcgagaagagcatccacagcatcttcagaaccgccagcatgctgtgcctgaacaagcccagccccctgccccagaagagccccgtgagaagcctgagcaagagactgctgcacctgcccagcagaagcgagctgatcagcagcaccttcaagaaggagaaggccaagagctgcagcatcatgtag

SEQ ID NO: 180285 - DNA, 381 bp, Artificial Sequence
  derived and/or modified sequence
tggagaaccgagatcctggactactgccccagcaccagagtgctgctgatcggctgcaagaccgacctgagaaccgacctgagcaccctgatggagctgagccaccagaagcaggcccccatcagctacgagcagggctgcgccatcgccaagcagctgggcgccgagatctacctggagggcagcgccttcaccagcgagaagagcatccacagcatcttcagaaccgccagcatgctgtgcctgaacaagcccagccccctgccccagaagagccccgtgagaagcctgagcaagagactgctgcacctgcccagcagaagcgagctgatcagcagcaccttcaagaaggagaaggccaagagctgcagcatcatgtag

SEQ ID NO: 180286 - DNA, 699 bp, Artificial Sequence
  derived and/or modified sequence
atgaaagaaagacgcgctccccagcccgtggtcgcgcgatgtaagctggtcctcgtgggcgacgtgcagtgcggcaaaaccgcaatgcttcaggtactggctaaggattgttacccagaaacttatgtgccaactgttttcgagaactataccgcttgccttgagacagaggaacagagggtagaactgtctctgtgggacacttcaggcagtccgtattatgataacgtgagaccgctgtgttactccgactccgacgccgttctgctctgcttcgacatatctaggccagagacggttgactcagctctgaaaaagtggcgtactgagatcctcgattattgcccatctacgcgggtactgctcatcggttgcaaaactgatctaagaactgatctcagcaccttgatggaactctcccaccagaaacaggcacctatctcctacgagcaggggtgcgccatcgccaagcagctcggagcagaaatctatctggaagggtctgctttcacgtctgagaaatcaatacacagtatcttccgcacagctagtatgctgtgccttaacaaaccatcgcctctgccacagaagtctcctgtgaggtccttgagtaaacgtctccttcatctgcctagcagaagtgagttgatctcaagtacatttaagaaggaaaaggctaagtcgtgctctattatgtag

SEQ ID NO: 180287 - DNA, 381 bp, Artificial Sequence
  derived and/or modified sequence
tggagaaccgagattcttgactattgcccctcaaccagagtgctgctgataggatgcaagaccgacctgagaaccgatctgagtacgctaatggagctcagtcatcagaaacaggctcccatttcttacgagcagggctgcgctatcgcaaagcagttaggagctgaaatctacctcgagggctctgcttttacctcagaaaagtccattcacagtatattccggaccgcttctatgctctgccttaacaagcccagtccactaccccagaagagtccagtgagatccctgagtaagcgcctattgcatctgccaagccgctcagaactgatctcaagcaccttcaagaaagaaaaggccaagtcctgctctatcatgtag

SEQ ID NO: 180288 - DNA, 699 bp, Artificial Sequence
  derived and/or modified sequence
atgaaggagcggcgggccccccagcctgtggtggcccgctgcaagctggtgctggtgggagatgtgcagtgtgggaagacagccatgctgcaggtgctggccaaggactgctacccagagacctacgtgcccaccgtgtttgagaactacacagcctgcctggagacagaggagcagagggtggagctgagcctgtgggacaccagcggcagcccctactatgacaacgtgcggcccctgtgctacagcgacagtgatgctgtgctgctgtgctttgacatcagcaggcctgagaccgtggacagcgccctgaagaagtggaggacagagatcctggactactgccccagcaccagggtgctgctgattggctgcaagacagacctgaggacagacctgagcaccctgatggagctgagccaccagaagcaggcccccatctcctatgagcagggctgtgccatcgccaagcagctgggcgctgagatctacctggagggcagcgccttcaccagcgagaagagcatccacagcatcttcagaacagcctccatgctgtgcctgaacaagcccagccccctgccccagaagagccctgtgcgcagcctgagcaagaggctgctgcacctgcccagccgctctgagctgatcagcagcaccttcaagaaggagaaggccaagagctgcagcatcatgtag

SEQ ID NO: 180289 - DNA, 381 bp, Artificial Sequence
  derived and/or modified sequence
tggaggacagagatcctggactactgccccagcaccagggtgctgctgattggctgcaagacagacctgaggacagacctgagcaccctgatggagctgagccaccagaagcaggcccccatctcctatgagcagggctgtgccatcgccaagcagctgggcgctgagatctacctggagggcagcgccttcaccagcgagaagagcatccacagcatcttcagaacagcctccatgctgtgcctgaacaagcccagccccctgccccagaagagccctgtgcgcagcctgagcaagaggctgctgcacctgcccagccgctctgagctgatcagcagcaccttcaagaaggagaaggccaagagctgcagcatcatgtag

SEQ ID NO: 180290 - DNA, 699 bp, Artificial Sequence
  derived and/or modified sequence
atgaaggagcggcgggccccccagcccgtggtggcccggtgcaagttggtcctggtgggggatgtccagtgcggcaaaaccgccatgctacaagtgctcgctaaggattgttatcctgaaacctatgttcccacggtgttcgagaactataccgcgtgcctggagacagaggagcagcgcgtcgaactgtccctatgggatacctctggtagcccttattacgacaatgtccgtcctctgtgctatagcgactccgatgccgtactgctgtgcttcgatatttctcggccagaaactgtagactcagctttgaagaaatggcgcaccgagatcttggattattgtcctagtacacgagtgctgctgataggctgtaagaccgacctacgcacagatttgagcaccctgatggaattgtcacaccaaaaacaggctcctatctcgtacgagcagggctgcgccatcgccaagcagctcggagcggaaatttatctggagggctcagcttttactagtgagaaaagtatccactcaatattcagaacagccagtatgctctgtttgaacaagcctagcccgctgccccaaaagtcacctgttcggtccttgtcaaaacgactcctgcatttgccaagccggtccgaactcatatcctcgacctttaagaaggaaaaggccaagtcttgctctattatgtag

SEQ ID NO: 180291 - DNA, 381 bp, Artificial Sequence
  derived and/or modified sequence
tggcggaccgagatcctggactactgccccagcacccgggtgctgcttataggctgtaagactgacctccggactgacctttccaccctcatggaactaagtcatcagaagcaagctccaatctcttatgaacaaggctgtgcgatcgccaaacagctgggcgcagaaatctatctggaaggaagcgcttttacatccgagaaatctatccatagcatattccggaccgcgtccatgctctgtctcaataagccttccccgttaccccagaaaagcccagttcggagcctttccaaacgcctgttgcacctaccctcacggtctgagcttatttcgagtacgttcaaaaaggagaaggccaaaagctgctctataatgtag

SEQ ID NO: 180292 - DNA, 699 bp, Artificial Sequence
  derived and/or modified sequence
atgaaagaaaggagagctccccagcccgtggtggccagatgcaagctcgtccttgttggagatgttcagtgcggcaagacggccatgttgcaggttctggcaaaagattgctacccggaaacctatgtgcctaccgtctttgaaaactataccgcatgcctcgagactgaagagcagcgggtggaactcagcttatgggataccagcggctctccttattatgacaatgtgcgccctctttgttattcagacagtgatgctgtgttgctgtgcttcgatattagtcgacctgaaacagtggacagcgccttgaagaaatggagaacagaaattttggactactgcccgagcactagagtgctgctgatcggctgcaagaccgatctccgaacagatctgtccaccttgatggagctctcacaccagaaacaggccccaatctcctacgagcagggatgcgccatcgctaagcagctcggggctgagatctacctggaaggctctgcctttacttccgagaagtcaatccactcaatcttccggacggcttcaatgctgtgcctgaacaaaccaagccctctccctcagaaaagtcctgtgaggtccctcagcaaacgcctgctccatctgccgagcaggtcagagctgatctcgagtacctttaagaaggagaaggctaaatcctgtagcatcatgtag

SEQ ID NO: 180293 - DNA, 381 bp, Artificial Sequence
  derived and/or modified sequence
tggagaacggagattctagactactgcccttccactagggtgttgctgatcggatgtaaaaccgatcttcggactgatctgtccacccttatggagctgtcccaccagaagcaggctcccatttcctatgaacagggctgcgcgattgctaagcagctgggtgccgagatctacttggaaggttctgcattcacttctgagaagagtatacacagcatatttagaactgccagcatgttatgccttaataaaccgtcacctcttccacaaaagtcacccgtgcgctcattaagtaagcgcctgctgcacctcccgagccgatccgagctgatcagtagcaccttcaagaaggagaaagctaagagttgtagcatcatgtag

SEQ ID NO: 180294 - DNA, 1681 bp, Artificial Sequence
  derived and/or modified sequence
aaaaggcggctgtgccggcctcctcctcagttggagggaggcagggaatctggcttgattggcgtgctgagacgcacctggcgcaaccctcccttctgaatcgaagttcaagtcccgcggacactgcaaccatgaaggagagacgggccccccagccagtcgtggccagatgtaagctcgttctggtcggggacgtgcagtgtgggaagaccgcgatgttgcaagtgttagcgaaggattgctatccagagacctatgtgcccaccgtgttcgaaaattacacagcctgtttggagacagaggaacagagggtggagcttagtctctgggatacctcaggatctccctactacgataatgtccgtccactctgctacagcgactcggatgcagtattactatgttttgacatcagccgtccagagacagtggacagcgcactcaagaagtggaggacagaaatcctagattattgtcccagcacccgcgttttgctcattggctgcaagacagacctgcgaacagacctgagtactctgatggagctgtcccaccagaagcaggcgcccatctcctatgagcagggttgtgcaatagcaaagcagctgggtgcagaaatctacctggaaggctcagctttcacctcagaaaagagcatccacagcatctttcggacggcatccatgctgtgtctgaacaagcctagcccactgccccagaagagccctgtccgaagcctctccaaacgactgctccacctccccagtcgctctgaactcatctcttctaccttcaagaaggaaaaggccaaaagctgttccattatgtgaagtggaaattggaggggggagacaaccccctacttcctcccttggggtgcagaggcacggggagagggaggatgagacaatttaggacactggacatgagtttttcagatggccacggtgagggcttggaaggagacaggaatggggcgaggaaggagccaggcccggcatgaggacctgacgctgagagagaaccatcataccccaagccaggcactagattttggagggggcgactaccccagtgccccccccgctccagaggaaggaaagctgtgggggacggggggcatgctggcctcatgggcttgggggcctacagcagcctcaccttcagcttcatgcctcttccacacagcgtttccatgcaggtcaggggatgggaggggtccctgagcccttcccttcccctctaaggaggcagcaacggagagtggggaagtggagcggcagctcccttgggggcttagcccaggtgcttcgtaactgcaatcggaagtgcaggagctggtcagagccaatgagaaggaaacctcatctttgcatagcccatgcctcatggagaggtgacatcatacattcacatgcttctcacctaagtccccagggtccaagggagaagccccagacccccttctcttgcagagtgtgggggtggtggtgctgcaggggcagggctgggtgggggtcaccagactttttctgcccttagggtagtacagctggcatttgttttatagactcttgtctttggaattggggggagggggggagtgtttcaatctgttatatgttctgtgtttaatgaagaaaacctatttattaatgaaaaatataatacatataaagaa

SEQ ID NO: 180295 - DNA, 552 bp, Artificial Sequence
  derived and/or modified sequence
tggaggacagaaatcctagattattgtcccagcacccgcgttttgctcattggctgcaagacagacctgcgaacagacctgagtactctgatggagctgtcccaccagaagcaggcgcccatctcctatgagcagggttgtgcaatagcaaagcagctgggtgcagaaatctacctggaaggctcagctttcacctcagaaaagagcatccacagcatctttcggacggcatccatgctgtgtctgaacaagcctagcccactgccccagaagagccctgtccgaagcctctccaaacgactgctccacctccccagtcgctctgaactcatctcttctaccttcaagaaggaaaaggccaaaagctgttccattatgtgaagtgggggtcaccagactttttctgcccttagggtagtacagctggcatttgttttatagactcttgtctttggaattggggggagggggggagtgtttcaatctgttatatgttctgtgtttaatgaagaaaacctatttattaatgaaaaatataatacatataaagaa

SEQ ID NO: 180296 - protein, 86 aa, Artificial Sequence
  derived and/or modified sequence
MAVRQWVIALALAALLVVDREVPVAAGKLPFSRMPICEHMVESPTCSQMSNLVCGTDGLTYTNECQLCLARIKTKQDIQIMKDGKC

SEQ ID NO: 180297 - protein, 109 aa, Artificial Sequence
  derived and/or modified sequence
MILGIGSSPHLLWTLEGTHIWSLLGDASHTDRLPEAGAGKLLSEVPVAAGKLPFSRMPICEHMVESPTCSQMSNLVCGTDGLTYTNECQLCLARIKTKQDIQIMKDGKC

SEQ ID NO: 180298 - DNA, 261 bp, Artificial Sequence
  derived and/or modified sequence
atggccgtgcgtcagtgggttattgcactggcccttgccgccctgttagtcgtagaccgcgaggtgcctgtggccgccggaaaacttccattctcccggatgcctatttgtgaacatatggtggagtctcccacttgttctcagatgtccaacctggtatgcggtaccgatgggctgacctacaccaatgagtgccaactctgccttgcgcgaattaagaccaaacaagatatccagatcatgaaagatgggaaatgttag

SEQ ID NO: 180299 - DNA, 330 bp, Artificial Sequence
  derived and/or modified sequence
atgatacttggtattggcagctctcctcacctgctgtggacccttgaaggcacacacatttggagtctgcttggggacgcctcacacaccgaccgcctgccggaggcgggggccggaaaacttctgtcagaagtgccagtggcagctggaaaactccctttcagccgcatgccgatttgtgaacacatggttgagagccctacatgcagccagatgtcgaatttggtttgcgggacagacggactgacctataccaatgaatgtcagttatgcttagcccgtatcaaaaccaagcaggatatccagatcatgaaggatggcaaatgctag

SEQ ID NO: 180300 - DNA, 330 bp, Artificial Sequence
  derived and/or modified sequence
atgatcctcggcatcggctctagtccccatttactgtggacattagaaggcacacatatctggtccctgcttggggacgcatcgcacaccgatagactgcccgaggctggagcagggaagttgctgagcgaggtccccgtggcagctggtaaactgcctttttctcgaatgcccatctgtgaacacatggttgaaagcccaacctgctcacagatgagcaatctggtttgtggaacagatgggctcacatacacaaatgaatgccagctgtgcctggccagaatcaagaccaagcaagatatccagatcatgaaagacgggaaatgttag

SEQ ID NO: 180301 - DNA, 261 bp, Artificial Sequence
  derived and/or modified sequence
atggctgtgcggcagtgggtgattgccctggccctggccgccctgctggtggtggaccgggaggtgcctgtggccgccggcaagctgcccttcagcaggatgcccatctgtgagcacatggtggagagccccacctgcagccagatgagcaacctggtgtgtggcacagatggcctgacctacaccaatgaatgccagctgtgcctggcccgcatcaagaccaagcaggacatccagatcatgaaggatggaaaatgttag

SEQ ID NO: 180302 - DNA, 330 bp, Artificial Sequence
  derived and/or modified sequence
atgatcctgggcatcggcagcagcccccacctgctgtggaccctggagggcacccacatctggagcctgctgggagatgccagccacacagaccggctgcctgaggccggggccggcaagctgctgtctgaggtgcctgtggccgccggcaagctgcccttcagcaggatgcccatctgtgagcacatggtggagagccccacctgcagccagatgagcaacctggtgtgtggcacagatggcctgacctacaccaatgaatgccagctgtgcctggcccgcatcaagaccaagcaggacatccagatcatgaaggatggcaagtgctag

SEQ ID NO: 180303 - DNA, 261 bp, Artificial Sequence
  derived and/or modified sequence
atggccgtgcggcagtgggtgatcgccctggccctggccgccctgcttgtcgttgatcgggaggtgcctgtcgcagccggtaaactaccctttagtaggatgccgatctgtgagcacatggttgagagcccaacctgctcccagatgtcgaacctggtatgtggcacagatggcctgacctacaccaatgagtgccagctctgcctggctcggattaaaaccaaacaagacatccagatcatgaaggacggcaagtgctag

SEQ ID NO: 180304 - DNA, 330 bp, Artificial Sequence
  derived and/or modified sequence
atgatcctgggcatcggcagcagcccccacctgctgtggaccctggagggcacccatatttggagtctgctgggcgatgcatctcacaccgacaggctacctgaggcgggcgctggaaaattactgagcgaggtgcctgtcgctgccggcaagttgcctttctctcggatgcctatctgcgagcacatggtcgaaagccccacctgcagccagatgagtaatctggtgtgcggtaccgatggtctgacctacaccaacgagtgccagctgtgtctagccagaataaaaaccaagcaagatattcagattatgaaggatggcaagtgttag

SEQ ID NO: 180305 - DNA, 330 bp, Artificial Sequence
  derived and/or modified sequence
atgatcctgggcatcggcagcagcccccacctgctgtggaccctggaagggacccacatctggagccttcttggtgacgcctctcacactgacagattaccagaagctggtgctggcaaactcctgtccgaggtcccagtggctgccggcaagttgccattttcaagaatgcctatttgtgagcacatggttgagtctcctacatgttcacagatgtcaaacttggtgtgcggtaccgacggcctgacctataccaatgaatgtcagctatgcctagcccgcatcaagaccaagcaggacatccagatcatgaaggatgggaagtgttag

SEQ ID NO: 180306 - DNA, 261 bp, Artificial Sequence
  derived and/or modified sequence
atggccgtccggcaatgggtcattgctctggccctggccgcacttttagtggtggacagagaggtgccagtagccgcaggtaagttaccgttctctagaatgcctatctgtgagcacatggttgagtctccaacgtgtagtcagatgagcaatctggtctgcggcacagatgggctgacatatacaaatgaatgtcagctgtgccttgcaaggatcaagaccaaacaggacattcagatcatgaaagatgggaaatgctag

SEQ ID NO: 180307 - DNA, 330 bp, Artificial Sequence
  derived and/or modified sequence
atgattctgggaataggcagtagtcctcacctgctttggaccctggaaggcacacacatttggtctctgctgggcgacgcttcacatacagatagactacccgaggcaggtgcaggtaagttactgtccgaggttccggtggccgctgggaagttgcctttctcacgaatgcctatttgcgaacacatggtggagtcaccaacttgttctcaaatgtcaaacttggtatgtggcactgacggactgacctataccaacgaatgtcagctgtgtctcgcaaggatcaagacaaagcaggacatacagattatgaaggacggtaaatgttag

SEQ ID NO: 180308 - DNA, 330 bp, Artificial Sequence
  derived and/or modified sequence
atgattcttggtattggctcttctcctcacctcctgtggacattggaggggacccacatttggtcgttactgggcgacgcttcccacactgatcgtctaccggaggccggagctgggaaactcctcagcgaggtgcctgtggcagctgggaaactgcccttcagcagaatgcctatatgcgagcacatggttgagagtccgacatgcagtcagatgagcaacctggtctgcgggacagacggcctgacttacacaaatgaatgtcagttatgcctagccagaatcaagacaaaacaagacatacaaataatgaaggacggaaaatgttag

SEQ ID NO: 180309 - DNA, 402 bp, Artificial Sequence
  derived and/or modified sequence
ggcgcaggccccagccagctcaggctacactatcccaggatcagcatggccgtccgccagtgggtaatcgccctggccttggctgccctccttgttgtggacagggaagtgccagtggcagcaggaaagctccctttctcaagaatgcccatctgtgaacacatggtagagtctccaacctgttcccagatgtccaacctggtctgcggcactgatgggctcacatatacgaatgaatgccagctctgcttggcccggataaaaaccaaacaggacatccagatcatgaaagatggcaaatgctgatcccacaggagcacctcaagccatgaagtgtcagctggagaacagtggtgggcatggagaggatatgacatgaaataaaagatccagcccaactga

SEQ ID NO: 180310 - DNA, 425 bp, Artificial Sequence
  derived and/or modified sequence
atgatcctgggcattgggagctcacctcaccttctctggactctggagggcacacacatatggtccctgctgggggatgcttcgcacacagaccgtcttccagaggcaggggcagggaaactgctgtcagaagtgccagtggcagcaggaaagctccctttctcaagaatgcccatctgtgaacacatggtagagtctccaacctgttcccagatgtccaacctggtctgcggcactgatgggctcacatatacgaatgaatgccagctctgcttggcccggataaaaaccaaacaggacatccagatcatgaaagatggcaaatgctgatcccacaggagcacctcaagccatgaagtgtcagctggagaacagtggtgggcatggagaggatatgacatgaaataaaagatccagcccaactg

SEQ ID NO: 180311 - DNA, 533 bp, Artificial Sequence
  derived and/or modified sequence
ttctgcaaatgggaggtactggaaagaacgtgagggcaggaggagagatatgccagggtatttattgccctagctccccctctgccagaccacaggtagaatagcaagaagtctacatcctgatgatcctgggcattgggagctcacctcaccttctctggactctggagggcacacacatatggtccctgctgggggatgcttcgcacacagaccgtcttccagaggcaggggcagggaaactgctgtcagaagtgccagtggcagcaggaaagctccctttctcaagaatgcccatctgtgaacacatggtagagtctccaacctgttcccagatgtccaacctggtctgcggcactgatgggctcacatatacgaatgaatgccagctctgcttggcccggataaaaaccaaacaggacatccagatcatgaaagatggcaaatgctgatcccacaggagcacctcaagccatgaagtgtcagctggagaacagtggtgggcatggagaggatatgacatgaaataaaag

SEQ ID NO: 180312 - DNA, 261 bp, Artificial Sequence
  derived and/or modified sequence
atggccgtgagacagtgggtgatcgccctggccctggccgccctgctggtggtggacagagaggtgcccgtggccgccggcaagctgcccttcagcagaatgcccatctgcgagcacatggtggagagccccacctgcagccagatgagcaacctggtgtgcggcaccgacggcctgacctacaccaacgagtgccagctgtgcctggccagaatcaagaccaagcaggacatccagatcatgaaggacggcaagtgctag

SEQ ID NO: 180313 - DNA, 330 bp, Artificial Sequence
  derived and/or modified sequence
atgatcctgggcatcggcagcagcccccacctgctgtggaccctggagggcacccacatctggagcctgctgggcgacgccagccacaccgacagactgcccgaggccggcgccggcaagctgctgagcgaggtgcccgtggccgccggcaagctgcccttcagcagaatgcccatctgcgagcacatggtggagagccccacctgcagccagatgagcaacctggtgtgcggcaccgacggcctgacctacaccaacgagtgccagctgtgcctggccagaatcaagaccaagcaggacatccagatcatgaaggacggcaagtgctag

SEQ ID NO: 180314 - protein, 334 aa, Artificial Sequence
  derived and/or modified sequence
MALRWGIVSVGLISSDFTAVLQTLPRSEHQVVAVAARDLSRAKEFAQKHDIPKAYGSYEELAKDPSVEVAYIGTQHPQHKAAVMLCLAAGKAVLCEKPTGVNAAEVREMVAEARSRALFLMEAIWTRFFPASEALRSVLAQGTLGDLRVARAEFGKNLIHVPRAVDRAQAGGALLDIGIYCVQFTSMVFGGQKPEKISVVGRRHETGVDDTVTVLLQYPGEVHGSFTCSITVQLSNTASVSGTKGMVQLLNPCWCPTELVVKGEHKEFPLPPVPKDCNFDNGAGMSYEAKHVWECLRKGMKESPVIPLSESELLADILEEVRKAIGVTFPQDKR

SEQ ID NO: 180315 - DNA, 1081 bp, Artificial Sequence
  derived and/or modified sequence
ctggagggaccgaaggtgccgagggctccgcatcgcaaccatggcgctgcgctggggcatcgtgtctgtcggcctcatctccagcgacttcacagccgtgctgcagacgctgcctcgctctgagcaccaggtggtggcggtggcggcccgcgatctgagccgtgcgaaggagtttgcacagaaacacgacatccccaaggcctacggctcctatgaggagctggccaaggacccgagcgtggaggtggcctacattggcacccagcacccccagcacaaggcggcggtgatgctgtgcttggcggcgggcaaggccgttctgtgcgagaagcccacgggcgtgaacgcggcggaagttcgcgagatggtcgcggaggcccgatcccgagccctcttccttatggaggccatctggacccgcttctttcctgcctccgaggctctgaggtctgttttggcccagggaactctaggagacctccgggtggctcgggcagaatttgggaagaatctcatccacgttccccgggccgtagaccgggcccaggctgggggggccctgctggacatcggcatctactgtgtccagttcacctccatggtctttggagggcagaagccagagaagatttctgtcgtgggaaggcgtcatgaaacaggtgtggatgacactgtcacggtgctcctgcagtacccaggggaggtccatggcagcttcacctgcagcatcaccgtgcagctctccaacacggcctccgtgagcggcaccaagggcatggtacagctcctcaacccctgctggtgcccgaccgagctggtggtgaagggggagcataaggagttcccgctgcccccagtcccaaaggactgcaattttgacaacggggcaggcatgagttatgaggccaagcacgtctgggagtgcctacgcaagggtatgaaggaaagtcctgtgattcccctgtcggaaagtgagctcctggctgacatccttgaagaggtgaggaaggccattggagtcaccttcccccaagacaaacgctgatgtatccccgaataaataaagacatcttacatcttc

SEQ ID NO: 180316 - DNA, 1005 bp, Artificial Sequence
  derived and/or modified sequence
atggccctgaggtggggaatcgtatctgtcggactgatttcctctgactttactgccgtcctccaaacgttacctcgatccgaacatcaagtggtggcggttgcggcacgggacttgagtcgtgccaaggagtttgctcagaagcacgacattccaaaagcatatgggtcttacgaagagctggcgaaggatccttccgtcgaagttgcatacatcggaacacagcatccccagcacaaggctgccgtgatgctctgtctcgctgctggaaaggccgtcctgtgcgagaaacccactggtgtaaacgccgcagaggtgcgagagatggtggctgaggcccggagccgcgctctgttcctgatggaggccatttggaccagattcttccccgcgagcgaggccctgagatccgtgctcgctcagggcaccctgggggacctgcgggtggccagagccgagttcggaaagaacctgattcatgtgccccgtgctgttgatcgtgcccaggcaggcggcgcgcttctggacatcggaatctactgtgtgcagttcactagcatggtgtttgggggccagaagcctgaaaagatctcagtggtcggacggaggcacgagacaggcgtggatgatactgtgaccgtgcttcttcagtacccaggcgaagtacacgggtcatttacatgctctattactgtccagctgtccaacacagcctcagtatcgggtacaaagggaatggtccagctgctgaatccatgttggtgtcctactgaactggtggtcaaaggtgagcacaaagagtttccgctgccccccgtgcctaaggactgtaacttcgataacggcgcaggcatgagttacgaagccaaacatgtgtgggaatgcctgcgcaaaggcatgaaggaaagcccggtaattcccttgagcgaatcagagctattggccgacatcttggaggaagtcaggaaagctattggagtaactttcccccaagataagcgctag

SEQ ID NO: 180317 - DNA, 1005 bp, Artificial Sequence
  derived and/or modified sequence
atggccctgcgctggggcatcgtgtctgtgggcctcatcagcagtgacttcaccgctgtgctgcagaccctgcccaggtctgagcaccaggtggtggccgtggccgcccgggacctgagccgggccaaggagtttgcccagaagcatgacatccccaaggcctacggcagctatgaggagctggccaaggaccccagcgtggaggtggcctacatcggcacccagcacccccagcacaaggctgctgtgatgctgtgcctggccgccggcaaggctgtgctgtgtgagaagcccactggagtgaatgctgctgaggtgcgggagatggtggccgaggcccggagccgggccctcttcctgatggaggccatctggacccgcttcttccctgccagcgaggccctgcggtctgtgctggcccagggcaccctgggggacctgcgggtggcccgggcagagtttgggaagaacctgatccacgtgcccagggctgtggaccgggcccaggccggcggggccctgctggacatcggcatctactgtgtgcagttcacctccatggtgtttggaggccagaagccagagaagatctctgtggtgggcagaagacatgagaccggggtggatgacacagtgacagtgctgctgcagtacccaggagaggtgcacggcagcttcacctgcagcatcaccgtgcagctgagcaacacagcctctgtgtctggcaccaagggcatggtgcagctgctgaacccctgctggtgccccacagagctggtggtgaagggggagcacaaggagttccccctgccccctgtgcccaaggactgcaactttgacaatggagctggcatgtcctatgaggccaagcacgtgtgggagtgcctgaggaagggcatgaaggagagccctgtgatccccctgtctgagagcgagctgctggccgacatcctggaggaggtgaggaaggccatcggcgtgaccttcccccaggacaagaggtag

SEQ ID NO: 180318 - DNA, 1005 bp, Artificial Sequence
  derived and/or modified sequence
atggccctgcggtggggcatcgtgagcgtgggcctgatcagcagcgacttcacagccgtcctacaaactcttcctcgctcggagcaccaggtggtcgcggtggctgcacgggatctttcaagagcgaaagagtttgcccagaagcatgatatccccaaggcctatggatcctatgaggagctggccaaggatccttccgtggaggtggcttatatcggcacacaacacccgcagcataaagctgcagtgatgttatgccttgccgctgggaaagctgtgctgtgcgagaaaccaaccggagtcaatgcagcggaggtgcgtgagatggtagctgaggcccgcagtagggctctattcctgatggaggctatatggactcgatttttcccagcttctgaggcactgcgttctgtgctggcccagggtacacttggggacttgagggtcgcccgcgccgaatttggaaaaaatctcattcatgtgcctagggccgtggaccgggcccaagcaggcggggccttattagacatcggaatttactgcgtgcagttcactagcatggtttttggtggacagaaaccagagaagatctcagtggtcggccggcggcacgaaacaggcgtcgacgataccgtgactgtgctgctccagtatccaggtgaggtgcatgggtccttcacatgttccatcactgtacaactaagcaacactgcgtcagtgagcggcacaaagggcatggtccagctgctcaatccctgttggtgtcccacggagctggtcgttaagggagagcataaagaattccctctccctcctgtgcctaaagattgtaacttcgacaatggcgctgggatgtcctatgaagctaagcatgtgtgggaatgtctcaggaaaggtatgaaagaatcacccgtgatccctctttccgagagtgaactattggccgatatcctggaagaagtcaggaaagctatcggagtgactttccctcaggataagcggtag

SEQ ID NO: 180319 - DNA, 1005 bp, Artificial Sequence
  derived and/or modified sequence
atggccctgcggtggggcatcgtgtccgtgggactgataagttctgactttaccgctgtactacagaccctccctaggagcgaacatcaggttgtggctgttgctgcccgagacttgtctcgcgcaaaagagttcgcccagaagcacgatatccctaaggcttatggtagctatgaagagctggccaaggatccaagcgtggaagtcgcttacataggcacacaacatccacagcacaaagccgctgtgatgctctgcttggctgccggaaaggccgtactgtgtgagaagcccaccggtgttaatgcagctgaagtgagagagatggtggctgaggctagatcacgcgcactgtttctgatggaggccatttggaccagattttttcctgctagtgaggccctgagatctgttctcgcccagggcaccctgggtgacctgcgggtggcccgagctgagttcggtaagaacctgatccacgtcccgagggccgtcgatcgtgctcaggccggtggagctctccttgatatcggcatttactgtgtgcaattcaccagcatggtcttcggaggccagaagcctgaaaagatctctgtcgtagggagacgccatgagacgggggtcgatgacaccgtcaccgtgcttctccagtacccaggtgaggtgcatgggtcgtttacttgctcaataacagtacagctgtccaacactgccagcgtctcaggaaccaagggcatggtgcagctgctgaacccgtgctggtgtccaactgaactggtcgtcaaaggcgaacataaagagtttcccctgccaccggttcctaaagattgtaattttgacaacggggcaggcatgagttacgaagcaaaacatgtgtgggagtgcctcaggaaagggatgaaggagagtcccgtgatcccactctcagagagtgaactattagccgatatcctggaggaggtgcgcaaagcaattggggtgacctttccccaggacaaaagatag

SEQ ID NO: 180320 - DNA, 1005 bp, Artificial Sequence
  derived and/or modified sequence
atggccctgagatggggcatcgtgagcgtgggcctgatcagcagcgacttcaccgccgtgctgcagaccctgcccagaagcgagcaccaggtggtggccgtggccgccagagacctgagcagagccaaggagttcgcccagaagcacgacatccccaaggcctacggcagctacgaggagctggccaaggaccccagcgtggaggtggcctacatcggcacccagcacccccagcacaaggccgccgtgatgctgtgcctggccgccggcaaggccgtgctgtgcgagaagcccaccggcgtgaacgccgccgaggtgagagagatggtggccgaggccagaagcagagccctgttcctgatggaggccatctggaccagattcttccccgccagcgaggccctgagaagcgtgctggcccagggcaccctgggcgacctgagagtggccagagccgagttcggcaagaacctgatccacgtgcccagagccgtggacagagcccaggccggcggcgccctgctggacatcggcatctactgcgtgcagttcaccagcatggtgttcggcggccagaagcccgagaagatcagcgtggtgggcagaagacacgagaccggcgtggacgacaccgtgaccgtgctgctgcagtaccccggcgaggtgcacggcagcttcacctgcagcatcaccgtgcagctgagcaacaccgccagcgtgagcggcaccaagggcatggtgcagctgctgaacccctgctggtgccccaccgagctggtggtgaagggcgagcacaaggagttccccctgccccccgtgcccaaggactgcaacttcgacaacggcgccggcatgagctacgaggccaagcacgtgtgggagtgcctgagaaagggcatgaaggagagccccgtgatccccctgagcgagagcgagctgctggccgacatcctggaggaggtgagaaaggccatcggcgtgaccttcccccaggacaagagatag

SEQ ID NO: 180321 - protein, 364 aa, Artificial Sequence
  derived and/or modified sequence
MPQTVILPGPAPWGFRLSGGIDFNQPLVITRITPGSKAAAANLCPGDVILAIDGFGTESMTHADAQDRIKAAAHQLCLKIDRGETHLWSPQVSEDGKAHPFKINLESEPQDGNYFEHKHNIRPKPFVIPGRSSGCSTPSGIDCGSGRSTPSSVSTVSTICPGDLKVAAKLAPNIPLEMELPGVKIVHAQFNTPMQLYSDDNIMETLQGQVSTALGETPLMSEPTASVPPESDVYRMLHDNRNEPTQPRQSGSFRVLQGMVDDGSDDRPAGTRSVRAPVTKVHGGSGGAQRMPLCDKCGSGIVGAVVKARDKYRHPECFVCADCNLNLKQKGYFFIEGELYCETHARARTKPPEGYDTVTLYPKA

SEQ ID NO: 180322 - DNA, 1095 bp, Artificial Sequence
  derived and/or modified sequence
atgccacagactgtgatactaccaggaccggcaccctggggcttccgattgtcaggcggtatagacttcaatcagccccttgtgattacccgaatcacccctggctccaaagctgctgctgccaatctgtgtcccggagatgtcattctggccattgacggcttcgggacagagtccatgacgcatgccgacgcccaggacagaatcaaggcggccgcacatcagctgtgcctgaagatagaccggggggagacgcacctgtggtctccccaggtcagtgaagacggcaaagctcatccatttaagataaacctggagagtgagccccaggatgggaactattttgaacataagcacaacattcgacccaagccattcgtgatcccgggtaggtcatctggctgcagcactcctagcggcattgattgcgggagtggccgtagtaccccctctagtgttagcacagtgtctacaatttgccctggagacttgaaagtggccgccaagttggcaccaaacatccctctggaaatggagctgccgggggtcaaaattgtccacgcacagttcaacacccccatgcagttgtatagtgacgacaatatcatggagacactgcaggggcaggtctctacagctctgggagagacccccctgatgtctgaacctacggcctccgtgccacccgagtcagatgtctataggatgttgcatgacaatagaaatgagcccacacagcccagacaatcaggcagtttccgggtgctacaaggaatggtggacgatggttccgacgatagacctgccggaactaggtccgtgagggctccagtgactaaggtgcatggaggttcaggcggtgcccaaaggatgcctctgtgcgacaaatgcggtagcggtatcgtaggcgcagttgtgaaggcccgagacaaatatcgacacccagaatgcttcgtgtgcgcggactgtaatctcaacctgaagcaaaagggttacttcttcattgagggagaactctactgcgaaacacacgcccgtgctaggaccaaaccacctgaaggatacgatactgtgactctctaccccaaggcttag

SEQ ID NO: 180323 - DNA, 1095 bp, Artificial Sequence
  derived and/or modified sequence
atgccccagaccgtcatcctgcccggccctgccccctggggcttccggctgagcggcggcatcgacttcaaccagcccctggtgatcacccgcatcaccccaggcagcaaggctgctgctgccaacctgtgccctggagatgtgatcctggccattgatggctttggaacagagagcatgacccatgctgatgcccaggaccgcatcaaggccgccgcccaccagctgtgcctgaagattgacagaggagagacccacctgtggagcccccaggtgtctgaagatggcaaggcccaccccttcaagatcaacctggagagcgagccccaggacggcaactactttgagcacaagcacaacatccggcccaagcccttcgtcatccctggccgcagcagcggctgcagcaccccatctggaattgactgtggcagcggccgcagcacccccagctctgtgtccacagtgtccaccatctgccctggggacctgaaggtggccgccaagctggcccccaacatccccctggagatggagctgcccggggtgaagatcgtgcacgcccagttcaacacccccatgcagctgtacagtgatgacaacatcatggagaccctgcagggccaggtgtccacagccctgggggagacccccctgatgtctgagcccacagcctctgtgcccccagagagtgatgtgtacaggatgctgcatgacaacagaaatgagcccacccagccccggcagagcggcagcttccgggtgctgcagggcatggtggatgatggcagtgatgacaggcctgctggcaccaggtctgtgcgggcccctgtgaccaaggtgcacggcggcagcggcggggcccagaggatgcccctgtgtgacaagtgtggcagcggcatcgtgggcgctgtggtgaaggcccgggacaagtaccgccaccctgagtgctttgtgtgtgccgactgcaacctgaacctgaagcagaagggctacttcttcattgaaggagagctgtactgtgagacccacgcccgggcccggaccaagcccccagagggctatgacacagtgaccctgtaccccaaggcctag

SEQ ID NO: 180324 - DNA, 1095 bp, Artificial Sequence
  derived and/or modified sequence
atgccccagaccgtgatcctgcccggccccgccccctggggcttccgactttcaggcggtatcgattttaatcagccgctggttatcactagaattacacctggttcgaaagcagctgctgccaatctgtgccccggggacgtaatccttgccatagacgggttcggcaccgagtccatgactcacgccgacgctcaggatagaattaaggctgctgcacaccaactatgcctgaaaatcgataggggcgagacacatctgtggtcaccacaggtaagcgaagatggaaaggcgcatccctttaagataaacctagagtccgaaccacaggatgggaactactttgagcacaaacataacatacgcccaaaacctttcgttatccctggcaggtcctctggctgtagcacaccctcaggcatcgattgtggcagtgggcggagcactccctccagcgtctccaccgtctcgaccatctgtcccggggatcttaaagtggccgcgaaactggcaccaaacattcccctggaaatggaactccccggagtgaagatcgtgcatgctcaatttaatacccccatgcagttgtactcagatgacaatatcatggaaacgctgcagggccaggtgtctaccgcactcggtgagacccctcttatgtctgaacctactgcttctgtgcctccagagtccgatgtgtatcggatgctacatgataacagaaatgaacctacgcagccccggcaaagtggctctttccgggtcttgcaaggaatggtggatgatggaagcgatgaccgcccagctgggactcgaagtgttcgggcccctgtgaccaaggtgcatggaggatcaggaggcgctcagaggatgcccctgtgcgacaagtgtggatccggcattgttggcgcagtcgttaaggcacgagacaagtatcggcatccggagtgttttgtgtgcgctgactgtaacctgaacctcaaacagaaggggtactttttcatcgagggggaactgtactgcgagacccatgcgcgtgcccggacaaaacccccggaggggtatgacacagtcaccttgtatccaaaagcatag

SEQ ID NO: 180325 - DNA, 1095 bp, Artificial Sequence
  derived and/or modified sequence
atgccccagaccgtgattcttccagggccagcgccatgggggtttcgactgagcggaggtattgacttcaatcagcccttggtgataacacggatcacaccaggatctaaggcagccgctgcgaatctgtgtcctggtgatgtgatcttggctatagatggatttggaactgaatccatgacacacgccgacgcccaggacaggatcaaggccgctgcacatcaactctgcctgaaaatcgataggggcgagacacacctgtggagcccacaagtctcagaagacggcaaggctcatcctttcaagattaaccttgaatcagaaccccaagacggaaattactttgaacacaagcacaacatcaggccaaagccattcgtgattcccggtcggtcctctgggtgctctacccccagcggaatcgattgcggaagtggcaggtccacgccgtcatccgtgagtactgtgagtactatttgtcctggcgatctaaaggtagctgccaaactggcgcctaacattccactagaaatggagctgccgggtgttaagatagtgcacgcccaattcaataccccgatgcagctgtacagcgacgataacatcatggaaaccctgcaggggcaggtaagtactgcgctgggggagacccccctgatgtccgagcctaccgcctccgtgccccctgaatcagacgtataccgcatgctccatgacaaccgaaacgaaccgacccaaccacgacagagtggctccttccgcgtgctgcagggcatggtggacgatgggagtgacgaccggcctgctgggactaggagtgtgcgagcccctgtgactaaagttcacggcggtagcggaggcgctcagaggatgccactctgcgataaatgcgggtctggtatcgtaggggcagtcgtgaaggcccgtgataagtataggcatcctgaatgttttgtgtgcgccgactgtaatttaaatctcaaacagaagggctacttcttcattgagggggaactgtactgcgagactcacgcacgagccaggacgaaaccacccgaaggatacgataccgtcacattgtatcccaaggcatag

SEQ ID NO: 180326 - DNA, 1888 bp, Artificial Sequence
  derived and/or modified sequence
gccgcccggcgcggagtggctgccctgcgcggggacacttagagcccggtgggcgggaggaaggcggcatgccccagacggtgatcctcccgggccctgcgccctggggcttcaggctctcagggggcatagacttcaaccagcctttggtcatcaccaggattacaccaggaagcaaggcggcagctgccaacctgtgtcctggagatgtcatcctggctattgacggctttgggacagagtccatgactcatgctgatgcgcaggacaggattaaagcagcagctcaccagctgtgtctcaaaattgacaggggagaaactcacttatggtctccacaagtatctgaagatgggaaagcccatcctttcaaaatcaacttagaatcagaaccacaggaattcaaacccattggtaccgcgcacaacagaagggcccagccttttgttgcagctgcaaacattgatgacaaaagacaggtagtgagcgcttcctataactcgccaattgggctctattcaactagcaatatacaagatgcgcttcacggacagctgcggggtctcattcctagctcacctcaaaagacgggaactactttgaacacaagcataatattcggcccaaacctttcgtgatcccgggccgaagcagtggatgcagcactccctccgggattgactgtggcagtggacgcagcaccccttcttctgtcagtactgttagtaccatttgcccaggtgacttgaaagttgcggctaagctggcccctaacattcctttggaaatggaacttcctggtgtgaagattgtacatgctcagtttaatacacctatgcagttgtactcagatgacaatattatggaaacactccagggtcaggtttcaacagccctaggggaaacacctttgatgagcgagcccacagcctcggtgccccccgagtcggacgtgtaccggatgctccacgacaatcggaatgagcccacacagcctcgccagtcgggctccttcagagtgctccagggaatggtggacgatggctctgatgaccgtccggctggaacgcggagtgtgagagctccggtgacgaaagtccatggcggttcaggcggggcacagaggatgccgctctgtgacaaatgtgggagtggcatagtcggtgctgtggtgaaggcgcgggataagtaccggcaccctgagtgcttcgtgtgtgccgactgcaacctcaacctcaagcaaaagggctacttcttcatagaaggggagctgtactgcgaaacccacgcaagagcccgcacaaagcccccagagggctatgacacggtcactctgtatcccaaagcttaagtctctgcaggcgtggcacgcacgcacgcacccacccacgcgcacttacacgagaagacattcatggctttgggcagaaggattgtgcagattgtcaactccaaatctaaagtcaaggctttagacctttatcctattgtttattgaggaaaaggaatgggaggcaaatgcctgctatgtgaaaaaaacatacacttagctatgttttgcaactctttttggggctagcaataatgatatttaaagcaataattttttgtatgtcatactccacaatttacatgtatattacagccatcaaacacataaacatcaagatatttgaaggactctaattgtctttccttgacaagttgattttgcaattgtggtaaatagcaaataacaatcttgtattctaacataatctgcagttgtctgtatgtgttttaactattacagtgcatgttagggagaaattccctgaatttctttagttttgtattcaaacaattatgccactcgatgcaacaaacataataaatacataaaagattt

SEQ ID NO: 180327 - DNA, 1714 bp, Artificial Sequence
  derived and/or modified sequence
caggacgccgcccggcgcggagtggctgccctgcgcggggacacttagagcccggtgggcgggaggaaggcggcatgccccagacggtgatcctcccgggccctgcgccctggggcttcaggctctcagggggcatagacttcaaccagcctttggtcatcaccaggattacaccaggaagcaaggcggcagctgccaacctgtgtcctggagatgtcatcctggctattgacggctttgggacagagtccatgactcatgctgatgcgcaggacaggattaaagcagcagctcaccagctgtgtctcaaaattgacaggggagaaactcacttatggtctccacaagtatctgaagatgggaaagcccatcctttcaaaatcaacttagaatcagaaccacaggacgggaactactttgaacacaagcataatattcggcccaaacctttcgtgatcccgggccgaagcagtggatgcagcactccctccgggattgactgtggcagtggacgcagcaccccttcttctgtcagtactgttagtaccatttgcccaggtgacttgaaagttgcggctaagctggcccctaacattcctttggaaatggaacttcctggtgtgaagattgtacatgctcagtttaatacacctatgcagttgtactcagatgacaatattatggaaacactccagggtcaggtttcaacagccctaggggaaacacctttgatgagcgagcccacagcctcggtgccccccgagtcggacgtgtaccggatgctccacgacaatcggaatgagcccacacagcctcgccagtcgggctccttcagagtgctccagggaatggtggacgatggctctgatgaccgtccggctggaacgcggagtgtgagagctccggtgacgaaagtccatggcggttcaggcggggcacagaggatgccgctctgtgacaaatgtgggagtggcatagtcggtgctgtggtgaaggcgcgggataagtaccggcaccctgagtgcttcgtgtgtgccgactgcaacctcaacctcaagcaaaagggctacttcttcatagaaggggagctgtactgcgaaacccacgcaagagcccgcacaaagcccccagagggctatgacacggtcactctgtatcccaaagcttaagtctctgcaggcgtggcacgcacgcacgcacccacccacgcgcacttacacgagaagacattcatggctttgggcagaaggattgtgcagattgtcaactccaaatctaaagtcaaggctttagacctttatcctattgtttattgaggaaaaggaatgggaggcaaatgcctgctatgtgaaaaaaacatacacttagctatgttttgcaactctttttggggctagcaataatgatatttaaagcaataattttttgtatgtcatactccacaatttacatgtatattacagccatcaaacacataaacatcaagatatttgaaggactctaattgtctttccttgacaagttgattttgcaattgtggtaaatagcaaataacaatcttgtattctaacataatctgcagttgtctgtatgtgttttaactattacagtgcatgttagggagaaattccctgaatttctttagttttgtattcaaacaattatgccactcgatgcaacaaacataataaatacataaaagatttaaaaaata

SEQ ID NO: 180328 - DNA, 1095 bp, Artificial Sequence
  derived and/or modified sequence
atgccccagaccgtgatcctgcccggccccgccccctggggcttcagactgagcggcggcatcgacttcaaccagcccctggtgatcaccagaatcacccccggcagcaaggccgccgccgccaacctgtgccccggcgacgtgatcctggccatcgacggcttcggcaccgagagcatgacccacgccgacgcccaggacagaatcaaggccgccgcccaccagctgtgcctgaagatcgacagaggcgagacccacctgtggagcccccaggtgagcgaggacggcaaggcccaccccttcaagatcaacctggagagcgagccccaggacggcaactacttcgagcacaagcacaacatcagacccaagcccttcgtgatccccggcagaagcagcggctgcagcacccccagcggcatcgactgcggcagcggcagaagcacccccagcagcgtgagcaccgtgagcaccatctgccccggcgacctgaaggtggccgccaagctggcccccaacatccccctggagatggagctgcccggcgtgaagatcgtgcacgcccagttcaacacccccatgcagctgtacagcgacgacaacatcatggagaccctgcagggccaggtgagcaccgccctgggcgagacccccctgatgagcgagcccaccgccagcgtgccccccgagagcgacgtgtacagaatgctgcacgacaacagaaacgagcccacccagcccagacagagcggcagcttcagagtgctgcagggcatggtggacgacggcagcgacgacagacccgccggcaccagaagcgtgagagcccccgtgaccaaggtgcacggcggcagcggcggcgcccagagaatgcccctgtgcgacaagtgcggcagcggcatcgtgggcgccgtggtgaaggccagagacaagtacagacaccccgagtgcttcgtgtgcgccgactgcaacctgaacctgaagcagaagggctacttcttcatcgagggcgagctgtactgcgagacccacgccagagccagaaccaagccccccgagggctacgacaccgtgaccctgtaccccaaggcctag

SEQ ID NO: 180329 - protein, 148 aa, Artificial Sequence
  derived and/or modified sequence
MEVKDANSALLSNYEVFQLLTDLKEQRKESGKNKHSSGQQNLNTITYETLKYISKTPCRHQSPEIVREFLTALKSHKLTKAEKLQLLNHRPVTAVEIQLMVEESEERLTEEQIEALLHTVTSILPAEPEAEQKKNTNSNVAMDEEDPA

SEQ ID NO: 180330 - DNA, 447 bp, Artificial Sequence
  derived and/or modified sequence
atggaggtgaaggacgccaacagcgccctgctgagcaactacgaggtgttccagctgctgaccgacctgaaggagcagagaaaggagagcggcaagaacaagcacagcagcggccagcagaacctgaacaccatcacctacgagaccctgaagtacatcagcaagaccccctgcagacaccagagccccgagatcgtgagagagttcctgaccgccctgaagagccacaagctgaccaaggccgagaagctgcagctgctgaaccacagacccgtgaccgccgtggagatccagctgatggtggaggagagcgaggagagactgaccgaggagcagatcgaggccctgctgcacaccgtgaccagcatcctgcccgccgagcccgaggccgagcagaagaagaacaccaacagcaacgtggccatggacgaggaggaccccgcctag

SEQ ID NO: 180331 - DNA, 447 bp, Artificial Sequence
  derived and/or modified sequence
atggaggtcaaggatgccaatagcgccctcctgagcaattacgaagtattccagctgcttactgacttgaaggagcagcgaaaggagtccggcaagaataaacattcctccggccagcagaatctcaacaccataacctacgaaacactcaaatatatcagcaaaaccccctgtaggcaccagagtcctgagatcgttagggagtttttaacagccttgaagagccacaagcttacgaaggccgagaagctccagctgctaaaccatcgtcccgttactgccgtggaaatccaactcatggttgaggaatccgaggaacgactgacggaggagcagatcgaagcattgcttcacacagtgaccagcattctcccagctgagccagaagccgaacagaaaaaaaacactaacagtaatgttgcgatggatgaggaagaccctgcttag

SEQ ID NO: 180332 - DNA, 447 bp, Artificial Sequence
  derived and/or modified sequence
atggaggtgaaggatgccaacagcgccctgctgagcaactatgaggtgttccagctgctgacagacctgaaggagcagaggaaggagagcggcaagaacaagcacagcagcggccagcagaacctgaacaccatcacctatgagaccctgaagtacatcagcaagaccccctgccgccaccagagccctgagatcgtgcgggagttcctgacagccctgaagagccacaagctgaccaaggccgagaagctgcagctgctgaaccacaggcctgtgacagctgtggagatccagctgatggtggaggagagcgaggagcggctgacagaggagcagatcgaggccctgctgcacacagtgaccagcatcctgcctgctgagcctgaggccgagcagaagaagaacaccaacagcaatgtggccatggatgaagaagatcctgcctag

SEQ ID NO: 180333 - DNA, 447 bp, Artificial Sequence
  derived and/or modified sequence
atggaggtgaaggacgccaacagcgccctgctgagcaactacgaggtgtttcagttgctgacagacctcaaagagcagagaaaagagagcggtaaaaacaaacattcatccggccagcagaatctgaatactataacttacgagacactaaaatatatttccaaaacaccttgcaggcaccagtcaccagaaattgtacgagagtttctgactgcccttaagagtcacaaactgacgaaagcagaaaagctacagttgctgaatcaccgtccggtcactgccgtggaaattcaactcatggtcgaggagtccgaggagcgcctcacagaggagcagatcgaggctctcctgcacacggtgacttcaatcctgccagcggaacctgaagccgagcaaaagaaaaacaccaactctaatgtggcaatggacgaggaggatcctgcttag

SEQ ID NO: 180334 - DNA, 447 bp, Artificial Sequence
  derived and/or modified sequence
atggaagtaaaggatgccaattccgccctactaagtaactatgaggtctttcagttactcaccgacttaaaagagcagaggaaagaatcaggcaagaataaacattcctcgggacaacaaaacctcaacacgatcacctatgagaccctgaagtacattagtaagacaccttgcaggcaccagtctcctgaaatcgttcgggaatttctcactgcgctcaagtcacataaattgaccaaagcagagaaacttcaactgctgaatcacaggcccgtcacagccgtcgagatacagcttatggtggaggagtcggaggagagactaactgaagagcaaatcgaagcgctgttgcatacggtgacaagcatcctgccagcggaacctgaggccgaacaaaaaaaaaataccaacagcaatgtggccatggatgaggaagatcccgcatag

SEQ ID NO: 180335 - DNA, 3009 bp, Artificial Sequence
  derived and/or modified sequence
gttgcagtaagccgagatccagcctgggcgacagagcgagactccgtctcaaaaaaaaaaaaaggttaaagaaaaaaagaaaagaaaacacaagataatcctgtccgcaaacgcttagcagtcttaaatcggcctggtggaaggatgcagggacactcccccaccctgccccccgaaaaaggggaacgcgcagcgcgaggttccgggtccgccaagctcccggcatgcagcgcggcgatcccggcgagcaccttggcgcgcggagctggcaccttggcgctgttggtggcggcggagacagctgtgaagtgtgaggttctttgtctgctggcagctaggggcgacgaggcgggacgtcatggaagtgaaggatgccaattctgcgcttctcagtaactacgaggtatttcagttactaactgatctgaaagagcagcgtaaagaaagtggaaagaataaacacagctctgggcaacagaacttgaacactatcacctatgaaacgttaaaatacatatcaaaaacaccatgcaggcaccagagtcctgaaattgtcagagaatttctcacagcattgaaaagccacaagttgaccaaagctgagaagctccagctgctgaaccaccggcctgtgactgctgtggagatccagctgatggtggaagagagtgaagagcggctcacggaggagcagattgaagctcttctccacaccgtcaccagcattctgcctgcagagccagaggctgagcagaagaagaatacaaacagcaatgtggcaatggacgaagaggacccagcatagaagagcacagctggccccggcgtttcatgaagtcagaaggcctggcagccatttcctggacgttgagaggattgtttatttgatttttatcctcatcccagcaggcctggctttgtggttagttgggtacatcacaaaaataagttaaaaagaaatatttgtgccttggggagaagaaacatggtgaaaacaggctgaggttgtcagggcagagagctgaaggtggggacagtgaccgcggacccctctgtgcttgaaagatttcctccacggcctttgccccagttgtggggaggtctctgtgcacagcggggaaaatgcttgtgtcgcctttggtgggccatgtcctaattagtttcatctgcttccctgggaacttactaaggggcccagagcactgttggaagtctggttagagtccccagagagttactctaagttaaaatgagccactgaccttggctcaccttagaggaatttcctcgagaacaacagagataagaaaagaaccggcctggccaatccttcaacagctctagagccccttttctctgctggcaggggctttgtttaccagctcactgtttaggctaaatgttagggaccagatcactgcagttgaaaacgggcactccaggcttagtgacagtggcagcagaaacagtgttggctgcctttctgaccaccccactttcctgccctgagacagcagcccagggcaggtgcttcatattcagaccaggtaagcctcatttgcacaacagtcaaattgtttgttcctttaaaaaggacacaattagcctggcacggtgactcatgcttgtaatcccagcactttgggagggcaaggcaggcggatcacctgaggtcaggagtttgagaccagcctcaccaacatggaaaaaccccatctctactaaaaaaatacaaaattaaccaggggtgatggcacattcctgtaatcccagctactcgggaggccgaggcaggagaatcgcttgaacccgggaggcagaggttgaggtgagccaagattgcaccattgcactccagcctgggcaacaagagcaaaacttcatctaaaaaacagaaaatattaagatgattaccatgtgaaaacctttttaatattcaggatttggaaagtatagttgccccaggcatgtggttgttgccttaggtcctgcgaatattgctgaaaatcggattttccacattcactttcttccctgttttagggaagaaaatgatcatagacattcgattttccaaattggcgctcttattttcaatgctaattggattacttctcttccaaccctcctgcccgtccatccatcccagtccccaggcatcttaaccttaccatctgagcttcagctgaaatctgtttataggcaacattgaaagtaccagattggggccaggtgtagcggcccacacctgtaatcccagcactttgggaggcggaggctagcggatcatgaggtcaggagttcaagaccagcctggccaacatggtgaaacccccatctctactaaagatataaaaaactagccgagcgtggtgttgcatgcctgtgatcccagctactcgggaggctgaggcgggggaatcgcttgaaccggggaggcagaggttgcagtgagccagatcgtgcattgcactccagcctggccgacagggtgagactccatctcaaaaaagagaaagtaccagattgtacttttaaatctgtctagcgtattgagaattttagtgggagctgttgatttatttctcagggcatacatgtgccaatctgtctcattgttgtctctctcttttttttttttttttttgagacagtctcgctgtgttgcccaggagtgcagtggcacgatctctgctcactgcaacctctgcctcccagattcaagcgattctggtgccttagcctcctgagtagctgggacttacaggcacgtaccactataccctgctaaaatttgtatttttagtagagacagggttttgccatattggccaggctagtcgtaatgtctctttttaacactgaatatgttaggtggtttttcttgatggatttagggttaacctagttaataataaattgtttccaggtaattatcaagttttgtcattttataaatctgaagagttaatattgtcatcgatacaaataaagtgaaatctgactgag

SEQ ID NO: 180336 - protein, 391 aa, Artificial Sequence
  derived and/or modified sequence
MILNGEEIILSLQKTKHLLGPDYTETLYSPRGEEITTKPENMEHCYYKGNILNEKNSVASISTCDGLRGYFTHHHQRYQIKPLKSTDEKEHAVFTSNQEEQDPANHTCGVKSTDGKQGPIRISRSLKSPEKEDFLRAQKYIDLYLVLDNAFYKNYNENLTLIRSFVFDVMNLLNVIYNTIDVQVALVGMEIWSDGDKIKVVPSASTTFDNFLRWHSSNLGKKIHDHAQLLSGISFNNRRVGLAASNSLCSPSSVAVIEAKKKNNVALVGVMSHELGHVLGMPDVPFNTKCPSGSCVMNQYLSSKFPKDFSTSCRAHFERYLLSQKPKCLLQAPIPTNIMTTPVCGNHLLEVGEDCDCGSPKECTNLCCEALTCKLKPGTDCGGDAPNHTTE

SEQ ID NO: 180337 - protein, 470 aa, Artificial Sequence
  derived and/or modified sequence
MLRGISQLPAVATMSWVLLPVLWLIVQTQAIAIKQTPELTLHEIVCPKKLHILHKREIKNNQTEKHGKEERYEPEVQYQMILNGEEIILSLQKTKHLLGPDYTETLYSPRGEEITTKPENMEHCYYKGNILNEKNSVASISTCDGLRGYFTHHHQRYQIKPLKSTDEKEHAVFTSNQEEQDPANHTCGVKSTDGKQGPIRISRSLKSPEKEDFLRAQKYIDLYLVLDNAFYKNYNENLTLIRSFVFDVMNLLNVIYNTIDVQVALVGMEIWSDGDKIKVVPSASTTFDNFLRWHSSNLGKKIHDHAQLLSGISFNNRRVGLAASNSLCSPSSVAVIEAKKKNNVALVGVMSHELGHVLGMPDVPFNTKCPSGSCVMNQYLSSKFPKDFSTSCRAHFERYLLSQKPKCLLQAPIPTNIMTTPVCGNHLLEVGEDCDCGSPKECTNLCCEALTCKLKPGTDCGGDAPNHTTE

SEQ ID NO: 180338 - DNA, 2044 bp, Artificial Sequence
  derived and/or modified sequence
aagataaaactggacactggggagaccacaacttcatgctgcgtgggatctcccagctacctgcagtggccaccatgtcttgggtcctgctgcctgtactttggctcattgttcaaactcaaggaaaggtatgaacctgaagttcaatatcagatgatcttaaatggagaagaaatcattctctccctacaaaaaaccaagcacctcctggggccagactacactgaaacattgtactcacccagaggagaggaaattaccacgaaacctgagaacatggaacactgttactataaaggaaacatcctaaatgaaaagaattctgttgccagcatcagtacttgtgacgggttgagaggatacttcacacatcatcaccaaagataccagataaaacctctgaaaagcacagacgagaaagaacatgccgtctttacatctaaccaggaggaacaagacccagctaaccacacatgtggtgtgaagagcactgacgggaaacaaggcccaattcgaatctctagatcactcaaaagcccagagaaagaagactttcttcgggcacagaaatacattgatctctatttggtgctggataatgccttttataagaactataatgagaatctaactctgataagaagctttgtgtttgatgtgatgaacctactcaatgtgatatataacaccatagatgttcaagtggccttggtaggtatggaaatctggtctgatggggataagataaaggtggtgcccagcgcaagcaccacgtttgacaacttcctgagatggcacagttctaacctggggaaaaagatccacgaccatgctcagcttctcagcgggattagcttcaacaatcgacgtgtgggactggcagcttcaaattccttgtgttccccatcttcggttgctgttattgaggctaaaaaaaagaataatgtggctcttgtaggagtgatgtcacatgagctgggccatgtccttggtatgcctgatgttccattcaacaccaagtgtccctctggcagttgtgtgatgaatcagtatctgagttcaaaattcccaaaggatttcagtacatcttgccgtgcacattttgaaagataccttttatctcagaaaccaaagtgcctgctgcaagcacctattcctacaaatataatgacaacaccagtgtgtgggaaccaccttctagaagtgggagaagactgtgattgtggctctcctaaggagtgtaccaatctctgctgtgaagccctaacgtgtaaactgaagcctggaactgattgcggaggagatgctccaaaccataccacagagtgaatccaaaagtctgcttcactgagatgctaccttgccaggacaagaaccaagaactctaactgtcccaggaatcttgtgaattttcacccataatggtctttcacttgtcattctactttctatattgttatcagtccaggaaacaggtaaacagatgtaattagagacattggctctttgtttaggcctaatctttctttttacttttttttttcttttttctttttttttaaagatcatgaatttgtgacttagttctgccctttggagaacaaaagaaagcagtcttccatcaaatcaccttaaaatgcacggctaaactattcagagttaacactccagaattgttaaattacaagtactatgctttaatgcttctttcatcttactagtatggcctataaaaaaaataataccacttgatgggtgaaggctttggcaatagaaagaagaatagaattcaggttttatgttattcctctgtgttcacttcgccttgctcttgaaagtgcagtatttttctacatcatgtcaagaatgattcaatgtaaatatttttcattttatcatgtatatcctatacacacatctccttcatcatcatatatgaagtttattttgagaagtctacattgcttacattttaattgagccagcaaagaaggcttaatgatttattgaaccataatgtcaataaaaacacaacttttgaggc

SEQ ID NO: 180339 - DNA, 2348 bp, Artificial Sequence
  derived and/or modified sequence
agatgtgagtcctcaatgagctataaccacagccataaatatctctcaaagatgaggaacattctcatgatgttgacactgcaattttttgacaatttcccaacactcttaagaaacattccccaatctcacacgaaaagtgggggttttaattttcttgttcaacttctaaagagaaattggagaagataaaactggacactggggagaccacaacttcatgctgcgtgggatctcccagctacctgcagtggccaccatgtcttgggtcctgctgcctgtactttggctcattgttcaaactcaagcaatagccataaagcaaacacctgaattaacgctccatgaaatagtttgtcctaaaaaacttcacattttacacaaaagagagatcaagaacaaccagacagaaaagcatggcaaagaggaaaggtatgaacctgaagttcaatatcagatgatcttaaatggagaagaaatcattctctccctacaaaaaaccaagcacctcctggggccagactacactgaaacattgtactcacccagaggagaggaaattaccacgaaacctgagaacatggaacactgttactataaaggaaacatcctaaatgaaaagaattctgttgccagcatcagtacttgtgacgggttgagaggatacttcacacatcatcaccaaagataccagataaaacctctgaaaagcacagacgagaaagaacatgccgtctttacatctaaccaggaggaacaagacccagctaaccacacatgtggtgtgaagagcactgacgggaaacaaggcccaattcgaatctctagatcactcaaaagcccagagaaagaagactttcttcgggcacagaaatacattgatctctatttggtgctggataatgccttttataagaactataatgagaatctaactctgataagaagctttgtgtttgatgtgatgaacctactcaatgtgatatataacaccatagatgttcaagtggccttggtaggtatggaaatctggtctgatggggataagataaaggtggtgcccagcgcaagcaccacgtttgacaacttcctgagatggcacagttctaacctggggaaaaagatccacgaccatgctcagcttctcagcgggattagcttcaacaatcgacgtgtgggactggcagcttcaaattccttgtgttccccatcttcggttgctgttattgaggctaaaaaaaagaataatgtggctcttgtaggagtgatgtcacatgagctgggccatgtccttggtatgcctgatgttccattcaacaccaagtgtccctctggcagttgtgtgatgaatcagtatctgagttcaaaattcccaaaggatttcagtacatcttgccgtgcacattttgaaagataccttttatctcagaaaccaaagtgcctgctgcaagcacctattcctacaaatataatgacaacaccagtgtgtgggaaccaccttctagaagtgggagaagactgtgattgtggctctcctaaggagtgtaccaatctctgctgtgaagccctaacgtgtaaactgaagcctggaactgattgcggaggagatgctccaaaccataccacagagtgaatccaaaagtctgcttcactgagatgctaccttgccaggacaagaaccaagaactctaactgtcccaggaatcttgtgaattttcacccataatggtctttcacttgtcattctactttctatattgttatcagtccaggaaacaggtaaacagatgtaattagagacattggctctttgtttaggcctaatctttctttttacttttttttttcttttttctttttttttaaagatcatgaatttgtgacttagttctgccctttggagaacaaaagaaagcagtcttccatcaaatcaccttaaaatgcacggctaaactattcagagttaacactccagaattgttaaattacaagtactatgctttaatgcttctttcatcttactagtatggcctataaaaaaaataataccacttgatgggtgaaggctttggcaatagaaagaagaatagaattcaggttttatgttattcctctgtgttcacttcgccttgctcttgaaagtgcagtatttttctacatcatgtcaagaatgattcaatgtaaatatttttcattttatcatgtatatcctatacacacatctccttcatcatcatatatgaagtttattttgagaagtctacattgcttacattttaattgagccagcaaagaaggcttaatgatttattgaaccataatgtcaataaaaacacaacttttgaggc

SEQ ID NO: 180340 - DNA, 2438 bp, Artificial Sequence
  derived and/or modified sequence
agatgtgagtcctcaatgagctataaccacagccataaatatctctcaaagatgaggaacattctcatgatgttgacactgcaattttttgacaatttcccaacactcttaagaaacattccccaatctcacacgaaaagtgggggttttaattttcttgttcaacttctaaagagaaattggagaagataaaactggacactggggagaccacaacttcatgctgcgtgggatctcccagctacctgcagtggccaccatgtcttgggtcctgctgcctgtactttggctcattgttcaaactcaagcctcaaactgtgcgtggcctaaagtcagcattcaataaatatttgtgaaatgaatatttcagttttcacataaaagaaatatcagagaagcaatagccataaagcaaacacctgaattaacgctccatgaaatagtttgtcctaaaaaacttcacattttacacaaaagagagatcaagaacaaccagacagaaaagcatggcaaagaggaaaggtatgaacctgaagttcaatatcagatgatcttaaatggagaagaaatcattctctccctacaaaaaaccaagcacctcctggggccagactacactgaaacattgtactcacccagaggagaggaaattaccacgaaacctgagaacatggaacactgttactataaaggaaacatcctaaatgaaaagaattctgttgccagcatcagtacttgtgacgggttgagaggatacttcacacatcatcaccaaagataccagataaaacctctgaaaagcacagacgagaaagaacatgccgtctttacatctaaccaggaggaacaagacccagctaaccacacatgtggtgtgaagagcactgacgggaaacaaggcccaattcgaatctctagatcactcaaaagcccagagaaagaagactttcttcgggcacagaaatacattgatctctatttggtgctggataatgccttttataagaactataatgagaatctaactctgataagaagctttgtgtttgatgtgatgaacctactcaatgtgatatataacaccatagatgttcaagtggccttggtaggtatggaaatctggtctgatggggataagataaaggtggtgcccagcgcaagcaccacgtttgacaacttcctgagatggcacagttctaacctggggaaaaagatccacgaccatgctcagcttctcagcgggattagcttcaacaatcgacgtgtgggactggcagcttcaaattccttgtgttccccatcttcggttgctgttattgaggctaaaaaaaagaataatgtggctcttgtaggagtgatgtcacatgagctgggccatgtccttggtatgcctgatgttccattcaacaccaagtgtccctctggcagttgtgtgatgaatcagtatctgagttcaaaattcccaaaggatttcagtacatcttgccgtgcacattttgaaagataccttttatctcagaaaccaaagtgcctgctgcaagcacctattcctacaaatataatgacaacaccagtgtgtgggaaccaccttctagaagtgggagaagactgtgattgtggctctcctaaggagtgtaccaatctctgctgtgaagccctaacgtgtaaactgaagcctggaactgattgcggaggagatgctccaaaccataccacagagtgaatccaaaagtctgcttcactgagatgctaccttgccaggacaagaaccaagaactctaactgtcccaggaatcttgtgaattttcacccataatggtctttcacttgtcattctactttctatattgttatcagtccaggaaacaggtaaacagatgtaattagagacattggctctttgtttaggcctaatctttctttttacttttttttttcttttttctttttttttaaagatcatgaatttgtgacttagttctgccctttggagaacaaaagaaagcagtcttccatcaaatcaccttaaaatgcacggctaaactattcagagttaacactccagaattgttaaattacaagtactatgctttaatgcttctttcatcttactagtatggcctataaaaaaaataataccacttgatgggtgaaggctttggcaatagaaagaagaatagaattcaggttttatgttattcctctgtgttcacttcgccttgctcttgaaagtgcagtatttttctacatcatgtcaagaatgattcaatgtaaatatttttcattttatcatgtatatcctatacacacatctccttcatcatcatatatgaagtttattttgagaagtctacattgcttacattttaattgagccagcaaagaaggcttaatgatttattgaaccataatgtcaataaaaacacaacttttgaggc

SEQ ID NO: 180341 - DNA, 1413 bp, Artificial Sequence
  derived and/or modified sequence
atgttgaggggcatctcacagcttcccgctgtggccacaatgtcatgggtgttgctgcctgtgctatggctcatagttcaaacacaggcgatcgctatcaaacagactcccgaactaaccctgcatgagattgtatgccccaaaaaactgcacatacttcataaaagagagatcaagaataaccagacagaaaaacatggaaaagaggagcggtacgaaccggaggtccagtaccaaatgatactgaacggcgaggagatcattttgagtttgcagaagactaaacacctcctcggcccagactatactgagaccctatactcgccacgcggtgaagagatcaccacaaaacccgaaaatatggagcattgctactacaagggtaacatacttaacgagaaaaattcagtcgcatcaatctccacctgcgatggactgagggggtactttacccatcatcatcagcggtaccaaattaaacctcttaaatcgactgacgaaaaggaacatgctgtatttaccagcaaccaggaagagcaggacccagcaaaccacacatgtggagtcaagagcaccgacggaaaacaaggccctatcaggattagtaggagtctgaaaagccccgagaaggaagatttcttacgggcccaaaagtacatcgacctctacctcgtgctggataacgccttttacaaaaactacaatgaaaatctgaccctgatcagaagttttgtttttgacgttatgaatctcctcaacgtcatctacaacacaatagatgtacaagtcgcgctagtgggtatggagatttggagcgacggtgacaagattaaagtcgtgcccagcgcatcaaccacattcgacaacttcttaagatggcactcctccaacctgggtaaaaaaattcacgaccatgcccaactactctcaggaatcagctttaataatagaagagttggtttggcagccagtaacagcctctgcagcccttcttcggtggccgttatcgaggccaaaaagaagaataacgtcgctctcgtgggggtcatgagccatgaacttggccatgtcttaggtatgccggatgtaccgtttaacacaaagtgtccctctggcagctgcgtgatgaatcaatatctgtcgtcaaaattccctaaggactttagtaccagttgccgggcccacttcgagcgttatctactctcccagaagcctaaatgtctccttcaggccccaattcccaccaacattatgaccacgccggtttgcggcaaccacctactggaagttggcgaggactgcgattgtggctccccaaaggagtgcaccaatctgtgctgtgaggcccttacttgcaaactgaagccagggacagattgcgggggagatgctcccaaccacaccaccgaatag

SEQ ID NO: 180342 - DNA, 1413 bp, Artificial Sequence
  derived and/or modified sequence
atgctgcggggcatcagccagctgcctgctgtggccaccatgtcctgggtgctgctgcctgtgctgtggctgattgtgcagacccaggccatcgccatcaagcagaccccagagctgaccctgcacgagatcgtgtgccccaagaagctgcacatcctgcacaagcgggagatcaagaacaaccagacagagaagcacggcaaggaggagagatatgagcctgaggtgcagtaccagatgatcctgaatggagaggagatcatcctgagcctgcagaagaccaagcacctgctgggccctgactacacagagaccctgtacagccccagaggagaggagatcaccaccaagccagagaacatggagcactgctactacaagggcaacatcctgaatgagaagaacagcgtggccagcatcagcacctgtgatggcctgcggggctacttcacccaccaccaccagcgctaccagatcaagcccctgaagagcacagatgagaaggagcacgctgtgttcaccagcaaccaggaggagcaggaccctgccaaccacacctgtggggtgaagagcacagatggcaagcagggccccatccgcatcagccgcagcctgaagagccctgagaaggaggacttcctgcgggcccagaagtacatcgacctgtacctggtgctggacaatgccttctacaagaactacaatgaaaacctgaccctcatccgcagctttgtgtttgatgtgatgaacctgctgaatgtcatctacaacaccattgatgtgcaggtggccctggtgggcatggagatctggagcgatggagacaagatcaaggtggtgcccagcgccagcaccacctttgacaacttcctgcgctggcacagcagcaacctgggcaagaagatccatgaccacgcccagctgctgagcggcatctccttcaacaacagaagagtgggcctggccgccagcaacagcctgtgcagccccagctctgtggccgtcatcgaggccaagaagaagaacaacgtggccctggtgggcgtgatgagccatgagctgggccacgtgctgggcatgccagatgtgcccttcaacaccaagtgccccagcggcagctgtgtgatgaaccagtacctgagcagcaagttccccaaggacttcagcaccagctgccgggcccactttgagcgctacctgctgagccagaagcccaagtgcctgctgcaggcccccatccccaccaacatcatgaccacccctgtgtgtggcaaccacctgctggaggtgggggaggactgtgactgtggcagccccaaggaatgtaccaacctgtgctgtgaggccctgacctgcaagctgaagccaggcacagactgtggaggagatgcccccaaccacaccacagaatag

SEQ ID NO: 180343 - DNA, 1413 bp, Artificial Sequence
  derived and/or modified sequence
atgctgcggggcatcagccagctgcccgccgtggccaccatgagctgggtcctcctacccgtgttgtggcttattgtgcagacccaggcaattgctattaagcaaacgccagaactgactctgcatgagatcgtgtgtcccaaaaagctgcacattctccataaaagagagattaagaacaaccagaccgagaagcacggtaaagaggaaagatatgaacctgaagtgcagtaccagatgatcttgaacggcgaggagatcattctgagcctgcagaagactaagcatttgcttggacccgactatacagagacgctgtattctcctcggggggaggagattacaactaagccagaaaatatggagcactgctattataagggtaatatcctgaatgagaaaaatagcgtggccagtatctccacttgcgacggcttgcggggctatttcacccaccaccatcaaagataccagattaaacctctgaagtcaaccgatgaaaaagagcacgcggtgtttacttctaaccaggaagaacaggaccccgccaaccacacctgtggcgtcaaaagtacagatgggaaacaggggcctattaggatctccaggtctctaaaatctcccgagaaagaagattttctgcgcgcacagaagtacatcgacttgtacctggttctggataacgccttctataagaactataacgagaatctgactctgattcgatcatttgtctttgacgtaatgaatctgttgaacgtgatctacaatacgattgatgtacaggtcgctctggtgggcatggagatctggagcgacggcgacaaaataaaagttgtgccttctgcatctaccacttttgataatttcctgcgatggcactccagcaacctcggaaaaaaaatccacgaccacgcacagctactgagcggaatctccttcaacaaccgacgggtcgggttggcggcgagcaactcattgtgcagcccatcatcagtggcagtcattgaggccaagaagaagaacaatgtggccctcgtgggcgtgatgagccacgagctgggccatgtgcttggtatgcctgacgtgccctttaacactaaatgtccctccggatcctgcgtcatgaatcagtacctttcctctaaattccctaaggacttcagcaccagctgccgcgctcactttgagagatacctgctgtcccagaagccaaaatgtctgctgcaagccccaatccccaccaatatcatgaccactcctgtctgtggcaatcacctcctcgaagtgggcgaagattgcgactgcggatcccctaaagaatgcaccaacctatgttgcgaggccctgacttgcaagctcaagcccgggactgactgcgggggagacgcccctaaccacaccactgaatag

SEQ ID NO: 180344 - DNA, 1413 bp, Artificial Sequence
  derived and/or modified sequence
atgctgcggggtattagtcagcttccggcagtggccactatgtcatgggtgctgctgcccgtgttgtggcttattgttcaaacacaagctattgcaatcaaacagactcccgagctaaccttgcacgagattgtatgccctaaaaagttgcacattctccataagcgcgagataaaaaataaccagactgaaaagcacgggaaggaagagcgctatgagccagaggtgcaatatcagatgatcctaaatggagaggagatcattttgtccctgcaaaaaaccaaacacctcttgggaccggattatactgagaccctttacagccctaggggggaggagatcacaaccaaacccgaaaacatggaacactgttattataaggggaatatccttaatgagaagaactccgtggcaagcatctccacctgcgacggactcagggggtactttactcaccaccaccagcggtatcaaatcaaaccattgaaaagcactgatgagaaggaacatgctgtgtttacatcgaatcaggaggaacaggacccagctaaccacacctgtggcgtaaaatctaccgacggcaaacaagggccaatcagaatctcacggagccttaaatctcctgaaaaagaagactttctgagggcacagaagtatattgacttgtatctggttctagacaatgccttttataagaattataacgaaaatttgacactaataaggagcttcgtgtttgacgtaatgaacttactcaatgtgatttacaacaccatagatgttcaggtggccctggtcggtatggaaatctggagcgatggagacaagatcaaagtggttccatcagcttctactaccttcgacaatttcctgaggtggcatagcagcaatctgggaaagaaaatacatgaccatgcccagctacttagcggcataagcttcaataatagacgggtgggattagctgcaagtaattccctatgcagtccgtcctccgtggctgtgatcgaggcaaaaaagaaaaacaacgtcgccctggtgggggtgatgagccatgaattaggccatgtcctgggcatgcccgacgtgccattcaacacgaagtgtccaagtggatcctgcgtcatgaaccagtatctgagctctaaatttcctaaggactttagcacgtcctgccgcgcacacttcgaacggtacctgttaagccagaagcctaagtgtctgctccaagcaccaatccccacaaacatcatgactactcccgtgtgtggcaatcacttactcgaagtgggggaggactgcgattgtggaagtcccaaggaatgtacaaatctgtgctgcgaggccttaacgtgcaagctgaagcccggtacagattgcgggggtgatgcaccaaatcacacaaccgagtag

SEQ ID NO: 180345 - DNA, 1413 bp, Artificial Sequence
  derived and/or modified sequence
atgctgagaggcatcagccagctgcccgccgtggccaccatgagctgggtgctgctgcccgtgctgtggctgatcgtgcagacccaggccatcgccatcaagcagacccccgagctgaccctgcacgagatcgtgtgccccaagaagctgcacatcctgcacaagagagagatcaagaacaaccagaccgagaagcacggcaaggaggagagatacgagcccgaggtgcagtaccagatgatcctgaacggcgaggagatcatcctgagcctgcagaagaccaagcacctgctgggccccgactacaccgagaccctgtacagccccagaggcgaggagatcaccaccaagcccgagaacatggagcactgctactacaagggcaacatcctgaacgagaagaacagcgtggccagcatcagcacctgcgacggcctgagaggctacttcacccaccaccaccagagataccagatcaagcccctgaagagcaccgacgagaaggagcacgccgtgttcaccagcaaccaggaggagcaggaccccgccaaccacacctgcggcgtgaagagcaccgacggcaagcagggccccatcagaatcagcagaagcctgaagagccccgagaaggaggacttcctgagagcccagaagtacatcgacctgtacctggtgctggacaacgccttctacaagaactacaacgagaacctgaccctgatcagaagcttcgtgttcgacgtgatgaacctgctgaacgtgatctacaacaccatcgacgtgcaggtggccctggtgggcatggagatctggagcgacggcgacaagatcaaggtggtgcccagcgccagcaccaccttcgacaacttcctgagatggcacagcagcaacctgggcaagaagatccacgaccacgcccagctgctgagcggcatcagcttcaacaacagaagagtgggcctggccgccagcaacagcctgtgcagccccagcagcgtggccgtgatcgaggccaagaagaagaacaacgtggccctggtgggcgtgatgagccacgagctgggccacgtgctgggcatgcccgacgtgcccttcaacaccaagtgccccagcggcagctgcgtgatgaaccagtacctgagcagcaagttccccaaggacttcagcaccagctgcagagcccacttcgagagatacctgctgagccagaagcccaagtgcctgctgcaggcccccatccccaccaacatcatgaccacccccgtgtgcggcaaccacctgctggaggtgggcgaggactgcgactgcggcagccccaaggagtgcaccaacctgtgctgcgaggccctgacctgcaagctgaagcccggcaccgactgcggcggcgacgcccccaaccacaccaccgagtag

SEQ ID NO: 180346 - protein, 518 aa, Artificial Sequence
  derived and/or modified sequence
MLRVVSWNINGIRRPLQGVANQEPSNCAAVAVGRILDELDADIVCLQETKVTRDALTEPLAIVEGYNSYFSFSRNRSGYSGVATFCKDNATPVAAEEGLSGLFATQNGDVGCYGNMDEFTQEELRALDSEGRALLTQHKIRTWEGKEKTLTLINVYCPHADPGRPERLVFKMRFYRLLQIRAEALLAAGSHVIILGDLNTAHRPIDHWDAVNLECFEEDPGRKWMDSLLSNLGCQSASHVGPFIDSYRCFQPKQEGAFTCWSAVTGARHLNYGSRLDYVLGDRTLVIDTFQASFLLPEVMGSDHCPVGAVLSVSSVPAKQCPPLCTRFLPEFAGTQLKILRFLVPLEQSPVLEQSTLQHNNQTRVQTCQNKAQVRSTRPQPSQVGSSRGQKNLKSYFQPSPSCPQASPDIELPSLPLMSALMTPKTPEEKAVAKVVKGQAKTSEAKDEKELRTSFWKSVLAGPLRTPLCGGHREPCVMRTVKKPGPNLGRRFYMCARPRGPPTDPSSRCNFFLWSRPS

SEQ ID NO: 180347 - DNA, 1557 bp, Artificial Sequence
  derived and/or modified sequence
atgttgcgggtggtgtcctggaatataaatggtatcaggagacctctgcaaggagtagcaaaccaggagcctagcaattgtgccgccgtggccgtagggcgcattctggatgagctggatgctgacatcgtgtgcctgcaggagaccaaggtgacacgggacgcccttactgagccgctcgctattgtggagggttacaattcgtatttcagcttttctaggaaccggtccggatactccggagtcgctacgttttgcaaggacaacgctacacccgtcgcagcagaggagggactgagtgggctgttcgctacccagaacggagatgtgggatgctacggaaatatggatgagttcacgcaggaagagttgagagccctggattctgagggccgcgctctcctgacacagcataaaattaggacctgggagggaaaagagaaaacgttaacgcttatcaatgtgtactgccctcacgccgatcccggccgtcccgagcgtctggtcttcaagatgagattttaccgcttgctccagatccgggctgaggctctgctggcagcagggtctcatgtgattatccttggagatttaaataccgcgcatcgacccattgatcactgggacgctgtgaatttggaatgttttgaagaggatccgggacggaagtggatggatagcctactcagcaatcttggttgccagtctgcctcacacgttggccccttcattgattcataccgatgttttcagcctaagcaggaaggggcctttacatgctggagtgcggttacaggcgctagacatctgaattacgggtctcgattggattatgtgctgggagaccgaacgctagtgatcgacacgtttcaagccagttttcttctgcctgaggtgatggggagcgaccactgtcccgtgggagcagtcctctcagtaagcagtgtgcccgcaaaacagtgcccaccactgtgtacaagatttcttcccgagtttgccggtacccagcttaagatactgaggtttctggtgcccctggaacaatctccagtcctggaacagagcaccttgcagcacaataaccagactcgggtacaaacctgccagaataaagcccaggtgcggtccacgaggcctcagccttcccaggtgggcagtagccgagggcaaaagaatcttaagagctacttccagcccagtccgtcctgcccacaggccagccccgacattgaactaccaagcttaccccttatgagtgccctgatgacacctaaaactcccgaagagaaggccgtggcaaaggtagttaagggccaagctaagacctcagaagcaaaggatgagaaggaacttaggacttccttctggaaatcagtgctggccggacctctcaggactcccctttgcggcggtcatagagagccctgcgtcatgaggaccgtgaagaagccaggcccaaacctagggcgaagattttacatgtgcgctaggccccgcggacccccaacagatccttcttcccgctgcaattttttcctttggagcaggccgagctag

SEQ ID NO: 180348 - DNA, 1557 bp, Artificial Sequence
  derived and/or modified sequence
atgctgcgggtggtgtcctggaacatcaatggcatcagaagacccctgcagggcgtggccaaccaggagcccagcaactgtgccgctgtggccgtgggccgcatcctggatgagctggatgctgacatcgtgtgcctgcaggagaccaaggtgaccagagatgccctgacagagcccctggccatcgtggagggctacaacagctacttctccttcagcaggaacagaagtggctacagcggcgtggccaccttctgcaaggacaatgccacccctgtggccgctgaggagggcctgagcggcctgtttgccacccagaatggagatgtgggctgctacggcaacatggatgagttcacccaggaggagctgcgggccctggacagcgagggccgggccctgctgacccagcacaagatccgcacctgggagggcaaggagaagaccctgaccctcatcaacgtgtactgcccccacgccgaccccggccggcctgagcggctggtgttcaagatgaggttctaccgcctgctgcagatccgggcagaggccctgctggccgccggcagccacgtgatcatcctgggggacctgaacacagcccaccggcccatcgaccactgggatgctgtgaacctggagtgctttgaggaggaccccggcaggaagtggatggacagcctgctgagcaacctgggctgccagagcgccagccacgtgggccccttcatcgacagctaccgctgcttccagcccaagcaggagggcgccttcacctgctggagcgctgtgactggagcccggcacctgaactacggcagccggctggactatgtgctgggggacaggaccctggtgattgacaccttccaggccagcttcctgctgcctgaggtgatgggcagtgaccactgccctgtgggcgctgtgctgtctgtgtcctctgtgcctgccaagcagtgcccccccctgtgcacccgcttcctgcctgagtttgctggcacccagctgaagatcctgcgcttcctggtgcccctggagcagagccctgtgctggagcagagcaccctgcagcacaacaaccagaccagggtgcagacctgccagaacaaggcccaggtgcgcagcacccggccccagcccagccaggtgggcagcagccggggccagaagaacctgaagagctacttccagcccagccccagctgcccccaggccagcccagacatcgagctgcccagcctgcccctgatgtctgccctgatgacccccaagaccccagaggagaaggctgtggccaaggtggtgaagggccaggccaagaccagcgaggccaaggatgagaaggagctgcggaccagcttctggaagtctgtgctggccggccccctgcggacccccctgtgtggcggccaccgggagccctgtgtgatgaggacagtgaagaagccaggccccaacctgggccgccgcttctacatgtgtgcccggccccggggccccccaacagaccccagcagccgctgcaacttcttcctgtggagccggcccagctag

SEQ ID NO: 180349 - DNA, 1557 bp, Artificial Sequence
  derived and/or modified sequence
atgctgcgggtggtgagctggaacatcaacggcatccggcggcccctccagggcgtagccaaccaggagcccagcaactgtgctgctgtcgccgttgggaggatcctggatgaactggatgctgatatcgtgtgcctgcaggagacgaaggttactcgcgacgcactcaccgaaccacttgccatcgtagaagggtacaatagctacttttcattctctcgtaaccgcagtggctactcaggtgtcgccaccttctgcaaggataatgccaccccagtcgccgcggaggaagggttaagcggactgtttgctacacagaatggcgatgtaggttgctacggtaatatggacgaatttacacaagaagagctccgcgcactggattccgaaggccgggctctcttgactcaacacaagataagaacatgggagggcaaggaaaaaaccctgacgctcattaacgtgtactgtccacatgcagatccgggccgcccggagaggctcgtcttcaaaatgcggttttacaggctgcttcagatacgtgccgaggccctacttgcggctggttcacacgtcatcattctgggagacctcaatacggcccatagacctatagaccactgggatgccgtcaacctggagtgttttgaggaggacccaggaagaaagtggatggactccctgctgtccaacctcggatgccaaagcgctagccatgtgggaccattcattgacagctacagatgtttccagccaaagcaagagggggcctttacatgctggtccgcagtaaccggggcacgccacctgaattatgggtctcgcctggactatgtccttggagacagaactctggttatcgacacttttcaggcctctttcctgcttccagaggttatgggctccgaccactgcccagttggcgcagtactgtcggtgagctctgtgcccgccaagcaatgtcctccactctgcacaagatttctgccagagtttgccggcacccaacttaagattctccgtttccttgttccgctcgaacagtcccctgtgctggagcagtctactctgcagcataataaccagacccgggtgcagacttgccagaacaaagcacaggttcgaagtacgcggccacaacccagccaggtcggctccagccgggggcagaagaacttgaagagttactttcagccgagcccctcatgcccacaagccagtccggacatcgaacttcctagcctcccgttaatgtctgcgctgatgacgcccaaaacccccgaggagaaagccgtggccaaggtggtgaaggggcaggccaaaactagcgaagccaaagacgaaaaagaattgcggacatcattttggaaatcagtcttagccggtccccttaggacacctctttgcgggggtcatcgcgaaccatgcgtaatgcgcaccgttaagaagcccgggccgaaccttggacgcagattctacatgtgtgctcgacctcgcggcccccctaccgatcctagttcgcggtgtaattttttcctgtggtcacggccttcgtag

SEQ ID NO: 180350 - DNA, 1557 bp, Artificial Sequence
  derived and/or modified sequence
atgctgcgtgtggtctcctggaatatcaatgggatcaggcgcccactgcagggcgtcgccaatcaagagccttcaaactgcgcagcggtcgcagtcggcagaattttagacgagctagacgcagacatagtctgtttgcaagagaccaaggtgacacgcgacgctctgactgagccattggctatagttgagggctacaatagttacttctccttctccaggaaccggtccggctacagcggggtggcgaccttctgtaaggacaacgctacacctgtcgctgctgaagagggcctctccgggctgtttgctacccagaatggagacgtggggtgctacggaaacatggacgagttcacgcaggaagagctgcgcgcacttgattccgagggcagagcactgctgacgcaacataagatccgcacttgggagggcaaagagaagacactgacgctcatcaacgtatactgccctcacgctgacccaggacggccagagcgtttggtgtttaaaatgcgattttaccgcttgctgcagatacgagctgaagcgcttttagcggcagggagccacgttatcatcctcggggacttaaacactgcacacagacctattgatcattgggacgctgtgaacctggagtgtttcgaagaagaccccggaaggaagtggatggattccttactgtctaacctggggtgtcagagtgctagccacgtcggaccttttatcgatagctaccgctgctttcagcccaagcaggaaggcgcattcacttgttggagtgcagtgacgggcgcaaggcacctgaactacggaagccgtctcgactatgtgctcggggacagaactctcgtgatcgatacgttccaggctagttttttgctgcctgaagtgatgggatccgatcactgccccgtgggggctgtgttgtctgtgtccagcgttccagccaaacagtgccccccattgtgcactcgctttctcccagaattcgccggaacacagctcaagatcctccgtttcttggtcccccttgaacagagccctgttctcgaacagtctacgctgcagcataataatcaaacgcgggttcagacatgccagaataaagctcaggtgcgatccacccgcccacagccttctcaggttggcagctctcgaggacagaagaatctgaagtcctattttcagccaagcccttcgtgtccgcaggcgtctcctgatattgagcttccaagtttacctttgatgagcgccctgatgaccccaaaaacaccggaggagaaagccgtggctaaagtcgtgaaagggcaggcaaagacttctgaggccaaggatgaaaaggagcttaggactagtttttggaagtccgtgctcgccggtccactacgaacacccctgtgtggcggacatcgggaaccctgcgttatgagaactgtcaagaaaccgggaccgaacctgggccgaaggttttacatgtgtgcacgcccaaggggaccgcctaccgaccccagcagcagatgcaatttctttctatggtcccgcccatcatag

SEQ ID NO: 180351 - DNA, 3245 bp, Artificial Sequence
  derived and/or modified sequence
ctgaacaggaagcagttcgctcgcgcctaggttggcgcgggctgggaggtgttccagccctttaagatgttgcgcgtggtgagctggaacatcaatgggattcggagacccctgcaaggggtggcaaatcaggaacccagcaactgtgccgccgtggccgtggggcgcattttggacgagctggatgcggatatcgtctgtctccaggaaaccaaagtgaccagggatgcactgacagagcccctggctatcgttgagggttataactcctatttcagcttcagccgcaaccgtagcggctattctggtgtagccaccttctgtaaggacaatgctaccccagtggctgctgaagaaggcctgagtggcctgtttgccacccagaatggggatgttggttgctatggaaacatggatgagtttacccaagaggaactccgggctctggatagtgagggcagggccctcctcacacagcataagatccgcacatgggaaggtaaggagaagaccttgaccctaatcaacgtgtactgcccccatgcggaccctgggaggcctgagcggctagtctttaagatgcgcttctatcgtttgctgcaaatccgagcagaagccctcctggcggcaggcagccatgtgatcattctgggtgacctgaatacagcccaccgccccattgaccactgggatgcagtcaacctggaatgctttgaagaggacccagggcgcaagtggatggacagcttgctcagtaacttggggtgccagtctgcctctcatgtagggcccttcatcgatagctaccgctgcttccaaccaaagcaggagggggccttcacctgctggtcagcagtcactggcgcccgccatctcaactatggctcccggcttgactatgtgctgggggacaggaccctggtcatagacacctttcaggcctctttcctgctgcctgaggtgatgggctctgaccactgccctgtgggtgcagtcttgagtgtgtcctctgtgcctgcaaaacagtgcccacctctgtgcacccgcttcctccctgagtttgcaggcacccagctcaagatccttcgcttcctagttcctctcgaacaaagtcctgtgttggagcagtcgacgctgcagcacaacaatcaaacccgggtacagacatgccaaaacaaagcccaagtgcgctcaaccaggcctcagcccagtcaggttggctctagcagaggccagaaaaacctgaagagctactttcagccctcccctagctgtccccaagcctctcctgacatagagctgcctagcctaccactgatgagcgccctcatgaccccgaagactccagaagagaaggcagtggccaaagtggtgaaggggcaggccaagacttcagaagccaaagatgagaaggagttacggacctcattctggaagtctgtgctggcggggcccttgcgcacacccctctgtgggggccacagggagccatgtgtgatgcgtactgtgaagaagccaggacccaacttgggccgccgcttctacatgtgtgccaggccccggggtcctcccactgacccctcctcccggtgcaacttcttcctctggagcaggcccagctgaaccaatggaggcctggggacatctggcatggtcacccctgcacatgatctgaggccagctccccttccctgagctgcctcctgcttctccctcaaagtctcctacccttctcttcctcttttaagccctctcttcctcgctttccttcctacctagctccttgttggtgagcttcttgtgccttaatcctgtgacccagccccttacaccactttccaccttcctgtccgaagtacacggacactagctgccccaggaagttgtgtgattttaaatcacttctgtctttgctggaaagtgtatttgtgcataaataaagtctgtgtatttgtttcagggttgcactttggacattgtggaggtactccataaagttgagtcagagaagctatctcaatacttggtttgccggctggctgtagcccaatgatgtaattcccagagaaaggggaggagggaggggggaggagggaatagtgaggcgtgagcagcagtgctcaccataaagggttctctgctcagttgtaggaatttcctgtacggctaaggtgaaatcagcaaggaaggtgggctgtgtagccttaaaccagagctttccagctagtgcgtcccacagctgccacagtgggttacagggttgaaagaaacggtcctcagccctcagagttgccaggcagggcctgggaccacacaagtttcagggacgattgcctccttagcaagtagtatcattagtacccctaagtgtgccatggaaatgtttcctgtatactgtgacctggaaagtgggagcattgctttgaacacagtgcttgctctagccaagcctcttctcacctttgaaaatgggactggtagaccaggcacagtggtgcacgcctgtaatcccagcactttgggaggctgagatgggtggatcacctgaggtcaggagttcgcaaccagcctaacatggtgagaccccgtctctactaaatacaaaaaaattaactgggcgtggtggcgcgtgcctgtaatccaagctacttaggaggctgagacaggagaatagcttgtacctgggaggcggaggttgcagtgggctgagatcatgcattgcactccagcctgggcaacaagagtgaaattcagtctccaaaaaaaaaaaaagaaaagaaaaagaatgggactggtaaatcctgttctgtgggatgccgtgggagggagagaggataatggattgaggaagacatccatatccccttatggaaaatacctctttggttttggggaaccactcctttctagggaatttggttagggctgactcatttcctggcttcaggggctaccctgggcccagatttccagggcccggattaccagtgaagcgtcaatccctggatttttattgaaaccattggagaagagccatctcaaataaatctgccaagtatcctagctctttgcaactcactgtgtagtttttgggcatttccttcctctttctcattctgtttccctgttggtaaaatggaatggtgaccaacaagtgacctatggttacctcatagatctgccacttgtctgagggagtcagaatgcacttgtctgttccctgtccaataaaaggcttcacatgc

SEQ ID NO: 180352 - DNA, 1557 bp, Artificial Sequence
  derived and/or modified sequence
atgctgagagtggtgagctggaacatcaacggcatcagaagacccctgcagggcgtggccaaccaggagcccagcaactgcgccgccgtggccgtgggcagaatcctggacgagctggacgccgacatcgtgtgcctgcaggagaccaaggtgaccagagacgccctgaccgagcccctggccatcgtggagggctacaacagctacttcagcttcagcagaaacagaagcggctacagcggcgtggccaccttctgcaaggacaacgccacccccgtggccgccgaggagggcctgagcggcctgttcgccacccagaacggcgacgtgggctgctacggcaacatggacgagttcacccaggaggagctgagagccctggacagcgagggcagagccctgctgacccagcacaagatcagaacctgggagggcaaggagaagaccctgaccctgatcaacgtgtactgcccccacgccgaccccggcagacccgagagactggtgttcaagatgagattctacagactgctgcagatcagagccgaggccctgctggccgccggcagccacgtgatcatcctgggcgacctgaacaccgcccacagacccatcgaccactgggacgccgtgaacctggagtgcttcgaggaggaccccggcagaaagtggatggacagcctgctgagcaacctgggctgccagagcgccagccacgtgggccccttcatcgacagctacagatgcttccagcccaagcaggagggcgccttcacctgctggagcgccgtgaccggcgccagacacctgaactacggcagcagactggactacgtgctgggcgacagaaccctggtgatcgacaccttccaggccagcttcctgctgcccgaggtgatgggcagcgaccactgccccgtgggcgccgtgctgagcgtgagcagcgtgcccgccaagcagtgcccccccctgtgcaccagattcctgcccgagttcgccggcacccagctgaagatcctgagattcctggtgcccctggagcagagccccgtgctggagcagagcaccctgcagcacaacaaccagaccagagtgcagacctgccagaacaaggcccaggtgagaagcaccagaccccagcccagccaggtgggcagcagcagaggccagaagaacctgaagagctacttccagcccagccccagctgcccccaggccagccccgacatcgagctgcccagcctgcccctgatgagcgccctgatgacccccaagacccccgaggagaaggccgtggccaaggtggtgaagggccaggccaagaccagcgaggccaaggacgagaaggagctgagaaccagcttctggaagagcgtgctggccggccccctgagaacccccctgtgcggcggccacagagagccctgcgtgatgagaaccgtgaagaagcccggccccaacctgggcagaagattctacatgtgcgccagacccagaggcccccccaccgaccccagcagcagatgcaacttcttcctgtggagcagacccagctag

SEQ ID NO: 180353 - protein, 424 aa, Artificial Sequence
  derived and/or modified sequence
MGSLVLTLCALFCLAAYLVSGSPIMNLEQSPLEEDMSLFGDVFSEQDGVDFNTLLQSMKDEFLKTLNLSDIPTQDSAKVDPPEYMLELYNKFATDRTSMPSANIIRSFKNEDLFSQPVSFNGLRKYPLLFNVSIPHHEEVIMAELRLYTLVQRDRMIYDGVDRKITIFEVLESKGDNEGERNMLVLVSGEIYGTNSEWETFDVTDAIRRWQKSGSSTHQLEVHIESKHDEAEDASSGRLEIDTSAQNKHNPLLIVFSDDQSSDKERKEELNEMISHEQLPELDNLGLDSFSSGPGEEALLQMRSNIIYDSTARIRRNAKGNYCKRTPLYIDFKEIGWDSWIIAPPGYEAYECRGVCNYPLAEHLTPTKHAIIQALVHLKNSQKASKACCVPTKLEPISILYLDKGVVTYKFKYEGMAVSECGCR

SEQ ID NO: 180354 - DNA, 1275 bp, Artificial Sequence
  derived and/or modified sequence
atgggcagcctcgtcctcactctttgtgctcttttctgcctggccgcatacctcgtgagtggctcccctatcatgaacctcgagcaaagcccattggaggaagatatgtctctctttggggatgtgttttcagagcaagatggggtcgacttcaacactctgctccaaagcatgaaggacgaatttctgaagactctgaacctgtctgatattcccacccaggattcagccaaagtggatcccccagaatatatgttagagttgtataacaagttcgctactgacagaactagcatgccaagtgcgaatatcattcgaagcttcaagaacgaggacctgttttctcagcctgtaagctttaatggactgagaaagtaccccctgctgtttaatgtcagcatccctcaccacgaagaagtcattatggcggaactgcgactctacacactggtccaaagagataggatgatctacgatggagtcgacaggaaaattacgatctttgaggtgctagaatccaagggggacaacgaaggagagcgcaacatgctggtgttggtgagcggtgagatatacggcaccaacagtgaatgggagacttttgatgttacagatgccatcaggcgctggcagaagtctgggtcctcgacccaccagttggaggtccacattgagagcaagcatgacgaggcggaagacgccagctccggccgtctcgaaatcgacaccagtgcgcagaataaacacaaccccctcttgattgtgtttagtgacgatcagtcctccgataaagaacgcaaagaggagctcaatgagatgatctcacacgagcagttgccggagctagataatttggggctcgattccttcagctcaggaccaggggaggaggccctgttgcagatgcggtcaaatataatttatgatagtacagccaggatacggcgtaatgccaagggaaattactgcaagcggacacccctctatatcgactttaaggagatcggatgggatagctggataatcgcccctcctggctacgaggcctacgagtgccgaggtgtctgcaactaccccctcgcagaacacctcactcctactaagcacgccattatccaggctcttgtgcacttaaaaaactcccagaaagcatcaaaagcctgttgcgtgccaaccaagcttgagcccatttcgattctctacctggataagggcgtggtcacctacaaatttaagtatgaaggaatggccgtgtctgaatgtggctgtcggtag

SEQ ID NO: 180355 - DNA, 1275 bp, Artificial Sequence
  derived and/or modified sequence
atggggagcttagtactaactttgtgtgcacttttctgtttggccgcatacctcgtttcaggatctccgatcatgaatctggagcagtcaccattggaggaggatatgtctctcttcggtgacgttttttcagaacaggatggcgtggactttaacaccctgctccagtccatgaaagacgaattcctgaagacactgaacctatccgacatcccaacccaggattcagcgaaggtggaccctcctgaatacatgctagaattgtacaataagtttgcaactgacagaacttcaatgccctcagccaacattatccgctcctttaagaacgaagatctcttttcacagccagtttcgttcaatggtctgcgaaagtaccctctgctgttcaacgtttctatcccccaccatgaagaagtgataatggccgaactgcggctatatactcttgtgcaacgcgacagaatgatttatgacggcgtcgatagaaagattaccatcttcgaggtactggagagcaaaggtgataacgaaggagaacggaacatgctcgtgctcgtcagcggcgagatctacggtacaaactctgagtgggagacattcgacgtgactgacgccatccgcagatggcagaaatccggaagcagtacccaccagctcgaggttcacatcgagtcaaaacatgacgaggccgaagatgcttcctccggaagattagagatcgacacctccgcccaaaacaagcataatccactgctgatcgtcttctcagacgaccaatcatcagacaaagagagaaaggaggaactcaatgaaatgatcagtcatgaacagctccctgagctcgacaatctcggcctggatagcttttcatctggcccgggggaggaggcattactgcagatgagatctaatatcatctatgattctactgcacgcattaggcggaatgctaagggcaattattgcaaacgcacaccactttatatagacttcaaggaaataggctgggacagctggattatcgcgcctcccggctacgaggcctatgaatgcaggggagtgtgtaactatcctctggccgaacatttgacacctacgaaacatgctatcatccaagcactcgtccatctgaaaaattcgcagaaggcaagtaaagcatgttgtgtcccaacgaaactggaacccattagcatcctttacctcgataagggggtggtgacgtacaagtttaaatacgagggaatggccgtatccgagtgtggatgtagatag

SEQ ID NO: 180356 - DNA, 1275 bp, Artificial Sequence
  derived and/or modified sequence
atgggcagcttggtattaacactttgtgcactcttctgccttgctgcatacctggtgtctggaagccccattatgaaccttgaacaatctccactcgaagaggatatgagccttttcggcgatgtttttagcgaacaagacggtgttgattttaatacccttctgcagtcaatgaaggatgaatttctgaaaactctcaatctgtccgatattcccacccaggacagcgctaaggtcgaccctcccgaatacatgctcgaattgtataataagttcgcaacagataggacctcaatgccctctgccaacatcatacgttccttcaaaaacgaagatcttttttcgcagcctgtttcctttaacgggctcagaaagtacccactcctatttaatgtctcaatcccacatcacgaagaagtgattatggctgagcttagactgtatacgttagtgcagcgcgaccgcatgatttacgatggtgtagatcggaaaataaccatttttgaggtgctggaatcaaaaggagataacgagggcgagaggaatatgctagtgttagtcagtggtgaaatttatgggaccaactcagaatgggaaacatttgatgtaaccgacgccattcggcggtggcagaagtctggctcttccacacaccaattggaggtacatattgagtctaaacacgatgaggccgaagacgcatcatccggtcgcctcgaaatagatacctctgcccaaaataaacacaaccccctgcttatagtgttttctgacgaccaatctagcgataaggagcggaaagaagagctgaacgagatgatttcacatgaacagctgcctgaattggataatctgggcctagactcatttagcagtggacccggagaagaagctcttctccagatgagaagtaacattatctacgatagtacagctagaattagacgcaatgccaaggggaactactgcaaaagaacacccctctatattgacttcaaggagattggctgggactcatggattatcgctccccctgggtatgaagcctacgaatgccgcggagtgtgtaattaccctcttgctgagcacttaacgcccaccaaacatgccatcatacaagcccttgttcacttaaaaaactcacagaaagcttccaaagcctgctgtgtaccaactaagcttgagcctatcagcattctctaccttgataagggagtggtgacttacaaatttaaatacgaaggcatggcggtatcagaatgtggctgtagatag

SEQ ID NO: 180357 - DNA, 1584 bp, Artificial Sequence
  derived and/or modified sequence
ggggagaggaagagtggtagggggagggagagagagaggaagagtttccaaacttgtctccagtgacaggagacatttacgttccacaagataaaactgccacttagagcccagggaagctaaaccttcctggcttggcctaggagctcgagcggagtcatgggctctctggtcctgacactgtgcgctcttttctgcctggcagcttacttggtttctggcagccccatcatgaacctagagcagtctcctctggaagaagatatgtccctctttggtgatgttttctcagagcaagacggtgtcgactttaacacactgctccagagcatgaaggatgagtttcttaagacactaaacctctctgacatccccacgcaggattcagccaaggtggacccaccagagtacatgttggaactctacaacaaatttgcaacagatcggacctccatgccctctgccaacatcattaggagtttcaagaatgaagatctgttttcccagccggtcagttttaatgggctccgaaaataccccctcctcttcaatgtgtccattcctcaccatgaagaggtcatcatggctgaacttaggctatacacactggtgcaaagggatcgtatgatatacgatggagtagaccggaaaattaccatttttgaagtgctggagagcaaaggggataatgagggagaaagaaacatgctggtcttggtgtctggggagatatatggaaccaacagtgagtgggagacttttgatgtcacagatgccatcagacgttggcaaaagtcaggctcatccacccaccagctggaggtccacattgagagcaaacacgatgaagctgaggatgccagcagtggacggctagaaatagataccagtgcccagaataagcataaccctttgctcatcgtgttttctgatgaccaaagcagtgacaaggagaggaaggaggaactgaatgaaatgatttcccatgagcaacttccagagctggacaacttgggcctggatagcttttccagtggacctggggaagaggctttgttgcagatgagatcaaacatcatctatgactccactgcccgaatcagaaggaacgccaaaggaaactactgtaagaggaccccgctctacatcgacttcaaggagattgggtgggactcctggatcatcgctccgcctggatacgaagcctatgaatgccgtggtgtttgtaactaccccctggcagagcatctcacacccacaaagcatgcaattatccaggccttggtccacctcaagaattcccagaaagcttccaaagcctgctgtgtgcccacaaagctagagcccatctccatcctctatttagacaaaggcgtcgtcacctacaagtttaaatacgaaggcatggccgtctccgaatgtggctgtagatagaagaagagtcctatggcttatttaataactgtaaatgtgtatatttggtgttcctatttaatgagattatttaataagggtgtacagtaatagaggcttgctgccttcaggaaatggacaggtcagtttgttgtaggaaatgcatatttt

SEQ ID NO: 180358 - DNA, 1275 bp, Artificial Sequence
  derived and/or modified sequence
atgggcagcctggtgctgaccctgtgcgccctgttctgcctggccgcctacctggtgagcggcagccccatcatgaacctggagcagagccccctggaggaggacatgagcctgttcggcgacgtgttcagcgagcaggacggcgtggacttcaacaccctgctgcagagcatgaaggacgagttcctgaagaccctgaacctgagcgacatccccacccaggacagcgccaaggtggacccccccgagtacatgctggagctgtacaacaagttcgccaccgacagaaccagcatgcccagcgccaacatcatcagaagcttcaagaacgaggacctgttcagccagcccgtgagcttcaacggcctgagaaagtaccccctgctgttcaacgtgagcatcccccaccacgaggaggtgatcatggccgagctgagactgtacaccctggtgcagagagacagaatgatctacgacggcgtggacagaaagatcaccatcttcgaggtgctggagagcaagggcgacaacgagggcgagagaaacatgctggtgctggtgagcggcgagatctacggcaccaacagcgagtgggagaccttcgacgtgaccgacgccatcagaagatggcagaagagcggcagcagcacccaccagctggaggtgcacatcgagagcaagcacgacgaggccgaggacgccagcagcggcagactggagatcgacaccagcgcccagaacaagcacaaccccctgctgatcgtgttcagcgacgaccagagcagcgacaaggagagaaaggaggagctgaacgagatgatcagccacgagcagctgcccgagctggacaacctgggcctggacagcttcagcagcggccccggcgaggaggccctgctgcagatgagaagcaacatcatctacgacagcaccgccagaatcagaagaaacgccaagggcaactactgcaagagaacccccctgtacatcgacttcaaggagatcggctgggacagctggatcatcgccccccccggctacgaggcctacgagtgcagaggcgtgtgcaactaccccctggccgagcacctgacccccaccaagcacgccatcatccaggccctggtgcacctgaagaacagccagaaggccagcaaggcctgctgcgtgcccaccaagctggagcccatcagcatcctgtacctggacaagggcgtggtgacctacaagttcaagtacgagggcatggccgtgagcgagtgcggctgcagatag

SEQ ID NO: 180359 - DNA, 1275 bp, Artificial Sequence
  derived and/or modified sequence
atggggtcccttgttctcaccctctgtgcactgttctgcctggccgcttaccttgtctcgggctcccctattatgaatctcgagcaatctcctctagaggaggatatgtctctgtttggcgacgtcttctccgaacaggatggagtggattttaataccttgctgcagtctatgaaggacgagttccttaaaacactcaatttatctgacatcccaacacaggactccgcaaaagtggaccccccggaatacatgttagaactgtataataaatttgctactgacagaacctccatgcctagcgccaatattattcggtccttcaagaacgaggacttgttctcccagccagtttccttcaatggcttacgtaagtacccactgctattcaatgtatccatacctcaccatgaagaagtgatcatggccgagttacgcctgtatactctggtgcaacgtgatcgcatgatctacgacggcgtcgataggaagattaccatatttgaagtcttggagtccaagggggataatgagggcgaacggaatatgctggtgctggtatcaggggaaatttacggaactaattcagagtgggagaccttcgacgtcacggatgcaattcgcagatggcaaaagtcaggtagctccacgcaccagttggaggtccacattgaaagtaaacacgacgaggccgaggacgcgagctctgggagactggaaatcgacacatccgcccagaacaagcacaaccccctgctgattgtcttctcagatgatcagtcctcagacaaagaacgcaaagaggagttgaacgagatgatttctcacgagcagctccctgagctggacaacctggggttagatagtttttcttcaggaccaggcgaggaagcgctcttgcagatgaggtcgaatatcatatacgacagtacagcaaggataaggagaaatgctaaaggcaactattgcaagcgtacccccctttacattgacttcaaagagataggttgggatagctggattatcgcccctccggggtacgaggcgtacgaatgccggggggtatgcaattaccccctggctgagcacctcacccccacaaaacacgcgatcatacaggccctcgttcacttgaagaacagtcaaaaagctagtaaagcgtgctgcgtccctacaaagctcgaacccatttcaattctatatctcgacaaaggagttgtcacctacaagtttaagtatgaggggatggcagtgtctgaatgcgggtgtcgatag

SEQ ID NO: 180360 - DNA, 1275 bp, Artificial Sequence
  derived and/or modified sequence
atgggcagcctggtgctgaccctgtgtgccctcttctgcctggccgcctacctggtgtctggcagccccatcatgaacctggagcagagccccctggaggaggacatgagcctgtttggagatgtgttcagcgagcaggatggagtggacttcaacaccctgctgcagagcatgaaggatgagttcctgaagaccctgaacctgagtgacatccccacccaggacagcgccaaggtggaccccccagagtacatgctggagctgtacaacaagtttgccacagacaggacctccatgcccagcgccaacatcatccgctccttcaagaatgaagatctcttcagccagcctgtgtccttcaacggcctgaggaagtaccccctgctcttcaacgtgtccatcccccaccacgaggaggtgatcatggccgagctgcggctgtacaccctggtgcagagggacaggatgatctatgatggagtggacaggaagatcaccatctttgaggtgctggagagcaagggggacaatgaaggagagaggaacatgctggtgctggtgtctggagagatctacggcaccaacagcgagtgggagacctttgatgtgacagatgccatccgccgctggcagaagagcggcagcagcacccaccagctggaggtgcacatcgagagcaagcatgatgaagcagaagatgccagcagcggccgcctggagattgacaccagcgcccagaacaagcacaaccccctgctgattgtgttcagtgatgaccagagcagtgacaaggagaggaaggaggagctgaatgagatgatcagccatgagcagctgcctgagctggacaacctgggcctggacagcttcagcagcggccctggagaggaggccctgctgcagatgaggagcaacatcatctatgacagcacagcccgcatcagaagaaatgccaagggcaactactgcaagaggacccccctgtacatcgacttcaaggagatcggctgggacagctggatcatcgcccctcctggctatgaggcctatgaatgtcggggcgtgtgcaactaccccctggccgagcacctgacccccaccaagcacgccatcatccaggccctggtgcacctgaagaacagccagaaggccagcaaggcctgctgcgtgcccaccaagctggagcccatcagcatcctgtacctggacaagggcgtggtgacctacaagttcaagtatgagggcatggctgtgtctgaatgtggctgcaggtag

SEQ ID NO: 180361 - DNA, 1275 bp, Artificial Sequence
  derived and/or modified sequence
atgggcagcctggtgctgaccctgtgcgccctgttctgcctggccgcatatcttgtgagcggttcaccaataatgaatctggagcaatctcctcttgaggaagatatgtctctattcggagatgtgtttagcgagcaggacggagtggactttaacacattactgcagtcaatgaaagacgaatttttaaaaacccttaacctgagcgacatcccaactcaagatagcgcaaaggtggacccacctgaatacatgctggagctatataataagtttgccacggaccgcacatctatgccatccgccaacattatccggagcttcaaaaatgaggacctattctcccagccggtctcttttaatgggctcaggaagtacccacttctctttaatgtcagtatcccacaccacgaggaggttattatggccgaactgcggctctatactttggtccaaagagacagaatgatctatgacggggtggatcgaaaaattaccatattcgaggtgctggagtccaagggggacaatgaaggtgaaagaaacatgctcgtgcttgtgtcaggagaaatctatggaaccaatagcgaatgggagacgttcgatgtgactgacgccataaggcgttggcagaagagtggcagcagcacacaccagctcgaagtgcacatcgaatctaaacatgacgaggccgaagatgcttcctctgggcgactggagatcgacacatctgcccagaataagcacaacccactactgatagtgttcagtgatgaccaaagctccgataaggagaggaaagaggagctgaacgagatgatcagccacgagcagctgccggaactggacaatctgggcctggacagcttctcttcaggcccgggcgaggaggccctcctacagatgagaagtaacatcatctatgattctaccgctagaatccgtcggaatgcgaaggggaactactgcaagagaacccccctttacatcgacttcaaagagatcgggtgggatagctggattatagcccctccgggctacgaagcatacgagtgcaggggcgtgtgcaattaccccctagcggaacatctcactcctacaaagcatgccatcatccaggctctggtgcacctgaaaaatagccagaaggcttctaaagcctgctgcgtgccaaccaagctggaacccatctcaattctatacctggacaagggggtggtaacttacaaatttaagtatgaagggatggcagtgagcgagtgtgggtgcagatag

SEQ ID NO: 180362 - RNA, 1275 nt, Artificial Sequence
  derived and/or modified sequence
auggggagcuuaguacuaacuuugugugcacuuuucuguuuggccgcauaccucguuucaggaucuccgaucaugaaucuggagcagucaccauuggaggaggauaugucucucuucggugacguuuuuucagaacaggauggcguggacuuuaacacccugcuccaguccaugaaagacgaauuccugaagacacugaaccuauccgacaucccaacccaggauucagcgaagguggacccuccugaauacaugcuagaauuguacaauaaguuugcaacugacagaacuucaaugcccucagccaacauuauccgcuccuuuaagaacgaagaucucuuuucacagccaguuucguucaauggucugcgaaaguacccucugcuguucaacguuucuaucccccaccaugaagaagugauaauggccgaacugcggcuauauacucuugugcaacgcgacagaaugauuuaugacggcgucgauagaaagauuaccaucuucgagguacuggagagcaaaggugauaacgaaggagaacggaacaugcucgugcucgucagcggcgagaucuacgguacaaacucugagugggagacauucgacgugacugacgccauccgcagauggcagaaauccggaagcaguacccaccagcucgagguucacaucgagucaaaacaugacgaggccgaagaugcuuccuccggaagauuagagaucgacaccuccgcccaaaacaagcauaauccacugcugaucgucuucucagacgaccaaucaucagacaaagagagaaaggaggaacucaaugaaaugaucagucaugaacagcucccugagcucgacaaucucggccuggauagcuuuucaucuggcccgggggaggaggcauuacugcagaugagaucuaauaucaucuaugauucuacugcacgcauuaggcggaaugcuaagggcaauuauugcaaacgcacaccacuuuauauagacuucaaggaaauaggcugggacagcuggauuaucgcgccucccggcuacgaggccuaugaaugcaggggaguguguaacuauccucuggccgaacauuugacaccuacgaaacaugcuaucauccaagcacucguccaucugaaaaauucgcagaaggcaaguaaagcauguugugucccaacgaaacuggaacccauuagcauccuuuaccucgauaaggggguggugacguacaaguuuaaauacgagggaauggccguauccgaguguggauguagauag

SEQ ID NO: 180363 - RNA, 1275 nt, Artificial Sequence
  derived and/or modified sequence
augggcagcuugguauuaacacuuugugcacucuucugccuugcugcauaccuggugucuggaagccccauuaugaaccuugaacaaucuccacucgaagaggauaugagccuuuucggcgauguuuuuagcgaacaagacgguguugauuuuaauacccuucugcagucaaugaaggaugaauuucugaaaacucucaaucuguccgauauucccacccaggacagcgcuaaggucgacccucccgaauacaugcucgaauuguauaauaaguucgcaacagauaggaccucaaugcccucugccaacaucauacguuccuucaaaaacgaagaucuuuuuucgcagccuguuuccuuuaacgggcucagaaaguacccacuccuauuuaaugucucaaucccacaucacgaagaagugauuauggcugagcuuagacuguauacguuagugcagcgcgaccgcaugauuuacgaugguguagaucggaaaauaaccauuuuugaggugcuggaaucaaaaggagauaacgagggcgagaggaauaugcuaguguuagucaguggugaaauuuaugggaccaacucagaaugggaaacauuugauguaaccgacgccauucggcgguggcagaagucuggcucuuccacacaccaauuggagguacauauugagucuaaacacgaugaggccgaagacgcaucauccggucgccucgaaauagauaccucugcccaaaauaaacacaacccccugcuuauaguguuuucugacgaccaaucuagcgauaaggagcggaaagaagagcugaacgagaugauuucacaugaacagcugccugaauuggauaaucugggccuagacucauuuagcaguggacccggagaagaagcucuucuccagaugagaaguaacauuaucuacgauaguacagcuagaauuagacgcaaugccaaggggaacuacugcaaaagaacaccccucuauauugacuucaaggagauuggcugggacucauggauuaucgcucccccuggguaugaagccuacgaaugccgcggaguguguaauuacccucuugcugagcacuuaacgcccaccaaacaugccaucauacaagcccuuguucacuuaaaaaacucacagaaagcuuccaaagccugcuguguaccaacuaagcuugagccuaucagcauucucuaccuugauaagggaguggugacuuacaaauuuaaauacgaaggcauggcgguaucagaauguggcuguagauag

SEQ ID NO: 180364 - protein, 420 aa, Artificial Sequence
  derived and/or modified sequence
MGKRLDQPQMYPQYTYYYPHYLQTKQSYAPAPHPMAPPSPSTNSSSNNSSNNSSGEQLSKTNLYIRGLPPGTTDQDLIKLCQPYGKIVSTKAILDKNTNQCKGYGFVDFDSPAAAQKAVASLKANGVQAQMAKQQEQDPTNLYISNLPISMDEQELENMLKPFGHVISTRILRDANGVSRGVGFARMESTEKCEVVIQHFNGKYLKTPPGIPAPSEPLLCKFADGGQKKRQNQSKYTQNGRPWPREGEAGMALTYDPTAAIQNGFYSSPYSIATNRMIPQTSITPFIAASPVSTYQVQSTSWMPHPPYVMQPTGAVITPTMDHPMSMQPANMMGPLTQQMNHLSLGTTGTYMTAAAPMQGTYIPQYTPVPPTAVSIEGVVADTSPQTVAPSSQDTSGQQQQIAVDTSNEHAPAYSYQQSK

SEQ ID NO: 180365 - DNA, 1598 bp, Artificial Sequence
  derived and/or modified sequence
ttctacagatctcactcctcgccctttttttttttcctttggtgtgtgttttttgttttgttttgttttttaaaaaaattcttgctgtgttggaactagcgagtggtggagtctctgaagcctcatcagtcaccgggactgtcaggaatagtggtttaagaggaagctcggcctggggcactataccctgtcatccagttccctgcctcggagataaagattccagctacatgggcaaacgcctggatcagccacaaatgtacccccagtacacttactactatcctcattatctccaaaccaagcagtcctatgcaccagctccccaccccatggctcctcccagccccagcacaaacagcagcagcaacaacagcagcaacaacagcagcggggaacagttgagtaaaaccaacctgtacattcgaggcctcccaccaggcaccactgaccaggacctaatcaagctgtgccaaccgtatggaaaaattgtatctacaaaggcaattcttgacaaaaacacaaatcagtgcaaaggttatggttttgtagattttgacagtcctgcagccgcacagaaagcggtagcatctctcaaggcaaatggcgtgcaggcacagatggctaagcaacaagagcaagacccaacaaacctatacatctcaaatctccccatttctatggatgagcaggagcttgagaatatgctgaaaccctttggacatgtcatttccacaagaatactaagagacgctaatggagtcagcagaggtgttggctttgccagaatggagtctactgaaaaatgtgaagtggtaattcaacattttaatggaaaatatctgaaaacaccaccaggcatcccagcccccagtgagcctttgctgtgcaaattcgctgatggaggacaaaagaagcgacagaatcaaagcaaatatacccagaatgggaggccttggcccagggaaggagaggctggcatggctttgacctatgaccccacagctgccatacagaatggattttattcttcaccgtacagtattgcaaccaaccgcatgattccacagacatctatcacgccattcattgctgcttcccctgtctccacataccaggtccagagtacttcatggatgcctcatccgccatacgttatgcaaccaacaggtgctgtgattacaccaaccatggaccatcccatgtcaatgcagccagccaacatgatgggcccactgacacagcagatgaatcacctttcgttgggcacaacaggaacgtatatgactgctgctgctcctatgcaagggacctacattcctcagtacacgcctgtgcctccgacagctgtttctattgaaggtgttgttgctgatacctctccccagacagtggcaccttcatcccaggacaccagtggtcagcagcaacagatagcagtggacacatccaacgaacatgcacctgcatattcttaccaacagtctaagtaagtctgggctgtgctaagctcttttcctcaagatcagccatcttgacatcactctctcatgttgtatgtgttagcttttgctgaaatataaaccatcccaaactta

SEQ ID NO: 180366 - DNA, 1263 bp, Artificial Sequence
  derived and/or modified sequence
atgggaaagcgattggaccagcctcaaatgtaccctcaatacacctactactatcctcactacctccaaacaaagcagagttacgctcctgcccctcaccctatggccccaccaagtccttctactaattcttcatcgaataatagttctaataactccagcggggagcaattaagcaagacgaatttgtacattagggggttaccccccggcactactgaccaagacttaatcaagctttgccaaccctacggtaaaatcgtatcaaccaaggcaattctggataaaaataccaatcagtgtaaggggtacggttttgttgactttgatagccccgcagccgcccagaaagccgtggcctcgctgaaggctaacggggtccaggcccagatggcgaagcagcaagagcaagatccaacaaatctctacatttcaaacctgcctatttccatggacgagcaagagctggaaaacatgcttaagccgttcgggcacgtgatctccacccggattctgagagatgcaaatggcgttagtagaggggtcggcttcgcacggatggagagcaccgaaaaatgtgaggtcgtaatacaacatttcaacggtaagtatctgaagacccccccaggcatcccagccccaagtgagccgttgctctgcaagttcgccgacggcggccaaaagaagagacagaatcagagcaaatatacccagaatggccggccgtggcctagagaaggcgaagctggaatggcccttacgtacgaccccacagctgctatccaaaacggattctactcgtcgccatactcgatcgccaccaatcgtatgattccacagacctccatcacgccattcattgcagcttctcctgttagcacataccaggttcaaagcacaagctggatgcctcaccccccatatgtgatgcagcccaccggcgcagtcataacacccacgatggaccacccaatgtcaatgcagcccgctaatatgatgggccctctaacacagcaaatgaaccatctttcactcgggacgacaggaacctacatgacagccgccgccccaatgcagggtacctacatcccgcagtatacacctgtccccccaaccgcggtgagcattgagggagtggtggcagacacaagcccacagactgtcgctccctctagtcaagatacatcgggccagcaacagcagatagccgtcgacacttcaaatgaacacgctccggcctactcctatcagcaaagcaagtag

SEQ ID NO: 180367 - DNA, 1263 bp, Artificial Sequence
  derived and/or modified sequence
atgggcaagaggctggaccagccccagatgtacccccagtacacctactactacccccactacctgcagaccaagcagagctatgccccagccccccaccccatggccccacccagccccagcaccaacagcagcagcaacaacagcagcaacaacagcagcggggagcagctgagcaagaccaacctgtacatccggggcctgcccccaggcaccacagaccaggacctgatcaagctgtgccagccctacggcaagatcgtgtccaccaaggccatcctggacaagaacaccaaccagtgcaagggctacggctttgtggactttgacagccctgctgctgcccagaaggctgtggccagcctgaaggccaatggagtgcaggcccagatggccaagcagcaggagcaggaccccaccaacctgtacatcagcaacctgcccatctccatggatgagcaggagctggagaacatgctgaagccctttggacatgtgatcagcacccgcatcctgagagatgccaacggggtgtccagaggagtgggctttgccaggatggagagcacagagaagtgtgaggtggtgatccagcacttcaacgggaagtacctgaagaccccacctggcatcccagcccccagcgagcccctgctgtgcaagtttgctgatggcggccagaagaagaggcagaaccagagcaagtacacccagaatggccggccctggccccgggagggggaggccggcatggccctgacctatgaccccacagctgccatccagaatggcttctacagcagcccctacagcatcgccaccaacaggatgatcccccagaccagcatcacccccttcatcgccgccagccctgtgtccacctaccaggtgcagagcacctcctggatgccccaccccccctacgtgatgcagcccactggagctgtgatcacccccaccatggaccaccccatgtccatgcagcctgccaacatgatgggccccctgacccagcagatgaaccacctgagcctgggcaccaccggcacctacatgacagctgctgcccccatgcagggcacctacatcccccagtacacccctgtgcccccaacagctgtgtccattgagggcgtggtggccgacaccagcccccagacagtggcccccagcagccaggacaccagcggccagcagcagcagattgctgtggacaccagcaatgagcacgccccagcctacagctaccagcagagcaagtag

SEQ ID NO: 180368 - DNA, 1263 bp, Artificial Sequence
  derived and/or modified sequence
atgggcaagcggctggaccagccccagatgtacccccagtacacctactattacccacactacctccagaccaagcagtcttacgctcccgcccctcaccccatggccccacctagtccctccacgaatagctccagcaacaattccagtaacaactcctcaggtgagcagctctcaaaaacaaacctatatatccggggtctgccacctgggaccacagatcaagacttaatcaagctgtgccagccatacggcaaaattgtgtccactaaggccatcctggacaaaaatacaaaccagtgtaaaggctacggtttcgtggattttgatagccccgccgccgcgcagaaggctgtcgctagcttgaaagccaatggagtgcaggctcagatggccaagcagcaggagcaagaccccacaaatttatatatctcaaatttacctatctcgatggatgagcaagaattggaaaacatgcttaaaccattcggccacgtgattagcaccaggatcctgcgcgacgctaacggcgtgtcaaggggagtcggtttcgccagaatggagtccacagaaaagtgcgaagtggtcattcagcattttaacgggaagtacctcaagacccctcccggaatccctgccccatctgagcctcttctgtgtaaatttgctgacggtggtcaaaagaaacgacagaaccagagtaagtacactcagaacggccgaccttggcctagagagggtgaggcagggatggcactgacctacgacccaaccgccgccatacagaatggcttctattcttctccttatagcatcgccaccaatcgcatgattccacagacgtcaatcacccccttcattgcagccagtcccgtgagtacttatcaggtgcagagtacctcgtggatgccccacccgccttacgtgatgcagccaactggggcggtgatcacaccgaccatggatcaccccatgagcatgcaaccggccaacatgatgggtcctctcacacaacagatgaaccatctctcccttggaacaaccggtacttatatgacagctgcagcccccatgcaaggcacatacatccctcaatacacccccgtcccgccaacagccgtcagcatcgaaggcgtcgtcgcagacaccagcccccagacagtggctccatccagccaagacactagcggccagcagcagcagatagctgtggatacctccaatgagcatgcccctgcctactcatatcagcagtcaaaatag

SEQ ID NO: 180369 - DNA, 1263 bp, Artificial Sequence
  derived and/or modified sequence
atgggcaagcgattggatcaaccccagatgtacccacagtacacgtattactacccccactatctacagacaaagcaatcgtacgcgcctgcccctcatccaatggctcctccatctcccagcaccaactcctcttctaacaactcaagcaataactcatctggtgagcagctgtcaaagaccaatctttatatcagaggtcttccccctggtacaacagatcaggatctgattaagttgtgccagccttacggaaaaattgtgtcaaccaaagctattctcgacaaaaacacgaaccagtgcaagggctacgggttcgtagatttcgattccccagccgcagcccagaaggctgtggctagcctgaaggcgaacggcgttcaggcccaaatggctaaacagcaggaacaggatccgaccaacctgtacattagtaatctccctatatcaatggatgaacaggaattggaaaacatgctgaagcctttcggacacgtaatcagcactagaattctgcgcgatgcgaatggggtttcccgaggcgttggcttcgctcggatggagtcgaccgagaagtgtgaggtcgtgatacagcacttcaacgggaaatacctgaagacccccccaggaattcccgctcctagcgagccgctgttgtgtaaattcgccgacgggggacagaagaaacgacagaatcagtccaaatatacccagaacggcagaccctggccacgggaaggtgaggccggtatggcactcacctacgatccaacagcagccatccagaatggattctacagctccccttattctattgccactaataggatgattccacagacgtccatcaccccctttatagctgcttcccccgtgagtacgtaccaggttcagtccacctcctggatgccccacccaccttatgtgatgcagcctaccggagcagtcattactcctaccatggatcatcccatgtcaatgcaacctgccaacatgatggggccattgacacaacagatgaatcatcttagcttaggaaccacaggcacatacatgacagcagctgccccaatgcagggtacgtacataccccagtatacgccagtgccacctacagccgtgtccattgagggtgtggtggcagatacatctcctcagactgttgcccctagctcccaggacaccagcggacagcagcagcagatcgcagtcgatactagtaacgagcacgcccctgcgtatagctaccaacagagtaaatag

SEQ ID NO: 180370 - DNA, 1263 bp, Artificial Sequence
  derived and/or modified sequence
atgggcaagagactggaccagccccagatgtacccccagtacacctactactacccccactacctgcagaccaagcagagctacgcccccgccccccaccccatggccccccccagccccagcaccaacagcagcagcaacaacagcagcaacaacagcagcggcgagcagctgagcaagaccaacctgtacatcagaggcctgccccccggcaccaccgaccaggacctgatcaagctgtgccagccctacggcaagatcgtgagcaccaaggccatcctggacaagaacaccaaccagtgcaagggctacggcttcgtggacttcgacagccccgccgccgcccagaaggccgtggccagcctgaaggccaacggcgtgcaggcccagatggccaagcagcaggagcaggaccccaccaacctgtacatcagcaacctgcccatcagcatggacgagcaggagctggagaacatgctgaagcccttcggccacgtgatcagcaccagaatcctgagagacgccaacggcgtgagcagaggcgtgggcttcgccagaatggagagcaccgagaagtgcgaggtggtgatccagcacttcaacggcaagtacctgaagaccccccccggcatccccgcccccagcgagcccctgctgtgcaagttcgccgacggcggccagaagaagagacagaaccagagcaagtacacccagaacggcagaccctggcccagagagggcgaggccggcatggccctgacctacgaccccaccgccgccatccagaacggcttctacagcagcccctacagcatcgccaccaacagaatgatcccccagaccagcatcacccccttcatcgccgccagccccgtgagcacctaccaggtgcagagcaccagctggatgccccaccccccctacgtgatgcagcccaccggcgccgtgatcacccccaccatggaccaccccatgagcatgcagcccgccaacatgatgggccccctgacccagcagatgaaccacctgagcctgggcaccaccggcacctacatgaccgccgccgcccccatgcagggcacctacatcccccagtacacccccgtgccccccaccgccgtgagcatcgagggcgtggtggccgacaccagcccccagaccgtggcccccagcagccaggacaccagcggccagcagcagcagatcgccgtggacaccagcaacgagcacgcccccgcctacagctaccagcagagcaagtag

SEQ ID NO: 180371 - protein, 199 aa, Artificial Sequence
  derived and/or modified sequence
MPNYKLTYFNMRGRAEIIRYIFAYLDIQYEDHRIEQADWPEIKSTLPFGKIPILEVDGLTLHQSLAIARYLTKNTDLAGNTEMEQCHVDAIVDTLDDFMSCFPWAEKKQDVKEQMFNELLTYNAPHLMQDLDTYLGGREWLIGNSVTWADFYWEICSTTLLVFKPDLLDNHPRLVTLRKKVQAIPAVANWIKRRPQTKL

SEQ ID NO: 180372 - DNA, 600 bp, Artificial Sequence
  derived and/or modified sequence
atgcccaattacaagttgacgtactttaacatgcgaggacgtgccgaaataatccgatacatctttgcctatcttgacatccaatacgaggaccaccgaatcgaacaggccgattggcccgaaatcaaaagcacactgcctttcgggaaaattcccattctggaagtagacggactgactttgcaccaaagccttgccatagcacgttatctcacgaaaaatacagacctcgccggtaataccgagatggaacaatgccacgtggacgctattgtcgatactctagatgatttcatgtcttgttttccgtgggccgaaaaaaagcaggacgttaaagagcaaatgtttaatgagttgctgacgtataatgctccccatctgatgcaggatctcgacacatatttagggggcagagagtggctgattgggaactctgtcacgtgggctgatttctattgggaaatttgtagcaccacactcctggtctttaaaccggacctccttgataaccatccacgactagtgacgctgcgaaagaaggtgcaggccattccagcagttgctaactggatcaagcgaagacctcaaactaaactctag

SEQ ID NO: 180373 - DNA, 1636 bp, Artificial Sequence
  derived and/or modified sequence
acttactcgtcatataaacccaaggcacagtcacatacccagggatacaagacactgcagactcccgagagacataacacagaattgcaccatgccaaactacaaactcacttattttaatatgagggggagagcagaaattattcgttacatatttgcttatttggacatacagtatgaagaccacagaatagaacaagctgactggcctgaaatcaaatcaactctcccatttggaaaaatccccattttggaagttgatggacttactcttcaccagagcctagcaatagcaagatatttgaccaaaaacacagatttggctggaaacacagaaatggaacaatgtcatgttgatgctattgtggacactctggatgatttcatgtcatgttttccttgggcagagaaaaagcaagatgtgaaagagcagatgttcaatgagctgctcacgtataatgcgcctcatcttatgcaagacttggacacatatttaggggggagagaatggcttattggtaactctgtaacttgggcagacttctactgggagatttgcagtaccacacttttggtctttaagcctgacctgttagacaaccatccaaggctggtgactttacggaagaaagtccaagccattcctgccgtcgctaactggataaaacgaaggccccaaaccaaactctagctgatccatgttgccttcaagtttgtttttctcgggggcatctctctcatcagataagacagctacatcagcctgccagataatccacatgctccctccccagctccactaagattttcactttagccatattctgatttttaaaaaggaaaataaaaacaaatctttcttcagtatctttttctttcagaatagcttctcatcatttacaattacagaaaaatagtatgtaatacaggcagaccttgctttgcacaggttctaacatgcacgaattgcagtcataatggtttagcaacaccattcttcccctcccccaaaatgttttggacttcagctaccacaattacctgtaattgcataaaacacaaactttgctagtagctctccagttcacatatcgctgtgtaaataacctatgtacatcatgaccaatgaccagtcacttctatcaaagactgccagaggtcactgcacatctgttattcctgcatagatagcaaagtgtgtagttgtattgctattgcctgcttgtggcccagtgataaatccctttgacattttacaaaaatgaatcaaaagagggaactccccaacaaagatgaaagtgcagcaaaggaacaaaaactgataatcctggaatgaaattcaaactgaatataaagagttatcgagaaaagagctgactgtgggaatctgacacggctcaaaaggctctagatatgcagccagagaaacttgtaaagatgaatttactgacatgaataaagttgttgtgatgagaaaaatgtagataccccagagatcaagagaaggagaagacaagccacagacttggagaaaatacttgtaaaacatgtatctgacaaaagactattattcaaaattatatagaactcataaaactcggctgactctcttttcggactcagcccacctgcaccc

SEQ ID NO: 180374 - DNA, 600 bp, Artificial Sequence
  derived and/or modified sequence
atgcccaactacaagctgacctacttcaacatgaggggccgggcagagatcatccgctacatctttgcctacctggacatccagtatgaggaccaccgcatcgagcaggccgactggccagagatcaagagcaccctgccctttgggaagatccccatcctggaggtggatggcctgaccctgcaccagagcctggccatcgcccgctacctgaccaagaacacagacctggccggcaacacagagatggagcagtgccacgtggatgccatcgtggacaccctggatgacttcatgagctgcttcccctgggccgagaagaagcaggatgtgaaggagcagatgtttaatgagctgctgacctacaatgccccccacctgatgcaggacctggacacctacctgggcggccgggagtggctgattggcaacagcgtgacctgggccgacttctactgggagatctgcagcaccaccctgctggtgttcaagccagacctgctggacaaccacccccggctggtgaccctgaggaagaaggtgcaggccatcccagctgtggccaactggatcaagagaagaccccagaccaagctgtag

SEQ ID NO: 180375 - DNA, 600 bp, Artificial Sequence
  derived and/or modified sequence
atgcccaactacaagctgacctacttcaacatgcggggccgggccgaaataatcaggtatatctttgcgtacctggacatacagtacgaggaccacagaatcgagcaggcggactggcccgagatcaaatctactctaccattcggcaaaatacccatacttgaggtcgatggtctcacattgcaccagagtctggcaattgcccgatacctcaccaaaaacacagacctggccggtaataccgagatggagcagtgtcatgttgacgccatcgtggatactcttgatgacttcatgagttgcttcccctgggccgagaagaagcaagacgttaaggagcaaatgttcaacgagctactgacttacaacgccccacatctgatgcaagatctcgatacttatctgggtggccgagagtggttgattggtaattctgtgacctgggcggatttttactgggagatctgttcaactaccctcctggtgttcaaacccgacctgcttgataaccatcctcgcctggttacattgcgtaagaaagtccaggcgatccctgctgtagctaattggatcaagcgccgccctcaaacgaagctatag

SEQ ID NO: 180376 - DNA, 600 bp, Artificial Sequence
  derived and/or modified sequence
atgcctaactataagctgacctactttaacatgagaggaagagccgagatcatccggtacatttttgcctatcttgacatccaatacgaagatcaccgcattgaacaggccgattggcctgaaataaagtccactctgcctttcgggaagattcccattttagaggtggacggactgacactgcaccagtctttggccatagcacgctaccttactaaaaacactgacttggctgggaacactgaaatggagcaatgccatgtcgatgccattgtggacaccctcgatgattttatgagctgcttcccttgggctgagaaaaagcaggatgtgaaagagcaaatgttcaatgaactcctcacttacaatgcccctcaccttatgcaggatctggatacataccttgggggtagagagtggcttattgggaattcagttacatgggcagacttttactgggagatctgtagcacaaccctgctcgtattcaaaccagacttgctggataatcatccgaggttagtcactcttaggaagaaggtccaagctattcctgctgtggcgaactggatcaagcgacgtccccaaacaaaactctag

SEQ ID NO: 180377 - DNA, 600 bp, Artificial Sequence
  derived and/or modified sequence
atgcccaactacaagctgacctacttcaacatgagaggcagagccgagatcatcagatacatcttcgcctacctggacatccagtacgaggaccacagaatcgagcaggccgactggcccgagatcaagagcaccctgcccttcggcaagatccccatcctggaggtggacggcctgaccctgcaccagagcctggccatcgccagatacctgaccaagaacaccgacctggccggcaacaccgagatggagcagtgccacgtggacgccatcgtggacaccctggacgacttcatgagctgcttcccctgggccgagaagaagcaggacgtgaaggagcagatgttcaacgagctgctgacctacaacgccccccacctgatgcaggacctggacacctacctgggcggcagagagtggctgatcggcaacagcgtgacctgggccgacttctactgggagatctgcagcaccaccctgctggtgttcaagcccgacctgctggacaaccaccccagactggtgaccctgagaaagaaggtgcaggccatccccgccgtggccaactggatcaagagaagaccccagaccaagctgtag

SEQ ID NO: 180378 - DNA, 948 bp, Artificial Sequence
  derived and/or modified sequence
atgtaccaggtgcccctgcccctggacagagacggcaccctggtgagactgagattcaccatggtggccctggtgaccgtgtgctgccccctggtggccttcctgttctgcatcctgtggagcctgctgttccacttcaaggagaccaccgccacccactgcggcgccaccccctgcagaatgttcagcgccgccagccagcccctggaccccgacggcaccctgttcagactgagattcaccgccatggtgtggtgggccatcaccttccccgtgttcggcttcttcttctgcatcatctggagcctggtgttccacttcgagtacaccgtggccaccgactgcggcgtgcccaactacctgcccagcgtgagcagcgccatcggcggcgaggtgccccagagatacgtgtggagattctgcatcggcctgcacagcgcccccagattcctggtggccttcgcctactggaaccactacctgagctgcaccagcccctgcagctgctacagacccctgtgcagactgaacttcggcctgaacgtggtggagaacctggccctgctggtgctgacctacgtgagcagcagcgaggacttcaccatccacgagaacgccttcatcgtgttcatcgccagcagcctgggccacatgctgctgacctgcatcctgtggagactgaccaagaagcacaccgtgagccaggaggacagaaagagctacagctggaagcagagactgttcatcatcaacttcatcagcttcttcagcgccctggccgtgtacttcagacacaacatgtactgcgaggccggcgtgtacaccatcttcgccatcctggagtacaccgtggtgctgaccaacatggccttccacatgaccgcctggtgggacttcggcaacaaggagctgctgatcaccagccagcccgaggagaagagattctag

SEQ ID NO: 180379 - DNA, 948 bp, Artificial Sequence
  derived and/or modified sequence
atgtatcaggtccccttgcccctggaccgggacggcactctcgttcgcctcagattcactatggtggccctcgttacagtatgttgtcccttagtagctttcctgttttgtatactttggtcccttctcttccattttaaagagactactgccacacactgtggtgctaccccatgtaggatgttcagcgctgccagtcagccactcgatcctgacggaacactgtttaggctcagattcaccgccatggtgtggtgggcgattaccttcccggtctttggcttttttttctgtatcatttggagtctggtctttcacttcgagtacacagtggccactgattgcggagtgcccaattacctgcctagcgtctcaagtgctataggaggcgaagtcccccagcgctatgtatggcgattttgtatcggtctccactcagcccctagattcttggttgccttcgcatactggaatcactacttatcttgtacttctccttgcagctgttaccgcccactctgtcgactcaatttcgggctcaacgtcgtggagaaccttgccttgcttgtgctgacctacgtgagttccagcgaggacttcacaatccatgagaatgcatttatagtcttcattgctagctcactgggccacatgctgctgacatgtatcctgtggaggcttacgaagaaacatacagtgtcacaggaggatcgaaaaagttactcttggaaacagcgtctattcatcatcaactttattagtttcttttctgcactcgctgtgtattttcggcacaatatgtactgtgaagcaggcgtctacaccatctttgccattctcgagtataccgtcgtgttaaccaatatggccttccatatgaccgcttggtgggatttcggaaataaggagctgttgatcacaagtcaaccagaagaaaaaaggttctag

SEQ ID NO: 180380 - DNA, 948 bp, Artificial Sequence
  derived and/or modified sequence
atgtaccaggttcctcttcctctggatcgagatgggaccctggtgagactgagatttaccatggtggccctggtgactgtatgctgtccccttgttgccttcctgttctgcattctgtggtcactgctctttcactttaaggaaaccacagctacgcactgcggcgccactccgtgcaggatgttctccgccgcaagccaaccgttagaccccgacggtacactgttcaggctgcgatttactgctatggtttggtgggctattacatttccggtctttgggttctttttctgcatcatttggagtctcgtattccactttgaatacacagtagctactgattgtggcgttcccaattatctcccttctgtgagcagcgctattggaggtgaggtgccccaaaggtacgtctggaggttttgtatcgggctgcacagtgcacctcgttttctggtggcattcgcttattggaaccattacctttcctgtacgtccccctgctcatgctaccggccactatgcaggctgaattttggactgaatgtggtagagaacctggccttgcttgtgctcacctacgtctcctcatccgaggactttaccattcatgagaatgcattcatcgtctttattgcctcgtccctgggacacatgctcctcacctgcatcctctggaggctgaccaaaaagcatactgtgtctcaggaggaccgcaagtcctactcttggaagcagcgcctgtttattataaactttatcagctttttttcagcattagctgtctattttcgacacaacatgtattgcgaggccggagtttacacaatctttgcaatcctggagtatacagtagtgctgactaacatggcttttcatatgacagcatggtgggattttgggaacaaagaactgctcatcacctcacaacccgaggagaaacgcttctag

SEQ ID NO: 180381 - DNA, 948 bp, Artificial Sequence
  derived and/or modified sequence
atgtaccaggtgcccctgcccctggacagagatggcaccctggtgcggctgcgcttcaccatggtggccctggtgacagtgtgctgccccctggtggccttcctgttctgcatcctgtggagcctgctcttccacttcaaggagaccacagccacccactgtggggccaccccctgcaggatgttttctgctgccagccagcccctggaccctgatggcaccctcttccggctgcgcttcaccgccatggtgtggtgggccatcaccttccctgtgtttggcttcttcttctgcatcatctggagcctggtgttccactttgagtacacagtggccacagactgtggggtgcccaactacctgcccagcgtgagcagcgccatcggcggggaggtgccccagcgctacgtgtggaggttctgcatcggcctgcacagcgccccccgcttcctggtggcctttgcctactggaaccactacctgagctgcaccagcccctgcagctgctaccggcccctgtgccgcctgaactttggcctgaatgtggtggagaacctggccctgctggtgctgacctacgtgagcagcagcgaggacttcaccatccatgaaaatgccttcatcgtgttcatcgccagcagcctgggccacatgctgctgacctgcatcctgtggaggctgaccaagaagcacacagtgtcccaggaggacaggaagagctacagctggaagcagaggctcttcatcatcaacttcatctccttcttcagcgccctggccgtgtacttccgccacaacatgtactgtgaggccggcgtgtacaccatctttgccatcctggagtacacagtggtgctgaccaacatggccttccacatgacagcctggtgggactttggaaacaaggagctgctgatcaccagccagcctgaggagaagcgcttctag

SEQ ID NO: 180382 - DNA, 948 bp, Artificial Sequence
  derived and/or modified sequence
atgtaccaggtgcccctgcccctggaccgggacggcaccctggtgcgcctgagatttacaatggttgcacttgttacagtctgctgccccctggtcgcgtttctattttgtatactgtggtccctgctgtttcactttaaagagacaaccgccacgcactgcggcgcaacgccctgtagaatgtttagcgccgcatctcagcccctcgaccccgatggcacactgttccggctgcgcttcaccgcaatggtgtggtgggccatcactttccctgtttttggtttcttcttttgtatcatctggagtcttgtgttccacttcgaatatactgttgcaaccgactgcggagtacctaactacctgccctctgtttcaagtgctatagggggggaagtaccccagaggtacgtgtggcggttttgtataggtctccactccgcccccaggttcctggtcgccttcgcctactggaaccactacctctcctgtacctccccctgtagttgctaccgtcccctctgtcgcctgaactttggcctgaacgtggtggaaaacctcgcgttgcttgtgctcacctacgtgtcctcttctgaggatttcacaatacacgagaatgcatttatcgtattcatcgcaagctcactgggacatatgttactgacatgtatcctttggaggttaactaaaaaacacaccgtgtcgcaggaagacagaaagagctactcctggaaacagcggctgttcattataaatttcattagcttcttttccgcactcgcagtttacttcagacacaacatgtattgcgaggcaggcgtttataccatcttcgccatcctcgaatatacagtagtgctcacaaatatggctttccacatgacagcctggtgggacttcgggaataaggagcttttgattacatcccaacccgaggagaagcggttttag

SEQ ID NO: 180383 - DNA, 948 bp, Artificial Sequence
  derived and/or modified sequence
atgtaccaggtgcccctgcccctggaccgggacggcaccctggtgcgtcttagatttactatggtagccctggttacggtgtgttgcccattggtggcatttctgttttgtatcctttggtcccttctatttcacttcaaggaaaccactgccacccattgcggcgcgaccccatgcaggatgttcagcgcagcctctcagccattggatcccgatggaacacttttccggctccggtttactgctatggtttggtgggctatcacattccctgtattcggcttctttttttgtatcatttggtctttagtatttcacttcgagtacactgtcgccaccgactgcggggtcccaaattatcttcctagcgtgtcctccgccattggcggcgaggtgccccagcgatacgtttggcggttctgcatagggctccactccgcaccaaggttcctggtcgcattcgcatactggaaccactatttgtcttgcacatccccttgcagttgttatcggccgctgtgcagactcaattttggtctgaacgtcgtggaaaatctcgcacttcttgtactaacctatgtcagcagttcagaggacttcactattcacgaaaacgcttttatcgtgttcatcgctagctcactcggacatatgctcctcacctgtattctttggcgacttacaaagaagcatactgttagccaggaagacaggaaatcttacagctggaagcagcgccttttcatcattaacttcatctcattcttctctgccttagcagtgtatttcagacataatatgtactgcgaagcaggtgtgtacacaatcttcgcgattctggaatacaccgtggtgttgacgaacatggcctttcacatgacagcatggtgggactttggcaacaaagagttgctgattacatctcagcctgaggagaagcgcttttag

SEQ ID NO: 180384 - DNA, 948 bp, Artificial Sequence
  derived and/or modified sequence
atgtatcaggtcccgctgccgctggaccgcgacggaaccctggtacgtctccgcttcaccatggttgctctggtgactgtgtgctgccccctagtggcgttcttgttttgtatactgtggtcactcctctttcactttaaggagactacagccactcactgtggtgctactccgtgcagaatgttttctgccgcttctcagccacttgaccccgacggaacccttttccgactgaggttcacagcaatggtgtggtgggcaattacctttccggtctttgggtttttcttctgtattatctggagtctggtcttccatttcgagtatacagtcgctacagactgtggggttccgaattaccttccaagcgtctcctcagccattggaggggaggtaccgcagagatacgtctggagattctgcattgggctccatagtgcccctcgatttctggtggccttcgcctactggaatcactatctgtcttgcacctccccctgctcttgttatagaccactctgtcgtttgaatttcggtctcaacgtggtagagaacctggcgctcctcgtcctgacatatgtgagcagcagcgaagacttcaccatccacgagaacgcctttattgtgttcattgcctccagtctggggcacatgctcctaacctgtatcctgtggcgacttaccaagaaacacaccgtgagtcaagaggatcgcaaaagctactcctggaaacaacgcctgttcatcattaattttatttcttttttctcagccttagccgtctatttccggcataacatgtattgtgaagccggagtgtatacaattttcgcgatcttagagtatacagtcgtgctaactaatatggccttccacatgacggcatggtgggatttcggcaataaggaactcctgatcaccagtcagcccgaagaaaagagattctag

SEQ ID NO: 180385 - DNA, 948 bp, Artificial Sequence
  derived and/or modified sequence
atgtatcaagtccccctcccacttgatcgagacggcaccctcgtgcggctgaggttcactatggtcgccctggtgacggtctgttgtcccctggtcgctttcctcttttgtattctgtggtccctactttttcactttaaggagaccactgccactcactgcggtgccaccccctgcagaatgttttccgccgctagccagcctctggacccggacggaacactttttagactaagattcaccgcaatggtatggtgggcaataacatttccagtgtttggatttttcttctgcattatctggtcgctggtctttcatttcgaatatacggtcgccaccgattgcggggtgccaaactatctgccctccgtctcttccgccatcggcggagaagtgccccagcggtatgtgtggaggttctgtatcgggctccactctgcccctaggtttcttgtggcctttgcttattggaatcactatctgtcgtgtacatccccatgcagttgttatcggcctctgtgcaggcttaatttcggtttaaacgtcgtggagaacttagccctgctggtcttgacctacgtgtctagtagcgaggatttcactatccacgaaaacgcgttcatcgtgttcatagcatcgagtctcgggcatatgctgctcacctgtattctgtggagactgactaagaaacatactgttagccaggaagatcggaagtcttacagctggaaacagcggctgttcataattaatttcatttccttctttagtgctctggccgtttatttccggcacaacatgtattgcgaagccggtgtgtacactatatttgctattctcgagtacacggtcgtcctcactaacatggcgtttcacatgactgcttggtgggactttggcaacaaagagcttctgattacctcacagcccgaggaaaaacgattctag

SEQ ID NO: 180386 - protein, 222 aa, Artificial Sequence
  derived and/or modified sequence
MMQESATETISNSSMNQNGMSTLSSQLDAGSRDGRSSGDTSSEVSTVELLHLQQQQALQAARQLLLQQQTSGLKSPKSSDKQRPLQVPVSVAMMTPQVITPQQMQQILQQQVLSPQQLQALLQQQQAVMLQQQQLQEFYKKQQEQLHLQLLQQQQQQQQQQQQQQQQQQQQQQQQQQQQQQQQQQQQQQQQHPGKQAKEQQQQQQQQQQLAAQQLVFQQQLL

SEQ ID NO: 180387 - protein, 715 aa, Artificial Sequence
  derived and/or modified sequence
MMQESATETISNSSMNQNGMSTLSSQLDAGSRDGRSSGDTSSEVSTVELLHLQQQQALQAARQLLLQQQTSGLKSPKSSDKQRPLQVPVSVAMMTPQVITPQQMQQILQQQVLSPQQLQALLQQQQAVMLQQQQLQEFYKKQQEQLHLQLLQQQQQQQQQQQQQQQQQQQQQQQQQQQQQQQQQQQQQQQQHPGKQAKEQQQQQQQQQQLAAQQLVFQQQLLQMQQLQQQQHLLSLQRQGLISIPPGQAALPVQSLPQAGLSPAEIQQLWKEVTGVHSMEDNGIKHGGLDLTTNNSSSTTSSNTSKASPPITHHSIVNGQSSVLSARRDSSSHEETGASHTLYGHGVCKWPGCESICEDFGQFLKHLNNEHALDDRSTAQCRVQMQVVQQLEIQLSKERERLQAMMTHLHMRPSEPKPSPKPLNLVSSVTMSKNMLETSPQSLPQTPTTPTAPVTPITQGPSVITPASVPNVGAIRRRHSDKYNIPMSSEIAPNYEFYKNADVRPPFTYATLIRQAIMESSDRQLTLNEIYSWFTRTFAYFRRNAATWKNAVRHNLSLHKCFVRVENVKGAVWTVDEVEYQKRRSQKITGSPTLVKNIPTSLGYGAALNASLQAALAESSLPLLSNPGLINNASSGLLQAVHEDLNGSLDHIDSNGNSSPGCSPQPHIHSIHVKEEPVIAEDEDCPMSLVTTANHSPELEDDREIEEEPLSEDLE

SEQ ID NO: 180388 - protein, 1962 aa, Artificial Sequence
  derived and/or modified sequence
MRELEAKATKDVERNLSRDLVQEEEQLMEEKKKKKDDKKKKEAAQKKATEQKIKVPEQIKPSVSQPQPANSNNGTSTATSTNNNAKRATANNQQPQQQQQQQQPQQQQPQQQPQPQPQQQQPQQQPQALPRYPREVPPRFRHQEHKQLLKRGQHFPVIAANLGSAVKVLNSQSESSALTNQQPQNNGEVQNSKNQSDINHSTSGSHYENSQRGPVSSTSDSSTNCKNAVVSDLSEKEAWPSAPGSDPELASECMDADSASSSESERNITIMASGNTGGEKDGLRNSTGLGSQNKFVVGSSSNNVGHGSSTGPWGFSHGAIISTCQVSVDAPESKSESSNNRMNAWGTVSSSSNGGLNPSTLNSASNHGAWPVLENNGLALKGPVGSGSSGINIQCSTIGQMPNNQSINSKVSGGSTHGTWGSLQETCESEVSGTQKVSFSGQPQNITTEMTGPNNTTNFMTSSLPNSGSVQNNELPSSNTGAWRVSTMNHPQMQAPSGMNGTSLSHLSNGESKSGGSYGTTWGAYGSNYSGDKCSGPNGQANGDTVNATLMQPGVNGPMGTNFQVNTNKGGGVWESGAANSQSTSWGSGNGANSGGSRRGWGTPAQNTGTNLPSVEWNKLPSNQHSNDSANGNGKTFTNGWKSTEEEDQGSATSQTNEQSSVWAKTGGTVESDGSTESTGRLEEKGTGESQSRDRRKIDQHTLLQSIVNRTDLDPRVLSNSGWGQTPIKQNTAWDTETSPRGERKTDNGTEAWGSSATQTFNSGACIDKTSPNGNDTSSVSGWGDPKPALRWGDSKGSNCQGGWEDDSAATGMVKSNQWGNCKEEKAAWNDSQKNKQGWGDGQKSSQGWSVSASDNWGETSRNNHWGEANKKSSSGGSDSDRSVSGWNELGKTSSFTWGNNINPNNSSGWDESSKPTPSQGWGDPPKSNQSLGWGDSSKPVSSPDWNKQQDIVGSWGIPPATGKPPGTGWLGGPIPAPAKEEEPTGWEEPSPESIRRKMEIDDGTSAWGDPSKYNYKNVNMWNKNVPNGNSRSDQQAQVHQLLTPASAISNKEASSGSGWGEPWGEPSTPATTVDNGTSAWGKPIDSGPSWGEPIAAASSTSTWGSSSVGPQALSKSGPKSMQDGWCGDDMPLPGNRPTGWEEEEDVEIGMWNSNSSQELNSSLNWPPYTKKMSSKGLSGKKRRRERGMMKGGNKQEEAWINPFVKQFSNISFSRDSPEENVQSNKMDLSGGMLQDKRMEIDKHSLNIGDYNRTVGKGPGSRPQISKESSMERNPYFDKDGIVADESQNMQFMSSQSMKLPPSNSALPNQALGSIAGLGMQNLNSVRQNGNPSMFGVGNTAAQPRGMQQPPAQPLSSSQPNLRAQVPPPLLSPQVPVSLLKYAPNNGGLNPLFGPQQVAMLNQLSQLNQLSQISQLQRLLAQQQRAQSQRSVPSGNRPQQDQQGRPLSVQQQMMQQSRQLDPNLLVKQQTPPSQQQPLHQPAMKSFLDNVMPHTTPELQKGPSPINAFSNFPIGLNSNLNVNMDMNSIKEPQSRLRKWTTVDSISVNTSLDQNSSKHGAISSGFRLEESPFVPYDFMNSSTSPASPPGSIGDGWPRAKSPNGSSSVNWPPEFRPGEPWKGYPNIDPETDPYVTPGSVINNLSINTVREVDHLRDRNSGSSSSLNTTLPSTSAWSSIRASNYNVPLSSTAQSTSARNSDSKLTWSPGSVTNTSLAHELWKVPLPPKNITAPSRPPPGLTGQKPPLSTWDNSPLRIGGGWGNSDARYTPGSSWGESSSGRITNWLVLKNLTPQIDGSTLRTLCMQHGPLITFHLNLPHGNALVRYSSKEEVVKAQKSLHMCVLGNTTILAEFASEEEISRFFAQSQSLTPSPGWQSLGSSQSRLGSLDCSHSFSSRTDLNHWNGAGLSGTNCGDLHGTSLWGTPHYSTSLWGPPSSSDPRGISSPSPINAFLSVDHLGGGGESM

SEQ ID NO: 180389 - DNA, 5889 bp, Artificial Sequence
  derived and/or modified sequence
atgagagagctggaggccaaggccaccaaggacgtggagagaaacctgagcagagacctggtgcaggaggaggagcagctgatggaggagaagaagaagaagaaggacgacaagaagaagaaggaggccgcccagaagaaggccaccgagcagaagatcaaggtgcccgagcagatcaagcccagcgtgagccagccccagcccgccaacagcaacaacggcaccagcaccgccaccagcaccaacaacaacgccaagagagccaccgccaacaaccagcagccccagcagcagcagcagcagcagcagccccagcagcagcagccccagcagcagccccagccccagccccagcagcagcagccccagcagcagccccaggccctgcccagataccccagagaggtgccccccagattcagacaccaggagcacaagcagctgctgaagagaggccagcacttccccgtgatcgccgccaacctgggcagcgccgtgaaggtgctgaacagccagagcgagagcagcgccctgaccaaccagcagccccagaacaacggcgaggtgcagaacagcaagaaccagagcgacatcaaccacagcaccagcggcagccactacgagaacagccagagaggccccgtgagcagcaccagcgacagcagcaccaactgcaagaacgccgtggtgagcgacctgagcgagaaggaggcctggcccagcgcccccggcagcgaccccgagctggccagcgagtgcatggacgccgacagcgccagcagcagcgagagcgagagaaacatcaccatcatggccagcggcaacaccggcggcgagaaggacggcctgagaaacagcaccggcctgggcagccagaacaagttcgtggtgggcagcagcagcaacaacgtgggccacggcagcagcaccggcccctggggcttcagccacggcgccatcatcagcacctgccaggtgagcgtggacgcccccgagagcaagagcgagagcagcaacaacagaatgaacgcctggggcaccgtgagcagcagcagcaacggcggcctgaaccccagcaccctgaacagcgccagcaaccacggcgcctggcccgtgctggagaacaacggcctggccctgaagggccccgtgggcagcggcagcagcggcatcaacatccagtgcagcaccatcggccagatgcccaacaaccagagcatcaacagcaaggtgagcggcggcagcacccacggcacctggggcagcctgcaggagacctgcgagagcgaggtgagcggcacccagaaggtgagcttcagcggccagccccagaacatcaccaccgagatgaccggccccaacaacaccaccaacttcatgaccagcagcctgcccaacagcggcagcgtgcagaacaacgagctgcccagcagcaacaccggcgcctggagagtgagcaccatgaaccacccccagatgcaggcccccagcggcatgaacggcaccagcctgagccacctgagcaacggcgagagcaagagcggcggcagctacggcaccacctggggcgcctacggcagcaactacagcggcgacaagtgcagcggccccaacggccaggccaacggcgacaccgtgaacgccaccctgatgcagcccggcgtgaacggccccatgggcaccaacttccaggtgaacaccaacaagggcggcggcgtgtgggagagcggcgccgccaacagccagagcaccagctggggcagcggcaacggcgccaacagcggcggcagcagaagaggctggggcacccccgcccagaacaccggcaccaacctgcccagcgtggagtggaacaagctgcccagcaaccagcacagcaacgacagcgccaacggcaacggcaagaccttcaccaacggctggaagagcaccgaggaggaggaccagggcagcgccaccagccagaccaacgagcagagcagcgtgtgggccaagaccggcggcaccgtggagagcgacggcagcaccgagagcaccggcagactggaggagaagggcaccggcgagagccagagcagagacagaagaaagatcgaccagcacaccctgctgcagagcatcgtgaacagaaccgacctggaccccagagtgctgagcaacagcggctggggccagacccccatcaagcagaacaccgcctgggacaccgagaccagccccagaggcgagagaaagaccgacaacggcaccgaggcctggggcagcagcgccacccagaccttcaacagcggcgcctgcatcgacaagaccagccccaacggcaacgacaccagcagcgtgagcggctggggcgaccccaagcccgccctgagatggggcgacagcaagggcagcaactgccagggcggctgggaggacgacagcgccgccaccggcatggtgaagagcaaccagtggggcaactgcaaggaggagaaggccgcctggaacgacagccagaagaacaagcagggctggggcgacggccagaagagcagccagggctggagcgtgagcgccagcgacaactggggcgagaccagcagaaacaaccactggggcgaggccaacaagaagagcagcagcggcggcagcgacagcgacagaagcgtgagcggctggaacgagctgggcaagaccagcagcttcacctggggcaacaacatcaaccccaacaacagcagcggctgggacgagagcagcaagcccacccccagccagggctggggcgacccccccaagagcaaccagagcctgggctggggcgacagcagcaagcccgtgagcagccccgactggaacaagcagcaggacatcgtgggcagctggggcatcccccccgccaccggcaagccccccggcaccggctggctgggcggccccatccccgcccccgccaaggaggaggagcccaccggctgggaggagcccagccccgagagcatcagaagaaagatggagatcgacgacggcaccagcgcctggggcgaccccagcaagtacaactacaagaacgtgaacatgtggaacaagaacgtgcccaacggcaacagcagaagcgaccagcaggcccaggtgcaccagctgctgacccccgccagcgccatcagcaacaaggaggccagcagcggcagcggctggggcgagccctggggcgagcccagcacccccgccaccaccgtggacaacggcaccagcgcctggggcaagcccatcgacagcggccccagctggggcgagcccatcgccgccgccagcagcaccagcacctggggcagcagcagcgtgggcccccaggccctgagcaagagcggccccaagagcatgcaggacggctggtgcggcgacgacatgcccctgcccggcaacagacccaccggctgggaggaggaggaggacgtggagatcggcatgtggaacagcaacagcagccaggagctgaacagcagcctgaactggcccccctacaccaagaagatgagcagcaagggcctgagcggcaagaagagaagaagagagagaggcatgatgaagggcggcaacaagcaggaggaggcctggatcaaccccttcgtgaagcagttcagcaacatcagcttcagcagagacagccccgaggagaacgtgcagagcaacaagatggacctgagcggcggcatgctgcaggacaagagaatggagatcgacaagcacagcctgaacatcggcgactacaacagaaccgtgggcaagggccccggcagcagaccccagatcagcaaggagagcagcatggagagaaacccctacttcgacaaggacggcatcgtggccgacgagagccagaacatgcagttcatgagcagccagagcatgaagctgccccccagcaacagcgccctgcccaaccaggccctgggcagcatcgccggcctgggcatgcagaacctgaacagcgtgagacagaacggcaaccccagcatgttcggcgtgggcaacaccgccgcccagcccagaggcatgcagcagccccccgcccagcccctgagcagcagccagcccaacctgagagcccaggtgcccccccccctgctgagcccccaggtgcccgtgagcctgctgaagtacgcccccaacaacggcggcctgaaccccctgttcggcccccagcaggtggccatgctgaaccagctgagccagctgaaccagctgagccagatcagccagctgcagagactgctggcccagcagcagagagcccagagccagagaagcgtgcccagcggcaacagaccccagcaggaccagcagggcagacccctgagcgtgcagcagcagatgatgcagcagagcagacagctggaccccaacctgctggtgaagcagcagaccccccccagccagcagcagcccctgcaccagcccgccatgaagagcttcctggacaacgtgatgccccacaccacccccgagctgcagaagggccccagccccatcaacgccttcagcaacttccccatcggcctgaacagcaacctgaacgtgaacatggacatgaacagcatcaaggagccccagagcagactgagaaagtggaccaccgtggacagcatcagcgtgaacaccagcctggaccagaacagcagcaagcacggcgccatcagcagcggcttcagactggaggagagccccttcgtgccctacgacttcatgaacagcagcaccagccccgccagcccccccggcagcatcggcgacggctggcccagagccaagagccccaacggcagcagcagcgtgaactggccccccgagttcagacccggcgagccctggaagggctaccccaacatcgaccccgagaccgacccctacgtgacccccggcagcgtgatcaacaacctgagcatcaacaccgtgagagaggtggaccacctgagagacagaaacagcggcagcagcagcagcctgaacaccaccctgcccagcaccagcgcctggagcagcatcagagccagcaactacaacgtgcccctgagcagcaccgcccagagcaccagcgccagaaacagcgacagcaagctgacctggagccccggcagcgtgaccaacaccagcctggcccacgagctgtggaaggtgcccctgccccccaagaacatcaccgcccccagcagacccccccccggcctgaccggccagaagccccccctgagcacctgggacaacagccccctgagaatcggcggcggctggggcaacagcgacgccagatacacccccggcagcagctggggcgagagcagcagcggcagaatcaccaactggctggtgctgaagaacctgaccccccagatcgacggcagcaccctgagaaccctgtgcatgcagcacggccccctgatcaccttccacctgaacctgccccacggcaacgccctggtgagatacagcagcaaggaggaggtggtgaaggcccagaagagcctgcacatgtgcgtgctgggcaacaccaccatcctggccgagttcgccagcgaggaggagatcagcagattcttcgcccagagccagagcctgacccccagccccggctggcagagcctgggcagcagccagagcagactgggcagcctggactgcagccacagcttcagcagcagaaccgacctgaaccactggaacggcgccggcctgagcggcaccaactgcggcgacctgcacggcaccagcctgtggggcaccccccactacagcaccagcctgtggggcccccccagcagcagcgaccccagaggcatcagcagccccagccccatcaacgccttcctgagcgtggaccacctgggcggcggcggcgagagcatgtag

SEQ ID NO: 180390 - DNA, 5889 bp, Artificial Sequence
  derived and/or modified sequence
atgagggagctggaggctaaggctacgaaagatgtcgaacggaacttgagcagagacctggtgcaggaggaggaacagctcatggaagagaaaaaaaaaaagaaagacgataagaagaagaaagaagctgcccagaaaaaagcaactgagcagaaaatcaaggtgccagaacaaatcaaacccagtgtatcacagcctcagcccgctaatagcaataatggcacctcaactgctacttcgacaaacaataacgcaaagcgagccactgctaataatcaacaacctcagcagcaacagcaacagcaacaacctcaacagcaacagccccagcagcaaccccaacctcaaccacagcaacaacagcctcagcaacagccacaggcactcccccgctaccctcgggaggtccctccaaggtttagacatcaggagcataagcagctcctaaaacgaggacagcacttccctgtaatcgccgccaatcttggcagcgccgtcaaggtgctgaattcgcaatcagaatccagcgcactgacaaatcagcagccacagaataacggagaagtgcagaacagtaaaaaccagtctgatattaaccattcgacctctggttctcattatgagaactctcagagggggcctgtaagctctacaagtgactccagtacgaactgtaagaatgccgttgtgagcgacctgagtgagaaggaagcctggcccagtgcccccgggagtgaccccgagctcgcttccgagtgcatggacgcagactccgccagtagcagcgagtcagaacgtaacattacaattatggccagtggaaatactggaggagagaaggacggacttaggaactctaccggcctgggatctcagaacaagttcgtggtggggagctcatcaaataatgtggggcacggcagctcaaccgggccttggggttttagtcatggcgctattatctccacatgtcaggtttctgttgatgcacctgaaagcaagtccgaatcttccaacaatcgcatgaatgcttggggaaccgtgagctcaagcagtaacgggggacttaatccttccacccttaatagtgcctccaatcacggtgcatggccagtgcttgaaaacaatgggttggccctgaaaggtcctgttggctcaggaagctctggaattaacattcagtgttccacgatcgggcaaatgcccaacaatcagagtatcaattcaaaagtatcgggtgggagcacccacgggacttggggcagcttacaggagacatgtgaaagcgaagtttccgggacccagaaggtcagttttagcggtcagcctcaaaacatcactacagagatgaccggccccaataataccacgaactttatgacttcatccctacctaactcaggctccgtccaaaacaatgagctgccgtccagcaacaccggggcctggagggtatccaccatgaaccatccccaaatgcaggctccatctgggatgaacggtacctctctgtctcacttaagcaatggagaatctaaaagcggcgggagttatggcacaacctggggcgcctatggttctaactacagtggcgacaagtgttcagggccaaatgggcaggccaatggtgatacagtgaatgcaaccctcatgcagcccggcgtcaacggcccaatgggcaccaatttccaggtgaatacgaataagggcggcggcgtttgggagtccggggccgccaatagccagtccacctcatggggtagcggcaatggggccaatagcggtggttctcgacggggctggggaacacctgctcaaaacacaggcaccaacctgccttccgtggaatggaacaaactcccttccaaccaacattctaacgattcagctaatggcaacggaaagacgtttacaaacggttggaaatcaaccgaggaggaggatcaaggctcggcaacttctcagactaacgaacagtctagcgtatgggctaagactggtgggactgtcgagagcgatgggtcaactgaaagcacaggcaggctggaggagaagggaaccggcgaaagccagtcccgagatcgccgcaaaatcgaccagcacaccttgctgcagtccatcgttaacagaacggatcttgacccaagggtactgtccaatagcggttggggccagacccccatcaagcagaacacggcgtgggacacagagacatctccgcgcggggagcgtaagacggataatgggaccgaagcctgggggagcagcgctacacaaacattcaactctggggcgtgtatcgacaagacttctccaaatggcaacgacacatcgtctgtgtctggctggggagaccccaagcctgcgctgcggtggggtgactctaagggctctaattgtcagggcggttgggaggatgactccgcagcaactggcatggtgaagtccaatcagtggggaaattgcaaagaagaaaaagctgcatggaatgatagtcaaaaaaataaacagggctggggcgatggacaaaaaagctctcagggatggtctgtatccgcctctgacaattggggcgagactagtaggaacaaccattggggagaggcgaataaaaagagcagctcaggcggaagcgactctgatcgttctgtttccgggtggaatgaactggggaagaccagctcttttacctggggcaataacattaaccctaacaattcaagcggctgggacgaatcaagcaaaccaaccccgtcgcagggatggggggatcctcccaagtccaaccagtccctgggatggggcgattctagcaagccagtcagttccccagattggaacaaacagcaagacattgttggctcctgggggatccctcctgcaacgggaaaaccacctggaaccgggtggctcggtggtcccatccccgctccggcgaaagaggaggagccaacagggtgggaggagcccagtccagagtctattagacgcaaaatggaaatagatgacggaacttctgcctggggagatccatcaaagtacaactacaagaatgttaatatgtggaacaagaatgtgcccaatggtaacagtcggagtgaccagcaagcgcaggtccaccagttgttgacgcccgcctcagcaatcagcaataaggaggccagctccggtagtgggtggggcgagccgtggggagaaccctcaacacccgcaacaacggtggacaacggcacatccgcatggggcaaaccaatcgactcaggaccttcttggggcgagcctattgcagccgcatcaagcactagtacttggggctctagttcagtcgggccccaagctctgtccaagagcggcccaaaatctatgcaggatggctggtgcggggacgacatgcctctgccaggcaatagacctacgggctgggaggaggaggaggacgtcgaaatcggtatgtggaattccaatagttcacaagagctcaattcaagcctgaattggcccccatatactaaaaaaatgagtagtaagggcctttcgggtaagaaacgcaggcgcgaacgcggcatgatgaaagggggcaacaagcaagaagaagcctggattaacccattcgtgaagcagttttccaatattagcttctcaagggactctcccgaagagaacgttcagtctaataaaatggacctcagcggcggaatgctgcaggataaacgtatggaaatcgataaacatagcctgaatatcggcgattataataggacagtaggaaagggccccggttctcgaccccaaatcagcaaagagtcttctatggaacggaacccgtactttgacaaggacggcatagtcgctgatgagagccaaaatatgcaatttatgagcagccagtctatgaaattaccacccagcaattccgccttgcccaatcaggcacttggcagcatagcaggcctggggatgcagaacctcaattctgtgcgccagaacggtaatccatctatgtttggggtgggcaacacagccgcgcaaccaagaggcatgcaacaacctcctgcccaacctttgtctagctcccagcccaatctgcgtgctcaagtgccaccacccttactctcaccccaagttccagtctccttactcaagtacgccccgaataatggtggcttgaacccgctctttggcccccaacaggtggctatgctgaatcagctgagccagcttaatcagctgtctcagattagtcagttgcaaaggctgttggcacagcagcagagggcgcagtcacagcggagcgtgcccagcggaaataggccgcagcaggaccaacagggtcgccccctttccgtccagcaacagatgatgcaacaatcccgccaactcgacccgaacctgttggtgaagcagcagacgccaccaagtcaacagcaacccctccaccagccagctatgaagtcatttctggacaacgtgatgcctcataccacgcccgagctgcagaaaggtcccagccccattaatgctttttcaaactttcccattggactgaatagcaatctgaacgtgaacatggacatgaactctatcaaggagccacagtcccgtctgaggaagtggaccacggtggactctatttccgttaacaccagccttgaccagaattccagcaagcacggcgcaatatcttctggttttcgcttagaagagtcaccctttgtgccctatgatttcatgaactctagcacaagtcctgcaagccccccaggttctatcggggacggttggccccgtgcaaagagtccgaatggcagctcctccgtgaattggccgcccgaattcagacctggcgagccatggaagggctacccaaacatcgacccagagaccgatccatatgtgacgcctgggtccgttattaataatctgtctatcaacactgtgcgggaggtagatcacctacgagatcgcaacagcggctcaagctctagcttgaataccactctcccttcgacctcagcctggagttctatccgagcaagtaattacaacgtacccctaagtagtactgcccagtccacctctgcacggaatagcgactctaagttgacctggtcccccggcagtgtaactaacacatcactggcacatgagctctggaaagtccccctgccacccaaaaatataactgccccatcgcgcccgccacctggcttgaccggacaaaaacctccactgagcacctgggacaattccccgctgaggattggtggagggtggggcaacagcgacgcccggtacacacccggctccagttggggcgaaagttccagcgggcggatcactaactggctggttctcaagaatctgactccacaaattgacggaagcaccctcaggaccctctgtatgcagcatggcccactgattactttccatttaaatctgccgcacggcaacgccctggtcaggtacagttctaaggaagaggtagtgaaggcacagaagtcactgcatatgtgtgtacttgggaatactactatcctcgctgagttcgcatcagaggaggaaatttcaagattcttcgcccagtcgcagtctctcacgccaagccccggttggcagagcctgggctcctcacagtcaagattaggtagtctggattgttcccacagcttcagcagccggaccgatttaaaccattggaacggggctggtttgtcaggaaccaattgtggcgacttgcacgggacaagtctgtgggggacgccccactacagtacaagtctgtggggtcctccctcctcttctgaccctagaggaatcagctctccatcaccaatcaatgcatttctgtcagtggaccacctgggtggcggaggtgaaagcatgtag

SEQ ID NO: 180391 - DNA, 5889 bp, Artificial Sequence
  derived and/or modified sequence
atgagggagctggaggccaaggccaccaaggatgtggagaggaacctgagccgggacctggtgcaggaggaggagcagctgatggaggagaagaagaagaagaaggatgacaagaagaagaaggaggccgcccagaagaaggccacagagcagaagatcaaggtgcctgagcagatcaagcccagcgtgtcccagccccagcctgccaacagcaacaacggcaccagcacagccaccagcaccaacaacaatgccaagagggccacagccaacaaccagcagccccagcagcagcagcagcagcagcagccccagcagcagcagccccagcagcagccccagccccagccccagcagcagcagccccagcagcagccccaggccctgccccgctacccccgggaggtgcccccacgcttccgccaccaggagcacaagcagctgctgaagaggggccagcacttccctgtgattgctgccaacctgggcagcgctgtgaaggtgctgaacagccagagcgagagcagcgccctgaccaaccagcagccccagaacaacggggaggtgcagaacagcaagaaccagagcgacatcaaccacagcaccagcggcagccactatgagaacagccagaggggccctgtgagcagcaccagtgacagcagcaccaactgcaagaatgctgtggtgtctgacctgtctgagaaggaggcctggcccagcgcccctggcagtgaccctgagctggccagcgagtgcatggatgctgacagcgccagcagcagcgagagcgagaggaacatcaccatcatggccagcggcaacacaggaggagagaaggatggcctgaggaacagcacaggcctgggcagccagaacaagtttgtggtgggcagcagcagcaacaacgtgggccacggcagcagcacaggcccctggggcttcagccatggagccatcatcagcacctgccaggtgtctgtggatgcccctgagagcaagtctgagagcagcaacaacaggatgaatgcctggggcaccgtgagcagcagcagcaatggaggcctgaaccccagcaccctgaacagcgccagcaaccacggggcctggcctgtgctggagaacaacggcctggccctgaagggccctgtgggcagcggcagcagcggcatcaacatccagtgcagcaccatcggccagatgcccaacaaccagagcatcaacagcaaggtgtctgggggcagcacccacggcacctggggcagcctgcaggagacctgtgagagcgaggtgtctggcacccagaaggtgtccttcagcggccagccccagaacatcaccacagagatgacaggccccaacaacaccaccaacttcatgaccagcagcctgcccaacagcggctctgtgcagaacaatgagctgcccagcagcaacacaggagcctggagggtgtccaccatgaaccacccccagatgcaggcccccagcggcatgaatggcaccagcctgagccacctgagcaatggagagagcaagagcggcggcagctatggcaccacctggggcgcctacggcagcaactacagcggggacaagtgcagcggccccaacggccaggccaacggggacacagtgaatgccaccctgatgcagcccggggtgaatggccccatgggcaccaacttccaggtgaacaccaacaagggcggcggcgtgtgggagagcggggccgccaacagccagagcacctcctggggcagcggaaatggagccaacagcggcggcagccggcggggctggggcaccccagcccagaacacaggcaccaacctgcccagcgtggagtggaacaagctgcccagcaaccagcacagcaatgattctgccaatggaaatggcaagaccttcaccaacggctggaagagcacagaggaggaggaccagggcagcgccaccagccagaccaatgagcagagctctgtgtgggccaagacaggaggcaccgtggagagtgatggcagcacagagagcacaggccgcctggaggagaagggcactggagagagccagagccgggacaggaggaagattgaccagcacaccctgctgcagagcatcgtgaacagaacagacctggacccccgggtgctgagcaacagcggctggggccagacccccatcaagcagaacacagcctgggacacagagaccagccccagaggagagaggaagacagacaatggaacagaggcctggggcagcagcgccacccagaccttcaacagcggggcctgcatcgacaagaccagccccaatggaaatgacaccagctctgtgtctggctggggagaccccaagccagccctgcgctggggagacagcaagggcagcaactgccagggcggctgggaggatgacagcgctgccaccggcatggtgaagagcaaccagtggggcaactgcaaggaggagaaggccgcctggaatgacagccagaagaacaagcagggctggggagatggccagaagagcagccagggctggagcgtgtctgccagtgacaactggggcgagaccagcaggaacaaccactggggcgaggccaacaagaagagcagcagcggcggcagtgacagcgacagatctgtgtctggctggaatgagctgggcaagaccagcagcttcacctggggcaacaacatcaaccccaacaacagcagcggctgggatgagagcagcaagcccacccccagccagggctggggagacccccccaagagcaaccagagcctgggctggggagacagcagcaagcctgtgagcagcccagactggaacaagcagcaggacatcgtgggctcctggggcatccccccagccaccgggaagcccccaggcaccggctggctgggcggccccatcccagccccagccaaggaggaggagcccaccggctgggaggagcccagccctgagagcatccggaggaagatggagattgatgatggcaccagcgcctggggagaccccagcaagtacaactacaagaatgtgaacatgtggaacaagaatgtgcccaacggcaacagcagaagtgaccagcaggcccaggtgcaccagctgctgaccccagccagcgccatcagcaacaaggaggccagcagcggcagcggctggggcgagccctggggcgagcccagcaccccagccaccaccgtggacaatggcaccagcgcctggggcaagcccattgattctggccccagctggggcgagcccatcgctgctgccagcagcaccagcacctggggcagcagctctgtgggcccccaggccctgagcaagagcggccccaagtccatgcaggacggctggtgtggagatgacatgcccctgcccggcaaccggcccaccggctgggaggaggaggaggatgtggagatcggcatgtggaacagcaacagcagccaggagctgaacagcagcctgaactggccaccctacaccaagaagatgagcagcaagggcctgagcggcaagaagagaagaagagagcggggcatgatgaagggcggcaacaagcaggaggaggcctggatcaacccctttgtgaagcagttcagcaacatctccttcagccgggacagccctgaggagaatgtgcagagcaacaagatggacctgagcggcggcatgctgcaggacaagaggatggagattgacaagcacagcctgaacatcggggactacaacagaacagtgggcaaaggacctggcagccggccccagatcagcaaggagagctccatggagaggaacccctactttgacaaggatggcatcgtggctgatgagagccagaacatgcagttcatgagcagccagagcatgaagctgccccccagcaacagcgccctgcccaaccaggccctgggcagcattgctggcctgggcatgcagaacctgaacagcgtgcggcagaatggaaaccccagcatgtttggagtgggcaacacagctgcccagccccggggcatgcagcagcccccagcccagcccctgagcagcagccagcccaacctgcgggcccaggtgcccccacccctgctgagcccccaggtgcctgtgtccctgctgaagtatgcccccaacaacggcggcctgaaccccctgtttggcccccagcaggtggccatgctgaaccagctgagccagctgaaccagctgagccagatcagccagctgcagaggctgctggcccagcagcagagggcccagagccagaggtctgtgcccagcggcaaccggccccagcaggaccagcagggccggcccctgtctgtgcagcagcagatgatgcagcagagccggcagctggaccccaacctgctggtgaagcagcagaccccacccagccagcagcagcccctgcaccagcctgccatgaagagcttcctggacaacgtgatgccccacaccaccccagagctgcagaagggccccagccccatcaatgccttcagcaacttccccatcggcctgaacagcaacctgaatgtgaacatggacatgaacagcatcaaggagccccagagccggctgaggaagtggaccaccgtggacagcatctctgtgaacaccagcctggaccagaacagcagcaagcatggagccatcagcagcggcttccggctggaggagagcccctttgtgccctatgacttcatgaacagcagcaccagccctgccagccccccaggcagcattggagatggctggccccgggccaagagccccaacggcagcagctctgtgaactggcccccagagttccggcctggagagccctggaagggctaccccaacatcgaccctgagacagacccctacgtgaccccaggcagcgtcatcaacaacctgagcatcaacacagtgcgggaggtggaccacctgcgggacagaaattctggcagcagcagcagcctgaacaccaccctgcccagcaccagcgcctggagcagcatccgggccagcaactacaacgtgcccctgagcagcacagcccagagcaccagcgccaggaacagcgacagcaagctgacctggagccctggctctgtgaccaacaccagcctggcccacgagctgtggaaggtgcccctgccccccaagaacatcacagcccccagcaggcctcctcctggcctgaccggccagaagccacccctgagcacctgggacaacagccccctgcgcatcggcggcggctggggcaacagtgatgcccgctacaccccaggcagctcctggggcgagagcagcagcggccgcatcaccaactggctggtgctgaagaacctgaccccccagattgatggcagcaccctgcggaccctgtgcatgcagcacggccccctcatcaccttccacctgaacctgccccacggcaatgccctggtgcgctacagcagcaaggaggaggtggtgaaggcccagaagagcctgcacatgtgtgtgctgggcaacaccaccatcctggccgagtttgccagcgaggaggagatcagccgcttctttgcccagagccagagcctgacccccagccctggctggcagagcctgggcagcagccagagccggctgggcagcctggactgcagccacagcttcagcagcaggacagacctgaaccactggaatggagctggcctgagcggcaccaactgtggggacctgcacggcaccagcctgtggggcaccccccactacagcaccagcctgtggggcccccccagcagcagtgacccccggggcatcagcagccccagccccatcaatgccttcctgtctgtggaccacctgggcggcggcggggagagcatgtag

SEQ ID NO: 180392 - DNA, 5889 bp, Artificial Sequence
  derived and/or modified sequence
atgcgggagctggaggccaaggccaccaaggacgtggagcggaacctctccagggatctggtgcaagaggaggaacagctgatggaagaaaagaagaagaagaaagatgataagaaaaagaaggaggctgcacagaaaaaggctactgagcagaagattaaagtgcctgagcagatcaagcccagtgtatctcagccccagcctgccaattccaataacggtacctcaactgccacgtctacaaataacaacgccaaaagagccacagcaaataaccagcagccccagcagcagcagcagcagcaacaaccacagcaacagcaaccacagcaacaaccgcagcctcagcctcagcagcagcagcctcaacaacagcctcaggcactcccaagataccccagggaagtacctcccaggtttaggcaccaggaacataaacagctgttgaaaagggggcagcatttccctgtaattgcggcgaatctggggagcgctgtcaaggtgcttaacagccagagtgaatcttctgcactgacaaaccagcagcctcaaaataatggcgaggtccagaactctaagaatcagagtgatattaaccactccacctccgggtcccactacgagaatagtcaaagggggcctgtatccagcacaagcgactcatccacaaattgtaaaaatgcagtggtctctgacctttcagagaaggaggcctggccaagcgcaccaggatctgaccccgagctggcttcagagtgtatggacgcagattccgccagttcgagtgagagcgaaagaaacatcacaattatggcctctggaaacaccggcggcgaaaaggacggtcttcggaattctaccggtctgggatcgcagaacaaattcgttgtgggatcgtcctcaaataatgttgggcacgggtcctctaccgggccatggggcttcagccacggagcaattatctcaacttgccaggtcagtgtggatgctcccgagtccaagtctgagagcagcaataataggatgaacgcttggggaacggtgtcttcctcgtcgaatggaggcctgaacccgagtacccttaactccgcctcaaaccatggagcctggccagtgttggagaacaatggcttagccttgaagggaccagtgggttctggcagctcaggtatcaacatccagtgtagcactatcggccagatgccaaataaccagtcaatcaactcgaaagtgtcgggagggagcacccacgggacgtgggggtcactccaagagacctgtgagagcgaagtctctggaactcagaaagtctccttctccgggcagcctcagaacataactaccgaaatgaccggtccgaacaacacaaccaatttcatgacatcatcactgccgaactccggatcagttcagaacaatgaacttcccagttcgaatacaggagcctggagagtgagcacaatgaatcaccctcaaatgcaggcaccgagcggaatgaatggtacatccttgtctcatctgtcaaatggtgagagcaaaagcggcggaagctacggcaccacatggggagcctacgggtctaattatagcggcgataagtgctctggaccaaatggacaggcaaacggagatacagtgaacgctaccctgatgcaacccggtgtaaacggacctatgggtacgaactttcaggtgaacactaataagggcggaggcgtgtgggagagcggggctgccaattcgcaatcaacgtcatgggggtccggtaatggagcaaactccggcggcagccgccggggctggggaaccccagcccaaaataccggaacgaatctcccaagtgtcgagtggaataaactgccttcaaaccaacattccaatgatagtgccaatggcaatggtaagactttcactaatgggtggaagagtacagaggaggaagaccagggctctgcaacctcccagaccaatgagcagtcctcggtatgggccaagacaggcggtacggtcgaaagcgatggatctactgaatccacgggcagactagaagaaaagggtactggtgagtcacagtccagggacagaagaaaaattgatcagcacaccttgctgcaaagtatcgtgaatcgcactgatttggacccgagggtactcagcaattccggatgggggcagacaccaatcaagcagaatactgcctgggacaccgaaaccagcccacgcggcgagaggaaaacagataacggcaccgaagcctggggatcatcagccacgcagacatttaacagtggggcatgtatcgacaagacctctccgaatggcaatgatacatctagtgtctcagggtggggagatccgaaacccgctctgcggtggggggacagtaaaggaagcaattgtcaagggggctgggaagatgattctgctgccactggcatggttaagtcaaaccaatggggtaactgcaaagaagaaaaagctgcgtggaacgatagtcaaaagaataagcagggatggggcgacggccagaaaagctctcagggatggagtgtttcggcttccgacaactggggcgaaacctcccgcaataatcattggggcgaggctaataagaaatcttcatccggaggtagcgattccgaccgcagtgtgtctggttggaatgaactgggcaaaacaagctcttttacttggggcaataatattaatccaaacaattcctctggatgggacgaatcatccaagcccaccccttctcagggttggggggatccccctaaaagcaaccagagcctagggtggggggactcctctaaaccagtgtcgtccccagactggaacaaacaacaggatatcgtgggttcctggggaattccacccgctacggggaagccacctgggacaggttggctgggcggtcccatccccgctcccgcaaaggaggaagaaccaaccggatgggaggagccttctcccgaaagtatacgacgtaaaatggaaatcgacgacgggactagtgcgtggggcgatccatctaagtacaactataaaaacgttaacatgtggaacaagaacgtgcccaacggcaattcccggagtgaccagcaggcccaagtgcatcagctcctgacccccgcaagcgcgatatcaaataaggaagcttcatccggctcaggatggggcgaaccttggggggagcccagcacgcccgctaccacagttgacaatggaacgtccgcctggggcaaaccaatcgattccggcccctcctggggagagccaattgcggctgctagcagcacctccacctggggatccagcagtgtgggccctcaagccttaagtaagtctggtccaaagagcatgcaggacggttggtgcggcgatgacatgccgctgcccgggaacaggcctactggctgggaggaagaagaagacgtcgagattgggatgtggaactctaatagcagtcaagagctgaattcttcgcttaattggcctccctataccaagaaaatgagttctaagggattatctggtaagaaaagacgtcgagagcgcgggatgatgaagggtggcaataagcaggaagaagcttggattaacccctttgtcaagcagttcagtaacatctccttctctcgcgattccccagaggagaacgtgcaaagtaataaaatggatctcagtgggggcatgttacaggataaacggatggagatcgacaagcacagcttgaatataggagactataatcgcactgtagggaaaggtccagggagccggcctcagatctcaaaagagtcttccatggagcgaaatccgtactttgacaaggacgggattgtggctgatgaaagtcagaacatgcagttcatgtcaagccagagcatgaaactgcccccttcaaacagcgccctgcccaaccaagctctgggaagcatcgccgggctgggcatgcagaacttgaattccgtgagacaaaatgggaacccctctatgttcggggtgggcaacaccgccgcccagcccagaggaatgcagcagccacctgcacagcctctgagctctagccagcctaacctgcgggcccaagttccgccaccactactgtctccccaagtgccagtcagcctgctcaaatacgcccccaataatggaggcctgaatcctttgttcggcccccaacaggtggctatgctcaatcagctgagccagctaaatcagctctcgcagatctcccaacttcagcgcttactggctcagcagcaacgtgcacagtcacagcgctcggtgccctcagggaaccgcccccagcaggatcagcagggcaggccactgagcgttcagcagcagatgatgcagcagtcacgccagctggaccccaatttgcttgtgaaacagcagacccccccgtcccagcagcagcctctgcatcagcctgcgatgaaatctttcctcgacaacgtgatgccacacacaactcctgagctgcagaagggcccaagccccatcaacgccttcagcaactttcccattggcttgaattcaaacctgaacgtgaatatggatatgaacagcatcaaagagccccagtcccgcctgagaaagtggacgaccgtcgactcaatcagcgtgaatacaagtttggaccagaatagctccaagcatggagctatcagcagtggattccgcctggaagaatcgccctttgtgccgtatgactttatgaacagcagcacgtctccggcctctcccccgggtagtatcggagatgggtggccgcgggctaagtctcccaacggctcttcttcggtgaattggcctcctgagttcaggcctggcgagccttggaaagggtacccaaacattgacccggagactgacccatacgtgacccccggtagcgtgatcaataacctaagcatcaacaccgtgagggaagtcgaccatttacgagaccgcaactctggaagttcatccagcctgaatacaacattgccatccacttctgcctggtcgtccatccgcgccagcaattataatgtccctctcagcagtacagctcagagcacatccgcccgcaactctgatagtaaacttacctggtctcctggctcagttaccaacacatcactagcacacgagctgtggaaagtgcccttgcctcctaagaatattacagcccctagtaggccccctcccggactgacgggccagaaaccgccactcagtacttgggataactcccctcttagaatcggaggcggatggggcaatagcgacgctaggtacactcccgggtcctcctggggagagtccagttccggccggatcactaattggctcgtactgaagaatcttaccccacagattgacggaagtaccctgcgcaccctctgcatgcagcacgggccactaatcacctttcacctgaatctgccacatggcaatgctctagttagatactcatccaaggaggaggtggtcaaggcacagaagagtctacacatgtgtgtgcttgggaacactactatcctggctgagttcgcctctgaggaggaaatttccagattcttcgcccagagccagtccttgacgccatcgccgggctggcagagcctggggtcttcccagagccgcttgggttcactggactgctcccactctttcagctcgcggactgacttgaatcactggaacggggccggactgtctgggactaactgcggcgacttgcacggcactagtttgtgggggaccccgcactatagtacatcactttggggacctccatcttcttctgacccccgtggtatttccagtccctcaccaatcaatgcattcctgagcgtggaccacctgggaggaggtggcgaatccatgtag

SEQ ID NO: 180393 - DNA, 5889 bp, Artificial Sequence
  derived and/or modified sequence
atgagagaactagaagcaaaggcaaccaaggacgttgagaggaatctcagccgagatctggtgcaggaagaagagcagttgatggaggagaagaagaagaagaaggacgataaaaagaaaaaggaggccgctcagaaaaaggctactgaacaaaaaattaaggttcccgagcagattaagccctcagtgagtcagccccagcccgcaaattccaataacggtacctccaccgccacctccacaaataacaatgcgaagcgggcaaccgctaataaccagcagccccagcaacaacagcagcagcagcagccccagcaacagcagccccagcagcaaccccaaccacaaccacagcagcaacaaccccagcagcagcctcaagctctgcctaggtatccaagagaggtcccacccagatttagacatcaggagcataagcagttgctgaaaagaggtcagcacttccctgtgatcgccgctaatctggggtccgccgttaaagtgctgaactctcaaagcgagtcaagtgcattaaccaatcagcagcctcagaacaacggcgaggtgcagaatagtaaaaatcagagtgatattaaccatagtactagtggatctcattatgagaactcgcagcgaggtcccgtgtcttctacctccgattctagtaccaattgcaagaatgcggtcgtttctgatttgtctgagaaagaggcttggcccagtgcgccaggttccgatccggaactggcttccgagtgcatggatgcagacagtgctagtagctctgagtctgaaaggaacattacaatcatggcctcgggcaacactggcggtgaaaaggacggtctacgtaactcaacggggcttggaagccaaaacaagttcgtggtaggaagtagtagcaacaatgtcggccacgggagtagtacaggaccatggggattctctcacggcgcaatcatctcaacttgccaggtgtccgtagatgcaccagagagcaagtccgagtccagcaataataggatgaacgcgtgggggaccgtgagttcaagtagcaatgggggacttaatcctagcactctgaatagtgcatccaatcacggagcgtggccggttttggagaataacggcctcgcactgaagggcccagttggcagcgggtcatcaggaatcaacatacagtgctccacaatcggacaaatgcccaataaccagagcattaattccaaagtctccggcggtagcacccatgggacctgggggtctctgcaggagacctgtgagtctgaggtcagcgggacgcagaaggtgtctttctccggccagccccagaacataacgaccgaaatgacagggcctaataacaccactaatttcatgactagttctctccccaacagtggaagtgtacaaaataatgagctgccgtcgtccaacaccggagcctggcgagtatccactatgaatcacccccaaatgcaggcgccatccgggatgaacggcacgtcactgtcccacctcagtaacggcgagagcaagagtggaggaagctatggcacaacatggggagcctacggcagcaattactctggagataagtgctctggaccaaatgggcaggcaaatggtgacactgtgaatgccactttgatgcagcccggagtgaacggtccaatgggaacaaatttccaggttaacacaaataagggcggaggcgtctgggagtccggggctgcaaacagccaatcaacaagctgggggagtggcaacggagccaactctggaggcagtaggcggggttggggcacgcccgctcagaacacaggaacaaatctgccaagcgttgagtggaacaaattgccctcgaaccagcatagcaacgactctgctaacgggaacgggaagaccttcactaatgggtggaaatctaccgaggaggaggaccaagggagtgccacgtcgcagacaaatgagcagtccagcgtatgggccaagactggcggaacagtggaaagcgacggttccactgagagtaccggtcgcctggaagagaagggtactggggagagccagagccgtgaccgtcggaaaatagaccagcacaccctgttgcagtcaattgtaaatcggactgacttggatcctagggtgttatctaatagcggctggggacagacacccattaaacagaacaccgcttgggacactgagacttcccctagaggtgagcggaaaaccgataacggaaccgaggcctggggcagcagcgccacacaaaccttcaactcaggggcttgcatagacaaaactagcccaaacggcaatgatacttcatccgtgtctggctggggcgacccaaaaccagcgttacgctggggggacagcaaaggctccaactgccagggaggatgggaggatgactccgccgcaaccggcatggtgaagagtaaccagtggggcaattgcaaagaagaaaaggctgcctggaatgatagccaaaaaaataagcaggggtggggggacggccaaaaaagcagccagggctggagtgtatctgctagtgacaactggggagaaacaagccgcaacaaccattggggggaagctaacaagaaaagctcatctggtggctcagactctgatcgcagcgtaagcggctggaatgagcttggaaagacctccagctttacatgggggaataatataaaccccaacaacagcagcggatgggacgagtcttctaaacctactccaagtcagggatggggggaccccccaaaaagcaatcagtctttgggttggggggatagctccaaacccgtgtcttcacctgactggaacaaacagcaagacatcgtcggatcttgggggatccctcctgccacaggcaaaccgcctggcactggatggttggggggacctattcctgccccagcaaaagaagaagaaccaactggctgggaagaaccatctccagaatccattcgacgtaagatggaaatcgatgatggtacctccgcctggggcgatccctccaaatacaactacaagaatgtgaatatgtggaataagaacgtacctaacggaaactctaggtcagatcagcaggcacaagtgcatcaactgctgaccccagcaagtgctatatcaaataaggaagcatcttccggctcgggatggggggaaccttggggtgaaccgagcaccccagccacaacagtcgacaatggaacctccgcgtggggtaaacctatcgactcgggcccaagctggggcgaacctatcgcagcagcttcttccacaagtacctggggttcctccagcgtcggtcctcaggcactttccaagtcaggacctaagagcatgcaggacggatggtgcggcgacgatatgccattgcctggcaacaggcctacaggatgggaagaggaagaggatgtggagattgggatgtggaattccaattccagccaggaattgaactcaagccttaattggcccccttacacgaagaaaatgtcaagcaaggggctatcagggaaaaaacggcgacgcgagagaggaatgatgaaggggggaaacaagcaagaggaggcttggattaacccatttgtcaaacaatttagcaatatcagcttttcccgggatagccccgaggagaacgtgcagtcaaataaaatggatctttctggcggaatgctgcaggataaacggatggagattgataagcacagcctgaacattggggattataaccggaccgtcggaaaggggcctgggagtagacctcaaataagcaaagagtcctctatggagagaaatccatacttcgacaaagatggtattgttgccgacgagtctcaaaatatgcagttcatgagctctcagagtatgaaactgcccccttccaattccgccctgcctaatcaggcattaggttctatagcaggcttgggcatgcagaacctcaactcggtccgtcagaatggcaacccgagtatgttcggggtgggaaatacagctgcccaacccagaggcatgcaacagcccccagcacagcccttaagctcttcccagcccaatctgcgagcccaggtgcctccccctttgctgtcccctcaggtgccggtctcactcctgaagtatgctcctaataacgggggactgaacccactgtttgggcctcagcaggttgcgatgttgaatcagctttcccagctcaatcagctgagccagatttctcaattacagaggctgttggcccaacagcaaagggcacagtcacagcgctctgtgccaagtggaaaccggccacagcaggatcaacaggggaggccactgtcagtgcaacagcagatgatgcaacagtcccgtcagttggaccccaacctgctggtgaaacagcaaacaccacccagccaacaacagccattgcatcagcccgcaatgaagtcgttcctggacaatgtaatgcctcacactaccccagagctacagaagggcccttccccaatcaacgcattcagtaactttccaattggcttgaatagcaatctcaacgtaaatatggatatgaacagtataaaagagccgcagtcacggctgcgtaaatggaccacagtcgacagcatttcagtcaacacctccttggatcaaaacagcagtaagcacggagctatcagttccggcttcagactcgaagaaagtcccttcgtgccttatgactttatgaattcaagcacgtctccggcttctccccctggtagtatcggggacggttggcccagagccaaaagcccaaatggatctagttcagttaattggccaccggagttccgtcctggagagccctggaaaggctacccgaacattgatcctgagacagacccctacgtgacacctgggagtgtaataaataacctatctatcaatactgtccgggaagtggatcacctacgggacaggaatagtgggagtagcagctcactaaatacaaccctgccgtctaccagcgcttggtcaagcattcgggctagcaactacaacgtccctctgagcagcacagcgcaatctacttcagccagaaactcagattcaaagctgacctggtcaccgggatcagtgaccaacacatcgttggcgcatgagctgtggaaggtccctctgcccccaaagaacattaccgccccatcccggcctccgcctggcttgacggggcaaaagccccctcttagcacttgggacaatagtcccctgcggatcggcggaggttggggcaatagtgatgccaggtacactcccggtagttcatggggagagagttcttccggcaggatcacaaactggctcgtgttaaaaaacctgactcctcagatcgacggcagcacgttgagaacgttatgcatgcagcatggaccactcatcaccttccacttaaacctgcctcacgggaatgcgctggtgagatattcctccaaggaggaggtcgtgaaagcgcaaaaatcccttcacatgtgcgtgctgggtaacacaaccatcctcgctgaatttgcaagtgaagaggaaataagcagattttttgcacagagtcaatcgttaacaccctctcccggatggcagtccctcggctccagccagtcccgcttggggagcctagactgttcccacagtttttcctctaggacggatctgaaccactggaacggagcgggattatccggaaccaattgcggagacttgcacggcacttcattatggggaaccccacactattccacttcactctggggcccacccagtagcagcgaccccaggggaatcagctcacctagcccgatcaatgcctttctgagtgttgatcacttaggagggggaggggagtctatgtac

SEQ ID NO: 180394 - DNA, 8438 bp, Artificial Sequence
  derived and/or modified sequence
ggcggcagcgggtcggtgtagaaaatggcgctggtgcagcggctcgggcctctccccgcggcgctgcggagggcttgaggctcgcgagcctccttcgccgcgccccacttgctcgtgcactttacacacatgagagaattggaagctaaagctaccaaagacgtagaaagaaatcttagcagggatttagtgcaagaagaagaacagttgatggaagaaaagaaaaagaaaaaagacgacaagaaaaagaaggaagctgctcaaaagaaggccactgaacaaaaaatcaaagtgccagaacagataaagcccagtgtaagccagcctcagcctgccaactctaataacggcacttccacagcaaccagcactaataataatgccaagcgagctacagccaacaatcagcagccacagcagcagcagcaacagcagcagccgcagcagcagcagccacagcagcagccacagccgcagccgcagcagcagcagccacagcagcagccacaggccttgcctcggtatcctcgtgaagtacctccacgatttcgccaccaggaacacaaacagcttctaaagaggggtcagcattttcctgttatagcagcaaaccttggatctgctgttaaggtgttaaacagccagtcagaaagcagtgctttaacaaatcaacagccacaaaataacggagaggtgcagaacagcaaaaaccagtcagatataaaccacagtacttcaggatcccattatgaaaattcccagcggggacctgtgtcttctacaagtgattctagcacaaactgtaagaatgctgttgtaagtgacttgtcggaaaaagaagcatggccctcagcccctggcagtgatccggagttggcttcagaatgtatggatgctgattctgcctccagttctgaatcagagagaaacatcactatcatggcttcagggaacacaggtggtgaaaaagatggccttcggaatagcactggacttggttcccaaaacaagtttgtagttggtagcagcagcaataatgtgggccatggaagtagtactgggccatggggtttttcccatggagccataataagcacatgtcaggtctctgtggatgctcctgaaagcaaatctgaaagtagcaacaatagaatgaatgcttggggcactgtaagttcttcatcaaatggagggttaaatccaagcactttgaattcagctagcaaccatggtgcctggccagtattagagaacaatggacttgccctaaaagggcctgtagggagtggtagttctggcattaatattcagtgcagtactataggccagatgcctaacaatcagagtattaactctaaagtgagtggtggttctacccatggtacctggggaagccttcaggaaacttgtgaatctgaagtaagtggtacacagaaggtttcattcagtggtcaacctcaaaatattaccactgaaatgactggaccaaataacactactaactttatgacctctagtttaccaaactccggttcagtgcagaataatgagctgcctagtagtaacacaggggcctggcgtgtgagcacaatgaatcatcctcagatgcaggctccatcaggtatgaatggcacttccctttctcaccttagcaatggagagtcaaaaagtggaggctcttatggtactacatggggtgcctatggttctaattactctggagacaaatgttcaggccctaatggccaagctaatggtgacactgtgaatgcaactctaatgcagcctggcgtaaatggtcctatgggcactaactttcaagttaacacaaacaaaggaggtggtgtgtgggaatctggtgcagcaaactcccagagtacatcatggggaagtggaaatggcgcaaattctggaggaagtcgaagaggatggggaacccctgcacaaaacactggcactaatttacccagcgttgagtggaacaaactgcctagcaatcagcattccaatgatagtgcaaatggcaatggtaagacgtttacaaatggatggaaatctactgaggaagaggatcagggttctgccacatctcagacaaatgagcaaagcagtgtgtgggccaaaacaggaggtacagtggagagcgatggtagtacagaaagcactggacgccttgaggaaaaaggaactggggaaagtcagagtagagacagaagaaaaattgatcagcacacattactccaaagcattgtaaacagaactgacttagatccacgtgtcctgtccaactctggttggggacagactcctattaagcagaatactgcctgggatacagaaacatcacctagaggggaacgaaagactgacaatgggacagaggcctggggaagctctgcaacacagacttttaactcaggggcatgtatagataagactagccctaatggtaatgatacctcatctgtatcagggtggggcgatcccaaacctgctctgaggtggggagattccaaaggctcaaactgccagggggggtgggaagatgattctgctgctacaggaatggtcaagagcaatcagtgggggaattgcaaagaggagaaggctgcatggaatgactcgcaaaagaataaacagggatggggtgatggacaaaaatcaagccaagggtggtctgtttctgccagtgataactggggagaaacttcaaggaataaccattggggtgaggccaataagaaatccagctcaggaggtagtgacagtgacaggtccgtttccggttggaacgaacttggtaaaactagttctttcacttggggaaacaacataaatccaaataattcatcaggatgggatgaatcttctaaacctactccttcccagggatggggagaccctccaaagtctaatcagtctctaggttggggagattcgtcaaagccagtcagctctccagactggaacaagcaacaagacattgttggatcttggggaatcccaccagctacaggcaaacctcctggtacaggctggctggggggacctataccagccccagcaaaagaagaagaacccacaggctgggaggaaccatccccagaatctatacgtcgcaaaatggagattgatgatggaacttcagcttggggagatccaagcaaatacaactacaaaaatgtgaacatgtggaacaaaaacgtcccaaatggcaacagccgttcagaccagcaagcacaggtacatcagctgctaacgcctgcaagtgccatctcaaacaaagaggcaagcagtggctctggctggggtgagccctggggggagccttctactccagccacaactgtggataatggtacttcagcatggggtaagcccatagacagtggtcccagctggggggaacccattgctgcggcatccagcacatccacgtggggctccagctctgttggtccacaagcattaagcaaatctgggccaaaatctatgcaagatggctggtgtggtgatgatatgccattgcctggaaatcgccccactggctgggaagaggaagaggatgtggagattggaatgtggaatagtaattcatctcaagagcttaactcatctttaaattggccaccatatacaaagaaaatgtcatcgaagggtctgagtggcaaaaaaaggagaagggaaaggggaatgatgaaaggtggaaacaaacaagaagaagcgtggataaatccatttgttaaacagttttcaaacatcagtttttcgagagactcaccagaggaaaatgtacaaagcaataagatggacctttctggaggaatgttacaagacaaacgaatggagatagataaacatagcctaaatattggtgattacaatcgaacggtcgggaaaggccctggttctcggcctcagatttccaaagagtcttccatggagcgcaatccttattttgataaggatggcattgtagcagatgaatcccaaaacatgcagtttatgtccagtcaaagcatgaagcttcccccttcaaatagtgcactacctaaccaggcccttggctccatagcagggctgggtatgcaaaacttgaattctgttagacagaatggcaatcccagtatgtttggtgttggaaacacagcagcacaaccccggggcatgcagcagcctccagcacaacctcttagttcatctcagcctaatctccgtgctcaagtgcctcctccattactctcccctcaggttccagtttcattgctgaagtatgcaccaaacaacggtggcctgaatccactctttggccctcaacaggtagccatgctgaaccagctatcccagctaaaccagctttctcagatctcccagttacagcgattgttagcgcagcagcaaagggcgcagagtcagagaagcgtgccttctgggaaccggccgcagcaagaccagcagggtcgacctcttagtgtgcagcagcaaatgatgcaacaatctcgtcaacttgatccaaacctgttggtgaagcagcagactccaccatctcagcagcagccactccatcagccagccatgaagtctttccttgacaatgtcatgccccacactacacctgagctgcaaaaagggccatcaccaataaatgctttcagcaacttccctataggcttgaactcaaacttgaatgtaaatatggatatgaacagtattaaagagccacagtcaagactaaggaagtggacgacagtggacagcatttctgtgaacacatctttggatcaaaactccagcaaacatggtgctatttcaagtggtttcaggctggaagagtctccatttgttccctatgactttatgaacagcagtacttcaccagccagtcctccaggttcaataggagatggctggccacgtgccaaatcgcctaacggctctagcagtgttaattggccaccagaatttcgtcctggtgagccatggaaaggttatccaaacattgaccctgaaactgacccttacgtcactcctggcagtgtcataaacaatctttcaattaatactgtgcgggaagttgaccacctcagggacaggaacagtgggtcatcctcatccttgaacaccacgctgccttcaactagtgcctggtcatccattcgtgcctccaactacaacgttcccctcagcagtacagcacaaagcacttcagccagaaatagtgattccaaattgacatggtctcctggttcagttacaaacacctctctggctcatgagctgtggaaggtccctttgccacctaaaaacatcactgctccgtcccgcccacctccgggactgactggtcagaagccacccttgtctacgtgggataattctccccttcgtataggtggaggatggggaaattctgacgccagatataccccaggttccagctggggtgagagcagctcagggagaataacaaattggcttgttctaaaaaaccttacacctcagatcgatggctcaactctgcgcactctgtgcatgcagcacggcccgctgatcacattccacctgaacctccctcacggaaatgctctggtccgctacagttcaaaagaagaggtagtgaaggcacaaaagtctctgcacatgtgtgtactggggaacactactattcttgctgagtttgccagtgaagaggagatcagtcgtttctttgcacaaagccagtctctgaccccttctcccggctggcagtctctcgggtccagccagagccggctgggctccctcgactgttcccactcattctccagccggaccgatctcaatcactggaatggtgctgggctgtcgggaactaactgtggagaccttcacggcacttcactctgggggaccccgcattattccacaagcctgtggggtcccccaagcagcagcgacccccgaggaattagcagcccatctcccattaacgcttttctttctgttgaccacctgggtgggggtggagagtccatgtaacagtgtagatgcagactcaccgaccgggacctcagacgcgagggaaaggagcactaagtggggctcgccgcctgcagccaggggccgcctgtgggaacagctattctctgcacattttccactttgttttccccaaaacatatcagtttgaatacttgaatcatgcaggccaatattataatgtgaaaaggtatctactctatttacactcccaaatagcgccatacatgctaaaccgtagagaatgagctcgcttgtgtctattcatcatgtttagcctttggattctttttttttttttccttctattcctccccaacccccccccccgcccctttttttctctcttgcaaaaccattttttgggctgataacgtatgagcttttccctttgcactgaatgatgttctctccgtctcatcggcagtatggggggcagctgtcccagtgtcaatgtttactcaagggtgttcttaggaggcgtgcgctctctactatgccttgatgttgcctaccttattgtggtatcgtggagtttaaaagatcaagttaggatgctgacttaggattattaatgaaagtgttgcaccagttttttcatgttgtaaaactaaagaatttcgctctgcagtttgaaaaactgtggccacagctgtgacttgcagcccacctgccacccaggacgggccctgcactttgaataggctttccattttgttttggaggttctcactttgaaccttcttgtttacagatttttttgtttgttttttgagaaaaaaaaatgtttactcttccatcatttaaaaaaaatgtaaaagacaaaaaaaaaatggaggatgatttaaaagatgctttctatctctgggaaaaaggagcagcatttggccatgttcttttgtttttctattcctgtcccaaatcaaagagcatggttctcaggaaaaccagttccccagtttaaaaaaaaaaaaaaaaattccttgtagtttcttagaggaaaaaaagaaaaaccccaacttttagcactgatactacatattgctctgttaaagaattttctctgccaaaaaaaaagaaaaaacaaaaaaacgcttaaagctggagtttgacattctgctttcagatgctgtctttttattagtgagtgatgatggtttgctaataatcaataggtaataattttttgtaatcccatcaagtggctccatatgtttctgctctctcgtgactgtgttaatgtttaactgttgtaccttaaagccgaaatcagtaactatgcatactgtaaccaaggtattgggcttacagagttgtttgttgtataaagaaaattttaaatgttgttgcaaactaacgagttacaccattttaaactttctttcctcccccctttttttgcccacaaatggtattataatgcttgcttagtcaaagaagagagactaaacaagggtaaaaattttaacagtacagaatttgccatcatatcattgccttgattctaactgtttgtgtcctaagatgcaaaagaagtcagtggcttttaactgtttacaaatagaatgtgattgtaaaatgtacagtttggttgtgtttgaattatgaaatttcttcagatataataaaccatgactttttggctgctcaacattaattgtctcctttttgtgaatttatttgtaggctcttttttataatgaaagtttcaaagttgctatgtatgagggttctcatagagcaaccgattaaaaatctaagcaaatatttgaacattttatctgaactcatcacaatttcaccctgaaataatgtgagaacaatgggaaactgtagcttgctccttcccaccctctctgagcatctttgggatcttgttgctcaaaactcttctgtgacttcatcttccccaccatttgtgcccatctcaagcctcagcaagaaaccatgtggaacatgaagcttaatgacttgacagtgtactagtgttaaactctcatacctctgttacaaagcgagaaacgccacacccggactggccttttcttcccccttcacggccctcgcttctccctgcaggagctcgggggcgaaacctgtgtatggatttcagtgtatgacttcagatcatgctccaacttgccaggtgtgagctaatgttgtcggacaccttactataagcaaatgttattcagtgcgttcaatgtatattgacttccatactggtttttccaaaaaccaaaggtagctttgaaaaaccatgtctggaaatgtttggagcgttaagctgattgaccttctgaccttggggctttgagtagtatataattcataactgcgttaattgtattgttaaagtgtttgggagttttttgcgcttgttatgtggaaataaagtgtttgatttaaaattttttaaa

SEQ ID NO: 180395 - protein, 745 aa, Artificial Sequence
  derived and/or modified sequence
MLPFAPQDEPWDREMEVFSGGGASSGEVNGLKMVDEPMEEGEADSCHDEGVVKEIPITHHVKEGYEKADPAQFELLKVLGQGSFGKVFLVRKKTGPDAGQLYAMKVLKKASLKVRDRVRTKMERDILVEVNHPFIVKLHYAFQTEGKLYLILDFLRGGDVFTRLSKEVLFTEEDVKFYLAELALALDHLHQLGIVYRDLKPENILLDEIGHIKLTDFGLSKESVDQEKKAYSFCGTVEYMAPEVVNRRGHSQSADWWSYGVLMFEMLTGTLPFQGKDRNETMNMILKAKLGMPQFLSAEAQSLLRMLFKRNPANRLGSEGVEEIKRHLFFANIDWDKLYKREVQPPFKPASGKPDDTFCFDPEFTAKTPKDSPGLPASANAHQLFKGFSFVATSIAEEYKITPITSANVLPIVQINGNAAQFGEVYELKEDIGVGSYSVCKRCIHATTNMEFAVKIIDKSKRDPSEEIEILMRYGQHPNIITLKDVFDDGRYVYLVTDLMKGGELLDRILKQKCFSEREASDILYVISKTVDYLHCQGVVHRDLKPSNILYMDESASADSIRICDFGFAKQLRGENGLLLTPCYTANFVAPEVLMQQGYDAACDIWSLGVLFYTMLAGYTPFANGPNDTPEEILLRIGNGKFSLSGGNWDNISDGAKDLLSHMLHMDPHQRYTAEQILKHSWITHRDQLPNDQPKRNDVSHVVKGAMVATYSALTHKTFQPVLEPVAASSLAQRRSMKKRTSTGL

SEQ ID NO: 180396 - DNA, 2238 bp, Artificial Sequence
  derived and/or modified sequence
atgctgcccttcgccccccaggacgagccctgggacagagagatggaggtgttcagcggcggcggcgccagcagcggcgaggtgaacggcctgaagatggtggacgagcccatggaggagggcgaggccgacagctgccacgacgagggcgtggtgaaggagatccccatcacccaccacgtgaaggagggctacgagaaggccgaccccgcccagttcgagctgctgaaggtgctgggccagggcagcttcggcaaggtgttcctggtgagaaagaagaccggccccgacgccggccagctgtacgccatgaaggtgctgaagaaggccagcctgaaggtgagagacagagtgagaaccaagatggagagagacatcctggtggaggtgaaccaccccttcatcgtgaagctgcactacgccttccagaccgagggcaagctgtacctgatcctggacttcctgagaggcggcgacgtgttcaccagactgagcaaggaggtgctgttcaccgaggaggacgtgaagttctacctggccgagctggccctggccctggaccacctgcaccagctgggcatcgtgtacagagacctgaagcccgagaacatcctgctggacgagatcggccacatcaagctgaccgacttcggcctgagcaaggagagcgtggaccaggagaagaaggcctacagcttctgcggcaccgtggagtacatggcccccgaggtggtgaacagaagaggccacagccagagcgccgactggtggagctacggcgtgctgatgttcgagatgctgaccggcaccctgcccttccagggcaaggacagaaacgagaccatgaacatgatcctgaaggccaagctgggcatgccccagttcctgagcgccgaggcccagagcctgctgagaatgctgttcaagagaaaccccgccaacagactgggcagcgagggcgtggaggagatcaagagacacctgttcttcgccaacatcgactgggacaagctgtacaagagagaggtgcagccccccttcaagcccgccagcggcaagcccgacgacaccttctgcttcgaccccgagttcaccgccaagacccccaaggacagccccggcctgcccgccagcgccaacgcccaccagctgttcaagggcttcagcttcgtggccaccagcatcgccgaggagtacaagatcacccccatcaccagcgccaacgtgctgcccatcgtgcagatcaacggcaacgccgcccagttcggcgaggtgtacgagctgaaggaggacatcggcgtgggcagctacagcgtgtgcaagagatgcatccacgccaccaccaacatggagttcgccgtgaagatcatcgacaagagcaagagagaccccagcgaggagatcgagatcctgatgagatacggccagcaccccaacatcatcaccctgaaggacgtgttcgacgacggcagatacgtgtacctggtgaccgacctgatgaagggcggcgagctgctggacagaatcctgaagcagaagtgcttcagcgagagagaggccagcgacatcctgtacgtgatcagcaagaccgtggactacctgcactgccagggcgtggtgcacagagacctgaagcccagcaacatcctgtacatggacgagagcgccagcgccgacagcatcagaatctgcgacttcggcttcgccaagcagctgagaggcgagaacggcctgctgctgaccccctgctacaccgccaacttcgtggcccccgaggtgctgatgcagcagggctacgacgccgcctgcgacatctggagcctgggcgtgctgttctacaccatgctggccggctacacccccttcgccaacggccccaacgacacccccgaggagatcctgctgagaatcggcaacggcaagttcagcctgagcggcggcaactgggacaacatcagcgacggcgccaaggacctgctgagccacatgctgcacatggacccccaccagagatacaccgccgagcagatcctgaagcacagctggatcacccacagagaccagctgcccaacgaccagcccaagagaaacgacgtgagccacgtggtgaagggcgccatggtggccacctacagcgccctgacccacaagaccttccagcccgtgctggagcccgtggccgccagcagcctggcccagagaagaagcatgaagaagagaaccagcaccggcctgtag

SEQ ID NO: 180397 - DNA, 2238 bp, Artificial Sequence
  derived and/or modified sequence
atgctccccttcgctccacaagacgagccctgggatagagagatggaggtgttcagcggaggtggagcctcctcaggcgaagttaatgggttgaagatggtcgatgaacccatggaagaaggcgaagccgattcatgtcatgacgaaggggtggttaaagaaatacctatcactcaccacgtcaaggaggggtacgagaaagctgaccctgctcagtttgaactgttgaaggttctgggccagggctctttcgggaaggtattcctagtccgtaagaaaacaggcccggacgcagggcaactttacgcgatgaaagtactcaagaaggcaagccttaaagtccgcgaccgcgtgcggacaaagatggagagagacattttagtggaagtcaatcatcccttcatcgttaagctgcactacgcctttcagaccgaaggaaaactttaccttattctggacttcctaagaggaggagatgtctttacccgcttgagcaaagaggtccttttcaccgaggaagatgtgaaattttatttggccgaattagctttggcattagaccacttgcatcaactgggcatcgtttacagagaccttaagcccgagaacatcctcctggacgaaattggccatatcaaacttaccgattttgggttgtccaaagaatccgtggatcaagagaagaaggcatatagcttctgtggaacagtcgagtacatggcgcctgaagtcgtcaaccggagaggccattcccagagcgctgattggtggtcttacggcgttctcatgtttgaaatgctgactgggaccctgccctttcaggggaaagaccggaacgaaaccatgaatatgatcttaaaggccaagcttggcatgccacagttcctgtcagcagaggcccaatctctactacggatgctgtttaagcgaaatcccgctaaccgcctgggatctgagggggttgaagaaattaaaagacacctgttctttgctaatatcgactgggacaagctctataagagggaggtacagcctcccttcaaaccggccagtggcaagccagatgatacattttgcttcgatcctgagttcacagctaagactcccaaggattccccgggcctgccggcttctgcgaatgcgcatcagctgttcaagggcttcagctttgtagctacatctatcgccgaagaatacaagatcactcccatcacgtctgctaatgtgctgcccatcgtacaaattaatggaaacgctgcccagttcggagaagtttacgagttgaaagaagatattggggttggttcctatagcgtatgtaagaggtgcatccacgccaccactaacatggagtttgccgtgaagattatcgacaagtcaaaacgggacccgtcagaagaaattgagatcctgatgaggtacgggcagcacccaaacattattaccctcaaagatgtctttgacgatggcaggtacgtgtatcttgttacagacctgatgaaaggcggcgagttactggatcgcattctgaagcagaaatgcttttccgagcgagaggcgtccgatattctatatgttatttctaaaacagtagactacttgcactgtcagggggtggtccatcgggatttaaagccaagcaatatcttgtacatggatgagagcgcatccgcggatagtattagaatttgcgatttcggattcgccaagcaattgagaggcgaaaatggcctcctgctaacaccctgttacactgctaatttcgtggctcccgaggtgttaatgcaacagggatatgatgcagcttgcgacatctggtccctcggggtcttgttttacacaatgctggccggttacacaccgtttgccaacggcccaaacgacactcccgaggaaattcttcttcgcattggaaacgggaagttttcactaagtggcggtaactgggacaacatcagcgatggcgctaaggatcttttatcccacatgctgcatatggatccacatcagcgatacacggccgagcagattcttaagcatagttggattacccacagggatcaattgcccaacgatcagccgaaacgaaatgacgtgtcacacgtagtcaaaggggcaatggtggcgacgtacagtgcacttactcataaaacatttcaaccagtcctggagccagtggcggccagctctctagcccaacgcagatctatgaaaaaacgcacgagcacaggcctgtag

SEQ ID NO: 180398 - DNA, 2238 bp, Artificial Sequence
  derived and/or modified sequence
atgctgccctttgccccccaggatgagccctgggaccgggagatggaggtgttttctgggggcggggccagcagtggagaggtgaatggcctgaagatggtggatgagcccatggaggagggggaggccgacagctgccatgatgagggcgtggtgaaggagatccccatcacccaccacgtgaaggagggctatgagaaggctgaccctgcccagtttgagctgctgaaggtgctgggccagggcagctttgggaaggtgttcctggtgaggaagaagacaggcccagatgctggccagctgtatgccatgaaggtgctgaagaaggccagcctgaaggtgcgggacagagtgaggaccaagatggagcgggacatcctggtggaggtgaaccaccccttcatcgtgaagctgcactacgccttccagacagagggcaagctgtacctgatcctggacttcctgcggggaggagatgtgttcacccggctgagcaaggaggtgctcttcacagaagaagatgtgaagttctacctggccgagctggccctggccctggaccacctgcaccagctgggcatcgtgtacagagacctgaagccagagaacatcctgctggatgaaattggccacatcaagctgacagactttggcctgagcaaggagagcgtggaccaggagaagaaggcctacagcttctgtggcaccgtggagtacatggcccctgaggtggtgaacagaagaggccacagccagagcgctgactggtggagctatggagtgctgatgtttgagatgctgaccggcaccctgcccttccagggcaaggacagaaatgagaccatgaacatgatcctgaaggccaagctgggcatgccccagttcctgtctgctgaggcccagagcctgctgaggatgctgttcaagaggaacccagccaaccggctgggcagcgagggcgtggaggagatcaagaggcacctgttctttgccaacatcgactgggacaagctgtacaagcgggaggtgcagccccccttcaagccagccagcggcaagccagatgacaccttctgctttgatcctgagttcaccgccaagacccccaaggacagccctggcctgcctgccagcgccaatgcccaccagctgttcaagggcttctcctttgtggccaccagcattgctgaggagtacaagatcacccccatcaccagcgccaacgtgctgcccatcgtgcagatcaatggaaatgctgcccagtttggagaggtgtatgagctgaaggaggacatcggcgtgggcagctacagcgtgtgcaagcgctgcatccacgccaccaccaacatggagtttgctgtgaagatcatcgacaagagcaagagggaccccagcgaggagattgagatcctgatgagatatggccagcaccccaacatcatcaccctgaaggatgtgtttgatgatggccgctacgtgtacctggtgacagacctgatgaagggcggggagctgctggaccgcatcctgaagcagaagtgcttcagcgagcgggaggccagtgacatcctgtatgtgatcagcaagacagtggactacctgcactgccagggcgtggtgcaccgggacctgaagcccagcaacatcctgtacatggatgaaagtgccagcgctgacagcatccgcatctgtgactttggatttgccaagcagctgcggggagaaaatggcctgctgctgaccccctgctacacagccaactttgtggcccctgaggtgctgatgcagcagggctatgatgctgcctgtgacatctggagcctgggcgtgctcttctacaccatgctggccggctacaccccatttgccaacggccccaatgacaccccagaggagatcctgctgagaattggaaatggcaagttcagcctgagcggcggcaactgggacaacatcagtgatggagccaaggacctgctgagccacatgctgcacatggacccccaccagcgctacacagctgagcagatcctgaagcacagctggatcacccaccgggaccagctgcccaatgaccagcccaagagaaatgatgtgagccacgtggtgaagggggccatggtggccacctacagcgccctgacccacaagaccttccagcctgtgctggagcctgtggccgccagcagcctggcccagaggaggtccatgaagaagaggaccagcacaggcctgtag

SEQ ID NO: 180399 - DNA, 2238 bp, Artificial Sequence
  derived and/or modified sequence
atgctgcccttcgccccccaggacgagccctgggaccgggagatggaggtattttcggggggaggcgccagctctggcgaggtcaacgggctaaagatggtcgatgagcccatggaagaaggggaggctgattcctgtcatgatgagggagttgtgaaagagattcctatcacccaccatgttaaggagggatatgagaaagctgaccccgctcagttcgagctcctgaaagtgctggggcagggctcgttcgggaaggtgtttctggtgcggaagaagacaggacccgatgctggccaattgtacgcaatgaaggtgctaaaaaaagccagcctgaaagtgcgtgaccgggtgcgtactaaaatggagagagacatactggttgaggtgaatcaccccttcatcgtgaagctccattatgcatttcagaccgaaggtaagctctacctgatcctggatttcctaagagggggggacgtgtttacacgactatctaaagaggttctttttacagaagaagacgtgaaattctacctggcggaactggcgttggccctggaccatttgcatcagctgggtattgtttatcgggatctaaagccggaaaacattctcctcgacgagatcgggcacatcaagctgactgacttcggtctctctaaagaatctgtagaccaagaaaagaaggcttattccttttgcggcaccgtcgagtatatggcccccgaggtggtcaataggagagggcacagccagtccgcagattggtggagctatggagtcctcatgttcgaaatgctaactggaacgctgcctttccaggggaaagaccgcaacgagacgatgaacatgatcctgaaggcgaaacttggaatgcctcagtttctttctgctgaggctcaatctctgttacgcatgttgtttaaaaggaaccctgccaaccggctgggctctgaaggagtggaggagattaaacgtcacttgttctttgccaatattgattgggacaaattgtataagagagaagtgcagccaccctttaaaccggcttccgggaaacctgacgatactttttgctttgatccagagttcacagccaaaacccctaaggacagccctggactaccagcgtccgcaaacgctcaccagttgttcaagggcttctcttttgtagccacctccatagctgaggaatacaaaattacccccatcacaagcgctaatgtgctcccgattgtgcagatcaacggaaacgctgcccagttcggcgaagtctacgagctgaaggaggatatcggcgtaggttcctattccgtttgtaaaaggtgtatccacgccactaccaacatggagttcgcagtaaagatcatcgacaagtctaaaagggatccatccgaggagatcgaaatcctgatgcgatatggccaacatcccaacattatcacgctgaaggacgtattcgatgacggaaggtacgtgtacctcgtcacggacctgatgaagggaggggaactactagaccgaatcctcaagcagaagtgtttctcagaaagggaggcttccgatatcctttacgttattagtaagacagtggactaccttcactgccagggagtcgtgcaccgggatctgaaacctagtaatatcctgtatatggacgaaagcgcgagcgccgacagtattagaatctgcgattttggctttgcgaagcagttgaggggcgaaaatggcttattactcactccctgctataccgctaattttgtagcccccgaagttctgatgcaacagggatatgacgctgcttgcgatatttggtcacttggagtgctcttctataccatgctggccggctacaccccctttgccaacggtcccaatgacacaccggaggagattttgttgcgcatcggtaatgggaagttttcactctcaggcgggaattgggacaatatctccgatggcgccaaagacctcttaagccatatgctgcacatggacccacatcaacgatacacggcggaacagatactgaaacatagctggatcacacaccgagaccagcttcctaacgatcagccgaagaggaacgacgtatcacacgtcgtcaagggcgccatggtggcaacgtactcagctctgacccataaaaccttccagccagttctcgagcctgtggctgcatctagtttggctcagcggaggagcatgaaaaaaagaacctccaccggcctatag

SEQ ID NO: 180400 - DNA, 2238 bp, Artificial Sequence
  derived and/or modified sequence
atgctgccctttgcgccacaagatgagccatgggatagggagatggaggtgttcagtgggggaggcgcaagctctggggaggtgaacggcttgaagatggtggatgagcctatggaagaaggtgaggccgacagctgccatgatgaaggcgttgtgaaggaaatacctattacgcatcatgtcaaagagggatacgaaaaagcggaccctgctcagtttgagctgctgaaagtgctggggcagggctccttcggcaaagtcttcctggtccgtaaaaaaaccggccctgacgccggacagctgtacgccatgaaagtgctcaagaaggctagtttgaaggtgagggatcgagtgcgaactaaaatggagagggatatcctggtcgaggtgaaccacccgtttattgtcaagctccattatgcctttcagacagagggtaaactctatctgatcttggatttcctaaggggtggcgacgtgtttaccagactcagtaaggaggtgctgtttacagaggaagatgttaagttttatctggctgagttggccttagcactggaccatctgcaccagctgggaattgtgtacagagatttgaagcccgaaaacatattgcttgatgagattggacatatcaaactgaccgacttcggcctgtccaaagagagtgttgatcaggagaaaaaagcatactccttctgcgggacggtcgagtacatggcccctgaagtagtaaatagaagaggtcattcccagtcagctgactggtggagctatggggtactgatgtttgagatgctgactggcacactcccattccagggaaaagaccgaaacgagacaatgaacatgatcctaaaagccaagttggggatgccacagtttttgtctgccgaggcccagagtctcctcaggatgctgtttaagagaaatcccgctaatcggctggggtcagaaggagttgaggaaatcaagaggcatctgttcttcgctaatatcgattgggacaagctgtataagcgggaggtgcaaccccctttcaaacccgctagcggcaagcctgacgacacattttgtttcgatcccgaatttaccgcaaaaacgccaaaggactcgcccggattgcctgcaagtgcgaacgcccatcagctcttcaaggggttttctttcgtcgccacatctatagcagaagagtataagatcacacccattacctcagcaaacgttctgccaatcgtccagataaatgggaacgctgcccaatttggcgaagtgtacgagctgaaagaagatatcggcgtggggagttactccgtgtgcaaacgctgtatacatgcaacgactaacatggagttcgctgtcaagataattgacaagagcaaaagagaccctagtgaggaaattgagatccttatgcggtacggacagcaccctaacatcattaccctgaaagacgtattcgatgacggacgctacgtttatctggtaactgatctgatgaagggcggtgagttgttagataggattctcaaacaaaaatgctttagtgagcgcgaagcttcagatatcctttatgtcatcagtaagacagtcgactacctgcattgccagggcgtggtgcacagggatctaaagccgtccaatatcctgtacatggacgagtctgctagtgctgactccataaggatctgcgactttgggttcgccaaacagctgcgtggcgagaatggcctgcttctcacaccttgctacaccgcaaactttgtggcccctgaagtgctcatgcagcagggttatgacgcagcatgcgacatttggagcctcggtgtgttgttttacaccatgctggcgggatacaccccattcgctaacgggcctaacgacaccccagaagaaattttgcttaggatcgggaatggtaaattttctctttccggtgggaattgggataacatctctgacggagctaaggatcttctgagccatatgctacacatggaccctcatcagaggtatactgctgaacaaattctgaagcactcatggatcacccatcgcgaccaactgcccaatgatcagccaaagagaaatgatgtcagccacgtcgtgaaaggcgctatggttgccacgtactctgccctgactcataaaacatttcagcctgttctagaaccagttgctgcctcttctttggcccaaaggagaagtatgaaaaagcgcacttcaaccggcctgtag

SEQ ID NO: 180401 - DNA, 2547 bp, Artificial Sequence
  derived and/or modified sequence
aaggggagatgctaccattcgctcctcaggacgagccctgggaccgagaaatggaagtgttcagcggcggcggcgcgagcagcggcgaggtaaatggtcttaaaatggttgatgagccaatggaagagggagaagcagattcttgtcatgatgaaggagttgttaaagaaatccctattactcatcatgttaaggaaggctatgagaaagcagatcctgcacagtttgagttgctcaaggttcttggtcaggggtcatttggaaaggtttttcttgttagaaagaagaccggtcctgatgctgggcagctctatgcaatgaaggtgttaaaaaaagcctctttaaaagttcgagacagagttcggacaaagatggagagggatatactggtggaagtaaatcatccatttattgtcaaattgcactatgcctttcagactgaagggaaactgtacttaatactggattttctcaggggaggagatgttttcacaagattatccaaagaggttctgtttacagaggaagatgtgaaattctacctcgcagaactggcccttgctttggatcatctgcaccaattaggaattgtttatagagacctgaagccagaaaacattttgcttgatgaaataggacatatcaaattaacagattttggactcagcaaggagtcagtagatcaagaaaagaaggcttactcattttgtggtacagtagagtatatggctcctgaagtagtaaataggagaggccattcccagagtgctgattggtggtcatatggtgttcttatgtttgaaatgcttactggtactctgccatttcaaggtaaagacagaaatgagaccatgaatatgatattaaaagcaaaacttggaatgcctcaatttcttagtgctgaagcacaaagtcttctaaggatgttattcaaaaggaatccagcaaatagattgggatcagaaggagttgaagaaatcaaaagacatctgttttttgcaaatattgactgggataaattatataaaagagaagttcaacctcctttcaaacctgcttctggaaaaccagatgatactttttgttttgatcctgaatttactgcaaaaacacctaaagattctcccggtttgccagccagtgcaaatgctcatcagctcttcaaaggattcagctttgttgcaacttctattgcagaagaatataaaatcactcctatcacaagtgcaaatgtattaccaattgttcagataaatggaaatgctgcacaatttggtgaagtatatgaattgaaggaggatattggtgttggctcctactctgtttgcaagcgatgcatacatgcaactaccaacatggaatttgcagtgaagatcattgacaaaagtaagcgagacccttcagaagagattgaaatattgatgcgctatggacaacatcccaacattattactttgaaggatgtctttgatgatggtagatatgtttaccttgttacggatttaatgaaaggaggagagttacttgaccgtattctcaaacaaaaatgtttctcggaacgggaggctagtgatatactatatgtaataagtaagacagttgactatcttcattgtcaaggagttgttcatcgtgatcttaaacctagtaatattttatacatggatgaatcagccagtgcagattcaatcaggatatgtgattttgggtttgcaaaacaacttcgaggagaaaatggacttctcttaactccatgctacactgcaaactttgttgcacctgaggttcttatgcaacagggatatgatgctgcttgtgatatctggagtttaggagtccttttttacacaatgttggctggctacactccatttgctaatggccccaatgatactcctgaagagatactgctgcgtataggcaatggaaaattctctttgagtggtggaaactgggacaatatttcagacggagcaaaggatttgctttcccatatgcttcatatggacccacatcagcggtatactgctgaacaaatattaaagcactcatggataactcacagagaccagttgccaaatgatcagccaaagagaaatgatgtgtcacatgttgttaagggagcaatggttgcaacatactctgccctgactcacaagacctttcaaccagtcctagagcctgtagctgcttcaagcttagcccagcgacggagcatgaaaaagcgaacatcaactggcctgtaagatttgtggtgttcctaggccaaactggatgaagatgaaattaaatgtgtggcttttttcctattcttatcaaaggcatcgttgtctgctaaattacttgaatattaagtaatattaaatccccatttttaggggaagtgagatttaaaaaaccattcacaggtccacaatattcatactatgtgtttgcagtagtgttcaagtgtttatttaagcatataattggtgtccaccaggtcctcacaacttctctgcacacaagcttctaaaattcctttcaaataaagttactttaatattt

SEQ ID NO: 180402 - protein, 222 aa, Artificial Sequence
  derived and/or modified sequence
MNSNVENLPPHIIRLVYKEVTTLTADPPDGIKVFPNEEDLTDLQVTIEGPEGTPYAGGLFRMKLLLGKDFPASPPKGYFLTKIFHPNVGANGEICVNVLKRDWTAELGIRHVLLTIKCLLIHPNPESALNEEAGRLLLENYEEYAARARLLTEIHGGAGGPSGRAEAGRALASGTEASSTDPGAPGGPGGAEGPMAKKHAGERDKKLAAKKKTDKKRALRRL

SEQ ID NO: 180403 - DNA, 669 bp, Artificial Sequence
  derived and/or modified sequence
atgaacagcaacgtggagaacctgcccccccacatcatcagactggtgtacaaggaggtgaccaccctgaccgccgacccccccgacggcatcaaggtgttccccaacgaggaggacctgaccgacctgcaggtgaccatcgagggccccgagggcaccccctacgccggcggcctgttcagaatgaagctgctgctgggcaaggacttccccgccagcccccccaagggctacttcctgaccaagatcttccaccccaacgtgggcgccaacggcgagatctgcgtgaacgtgctgaagagagactggaccgccgagctgggcatcagacacgtgctgctgaccatcaagtgcctgctgatccaccccaaccccgagagcgccctgaacgaggaggccggcagactgctgctggagaactacgaggagtacgccgccagagccagactgctgaccgagatccacggcggcgccggcggccccagcggcagagccgaggccggcagagccctggccagcggcaccgaggccagcagcaccgaccccggcgcccccggcggccccggcggcgccgagggccccatggccaagaagcacgccggcgagagagacaagaagctggccgccaagaagaagaccgacaagaagagagccctgagaagactgtag

SEQ ID NO: 180404 - DNA, 669 bp, Artificial Sequence
  derived and/or modified sequence
atgaacagcaacgtggagaacctacccccacacataattagattggtgtacaaggaggtgactacactgaccgctgatccccctgacgggatcaaagtgttccccaatgaggaagacctgaccgatctgcaggtgaccattgagggcccggaggggacaccatacgctgggggcttgtttcgtatgaaactgcttctgggaaaggatttccctgcgagcccaccaaaagggtatttcctgacaaagatctttcaccccaacgtaggcgctaatggagagatttgtgtcaatgttttgaaaagagactggaccgcagagctgggtatacggcacgtgctgttgacaatcaagtgtctgcttatacaccccaacccggagtccgctctgaacgaggaagctggtagactgctgcttgagaactatgaggaatatgctgcccgcgctagactgttgaccgaaattcacgggggagctggcgggccttccgggcgcgcagaagccggaagggccttagcttcaggaacagaagcgtcttcgaccgatcccggagcaccgggaggacctgggggtgccgaggggcctatggccaagaagcacgccggtgagcgtgacaagaagctggcagccaaaaagaaaaccgataagaagagagcacttaggcgactctag

SEQ ID NO: 180405 - DNA, 669 bp, Artificial Sequence
  derived and/or modified sequence
atgaacagcaatgtggagaacctgcccccccacatcatccggctggtgtacaaggaggtgaccaccctgacagctgaccccccagatggcatcaaggtgttccccaatgaggaggacctgacagacctgcaggtgaccatcgagggccctgagggcaccccctatgctgggggcctcttcaggatgaagctgctgctgggcaaggacttccctgccagcccccccaagggctacttcctgaccaagatcttccaccccaacgtgggcgccaatggagagatctgtgtgaatgtgctgaagagggactggacagctgagctgggcatcagacatgtgctgctgaccatcaagtgcctgctgatccaccccaaccctgagagcgccctgaatgaggaggccggccgcctgctgctggagaactatgaggagtatgctgcccgggcccggctgctgacagagatccatggaggagctgggggccccagcggccgggcagaggccggccgggccctggccagcggcacagaggccagcagcacagaccccggggcccctgggggccctgggggcgctgagggccccatggccaagaagcacgccggggagcgggacaagaagctggccgccaagaagaagacagacaagaagagggccctgcggcggctgtag

SEQ ID NO: 180406 - DNA, 669 bp, Artificial Sequence
  derived and/or modified sequence
atgaacagcaacgtggagaacctgcccccccacatcatccggctggtctataaggaggtcactacactgaccgcggaccccccagacggcatcaaagtatttcctaacgaggaagatttaaccgatttacaggttaccatcgaaggacccgaaggcacaccttacgcgggaggtcttttcaggatgaagcttctgctcggcaaggactttcctgcatccccccctaagggctattttctaacgaaaatattccatccaaatgtgggggccaatggtgaaatatgcgtgaatgttctgaaacgggactggacagctgagttgggaattcgccacgtactgctgacaattaagtgtctgctcattcaccctaaccctgagtccgctttgaacgaagaagccggtcgactcttgctggaaaactatgaggagtacgccgccagagctcgcctgctgaccgaaatccatggcggtgccggcggaccttccggccgagccgaagccggtagggcactcgcatccggcactgaagccagctctacggatccaggcgccccaggcggacccggtggcgctgaaggcccaatggctaaaaaacacgcaggggaacgtgacaagaagctggctgcaaaaaagaagacagataaaaagcgggccctgcgtagactgtag

SEQ ID NO: 180407 - DNA, 669 bp, Artificial Sequence
  derived and/or modified sequence
atgaattctaatgttgagaatttaccccctcacatcattcgtctggtgtataaggaagtgacaactcttaccgccgacccacctgacggaattaaggtgttccccaatgaagaagatttaaccgatttgcaagtgaccattgaaggccctgaagggactccatatgccggtggtctttttagaatgaaacttctgcttggcaaggatttccccgcaagcccaccaaagggttatttcttgacaaaaatttttcatcccaacgtaggagccaatggagagatatgtgtgaatgtgctcaagagggactggacggcggaactcgggattagacacgtgctgttgaccatcaaatgtctgctgattcaccccaatcctgaatccgctctgaatgaggaagccggtcggctgctcctggagaattacgaggagtatgctgctcgtgccaggctgctgaccgagatccacggcggagcaggcggtccatctggtagggccgaagcagggcgagctttggcctcaggaacggaggcaagttccacagacccaggcgctcccggtggacctggaggtgctgagggacctatggctaagaagcatgcaggagagcgcgataagaagttggcagcaaagaagaagaccgacaagaagcgcgctttaaggcgtctgtag

SEQ ID NO: 180408 - DNA, 1189 bp, Artificial Sequence
  derived and/or modified sequence
cctctccgccacttccctcgcttctgaccatagtttgcggggaagggagcgagcgcgtcgaaaaccaaggaacgtgcgcgctgacgtcacggttgaggctcggagctgaggggccgcggagggcgtggcctgcgggcggttataaagaggcagtggtgcgcgcgcggccggctcagtgctgccgggcaccggggcggcgggttggtctacgctgtgcgcggcggacgtcggaggcagcggggagcggagcggggccgccggggcctctccagggccgcagcggcagcagttgggccccccgccccggccggcggaccgaagaacgcaggaagggggccggggggacccgcccccggccggccgcagccatgaactccaacgtggagaacctacccccgcacatcatccgcctggtgtacaaggaggtgacgacactgaccgcagacccacccgatggcatcaaggtctttcccaacgaggaggacctcaccgacctccaggtcaccatcgagggccctgaggggaccccatatgctggaggtctgttccgcatgaaactcctgctggggaaggacttccctgcctccccacccaagggctacttcctgaccaagatcttccacccgaacgtgggcgccaatggcgagatctgcgtcaacgtgctcaagagggactggacggctgagctgggcatccgacacgtactgctgaccatcaagtgcctgctgatccaccctaaccccgagtctgcactcaacgaggaggcgggccgcctgctcttggagaactacgaggagtatgcggctcgggcccgtctgctcacagagatccacgggggcgccggcgggcccagcggcagggccgaagccggtcgggccctggccagtggcactgaagcttcctccaccgaccctggggccccagggggcccgggaggggctgagggtcccatggccaagaagcatgctggcgagcgcgataagaagctggcggccaagaaaaagacggacaagaagcgggcgctgcggcggctgtagtgggctctcttcctccttccaccgtgaccccaacctctcctgtcccctccctccaactctgtctctaagttatttaaattatggctggggtcggggagggtacagggggcactgggacctggatttgtttttctaaataaagttggaaaagc

SEQ ID NO: 180409 - protein, 504 aa, Artificial Sequence
  derived and/or modified sequence
MSLICSISNEVPEHPCVSPVSNHVYERRLIEKYIAENGTDPINNQPLSEEQLIDIKVAHPIRPKPPSATSIPAILKALQDEWDAVMLHSFTLRQQLQTTRQELSHALYQHDAACRVIARLTKEVTAAREALATLKPQAGLIVPQAVPSSQPSVVGAGEPMDLGELVGMTPEIIQKLQDKATVLTTERKKRGKTVPEELVKPEELSKYRQVASHVGLHSASIPGILALDLCPSDTNKILTGGADKNVVVFDKSSEQILATLKGHTKKVTSVVFHPSQDLVFSASPDATIRIWSVPNASCVQVVRAHESAVTGLSLHATGDYLLSSSDDQYWAFSDIQTGRVLTKVTDETSGCSLTCAQFHPDGLIFGTGTMDSQIKIWDLKERTNVANFPGHSGPITSIAFSENGYYLATAADDSSVKLWDLRKLKNFKTLQLDNNFEVKSLIFDQSGTYLALGGTDVQIYICKQWTEILHFTEHSGLTTGVAFGHHAKFIASTGMDRSLKFYSL

SEQ ID NO: 180410 - DNA, 1515 bp, Artificial Sequence
  derived and/or modified sequence
atgagcctgatctgcagcatcagcaacgaggtgcccgagcacccctgcgtgagccccgtgagcaaccacgtgtacgagagaagactgatcgagaagtacatcgccgagaacggcaccgaccccatcaacaaccagcccctgagcgaggagcagctgatcgacatcaaggtggcccaccccatcagacccaagccccccagcgccaccagcatccccgccatcctgaaggccctgcaggacgagtgggacgccgtgatgctgcacagcttcaccctgagacagcagctgcagaccaccagacaggagctgagccacgccctgtaccagcacgacgccgcctgcagagtgatcgccagactgaccaaggaggtgaccgccgccagagaggccctggccaccctgaagccccaggccggcctgatcgtgccccaggccgtgcccagcagccagcccagcgtggtgggcgccggcgagcccatggacctgggcgagctggtgggcatgacccccgagatcatccagaagctgcaggacaaggccaccgtgctgaccaccgagagaaagaagagaggcaagaccgtgcccgaggagctggtgaagcccgaggagctgagcaagtacagacaggtggccagccacgtgggcctgcacagcgccagcatccccggcatcctggccctggacctgtgccccagcgacaccaacaagatcctgaccggcggcgccgacaagaacgtggtggtgttcgacaagagcagcgagcagatcctggccaccctgaagggccacaccaagaaggtgaccagcgtggtgttccaccccagccaggacctggtgttcagcgccagccccgacgccaccatcagaatctggagcgtgcccaacgccagctgcgtgcaggtggtgagagcccacgagagcgccgtgaccggcctgagcctgcacgccaccggcgactacctgctgagcagcagcgacgaccagtactgggccttcagcgacatccagaccggcagagtgctgaccaaggtgaccgacgagaccagcggctgcagcctgacctgcgcccagttccaccccgacggcctgatcttcggcaccggcaccatggacagccagatcaagatctgggacctgaaggagagaaccaacgtggccaacttccccggccacagcggccccatcaccagcatcgccttcagcgagaacggctactacctggccaccgccgccgacgacagcagcgtgaagctgtgggacctgagaaagctgaagaacttcaagaccctgcagctggacaacaacttcgaggtgaagagcctgatcttcgaccagagcggcacctacctggccctgggcggcaccgacgtgcagatctacatctgcaagcagtggaccgagatcctgcacttcaccgagcacagcggcctgaccaccggcgtggccttcggccaccacgccaagttcatcgccagcaccggcatggacagaagcctgaagttctacagcctgtag

SEQ ID NO: 180411 - DNA, 1515 bp, Artificial Sequence
  derived and/or modified sequence
atgtcgctcatttgctccatctccaacgaagtgcccgagcacccttgcgtgagcccagtaagcaaccatgtgtatgagcgaaggctcatagagaagtatattgcagaaaatggaaccgatccaatcaacaaccagccactctcagaggagcaactgatcgacataaaagtagctcacccaattagaccgaagcctccctccgctaccagtattcctgccatcctgaaggccttacaggatgaatgggatgctgtcatgctccattcatttactttgaggcagcagttgcagactactaggcaagagctctcgcatgctctatatcagcacgatgccgcatgccgcgtgattgcccgcctgaccaaggaagtcacggcggctagagaggctcttgccacacttaaacctcaggccgggcttattgtcccccaggctgttccatcctcacagccaagcgtcgttggtgctggagaacctatggacctaggcgagcttgttgggatgaccccagagatcattcagaaacttcaggataaagccacggtactaacgaccgagcggaagaaacgggggaagaccgtgcctgaggaactcgtcaaaccggaggagctgagtaagtatagacaggttgcctcccacgttggactccatagcgcctcaatacctggaatcctagccttggacctatgcccctccgatacaaataagatcctgactgggggggctgacaagaatgtcgtagtgttcgacaagagtagtgagcaaattctggctacgctgaaggggcacacaaagaaggtaacctcagttgtgttccacccttcacaggatctggtcttttccgcctcccccgacgccactattcggatctggtccgtacctaatgcatcctgcgttcaggttgtcagagctcacgagagtgccgtcaccggtttgagtttacacgcaaccggcgattatctgctgagtagctccgatgaccaatactgggcctttagtgatattcagacaggtcgtgttctgactaaggtgaccgatgaaacttcaggctgctctttaacctgtgcccaattccacccagacggactcatattcggcacaggaaccatggactctcagatcaagatctgggacctgaaagagagaaccaatgtcgctaacttccctggtcactcaggccctattacgtctattgcttttagcgagaatggttactatctggccactgcggcggacgacagttccgttaagctgtgggacctgcggaaactgaagaacttcaagaccctacagctcgataacaattttgaggtgaagagcctgatcttcgatcagtctggaacatacttggcattgggagggaccgacgttcagatatacatttgcaaacagtggactgaaatactgcattttactgaacattcaggcctaaccactggggttgcgttcggccaccatgctaagtttatagccagtaccggcatggatcgcagtctgaaattttatagcctctag

SEQ ID NO: 180412 - DNA, 1515 bp, Artificial Sequence
  derived and/or modified sequence
atgagcctcatctgcagcatcagcaatgaggtgcctgagcacccctgtgtgtcccctgtgagcaaccacgtgtatgaaagaagactcatcgagaagtacatcgccgagaatggaacagaccccatcaacaaccagcccctgtctgaggagcagctgattgacatcaaggtggcccaccccatccggcccaagcccccatctgccaccagcatcccagccatcctgaaggccctgcaggatgagtgggatgctgtgatgctgcacagcttcaccctgcggcagcagctgcagaccacccggcaggagctgagccacgccctgtaccagcatgatgctgcctgccgggtgattgcccggctgaccaaggaggtgacagctgcccgggaggccctggccaccctgaagccccaggccggcctgattgtgccccaggccgtgcccagcagccagcccagcgtggtgggcgctggggagcccatggacctgggggagctggtgggcatgaccccagagatcatccagaagctgcaggacaaggccaccgtgctgaccacagagaggaagaagaggggcaagacagtgcctgaggagctggtgaagccagaggagctgagcaagtaccggcaggtggccagccacgtgggcctgcacagcgccagcatccctggcatcctggccctggacctgtgccccagcgacaccaacaagatcctgactggaggagctgacaagaatgtggtggtgtttgacaagagcagcgagcagatcctggccaccctgaagggccacaccaagaaggtgacctctgtggtgttccaccccagccaggacctggtgttttctgccagcccagatgccaccatccgcatctggagcgtgcccaatgccagctgtgtgcaggtggtgcgggcccatgaatctgctgtgacaggcctgagcctgcacgccactggagactacctgctgagcagcagtgatgaccagtactgggccttcagtgacatccagacaggccgggtgctgaccaaggtgacagatgagaccagcggctgcagcctgacctgtgcccagttccacccagatggcctcatctttggaacaggcaccatggacagccagatcaagatctgggacctgaaggagaggaccaacgtggccaacttccctggccacagcggccccatcaccagcatcgccttctctgaaaatggctactacctggccacagctgctgatgacagctctgtgaagctgtgggacctgaggaagctgaagaacttcaagaccctgcagctggacaacaactttgaggtgaagagcctcatctttgaccagagcggcacctacctggccctgggcggcacagatgtgcagatctacatctgcaagcagtggacagagatcctgcacttcacagagcacagcggcctgaccactggagtggccttcggccaccacgccaagttcatcgccagcacaggcatggacaggagcctgaagttctacagcctgtag

SEQ ID NO: 180413 - DNA, 1515 bp, Artificial Sequence
  derived and/or modified sequence
atgagcctgatctgcagcatcagcaacgaggtgcccgagcacccctgtgtgagcccggtgtccaaccacgtatatgagcggcgcttgattgagaagtatattgctgaaaatgggactgatcctattaataatcagcctttatcagaggagcagctgattgatataaaagtggctcaccctattaggccaaagcccccctccgccaccagcatcccggcgatcctcaaagctctccaggatgaatgggatgccgtcatgttgcacagcttcactttgcgccagcagctacagacgaccaggcaagagctgtcccacgccttgtaccagcacgatgccgcttgccgggtgatcgcgagactgacaaaggaggtgacagcagcccgcgaggccttggcgacactcaaacctcaagccggattgatcgttccccaggcagtgcccagctctcagccgtcagtagtcggggctggggagccaatggacctgggcgagctagtggggatgacgcccgagataattcagaagttacaggacaaggcaacggttctgaccacggagcgcaagaaaaggggaaagaccgtgcctgaggagctcgtgaagccggaggagctgagcaaataccgacaggtggcctcacatgtgggcctgcatagcgcttcaatcccaggcatacttgccctagatctctgtccgagcgacaccaacaaaatactgaccggcggcgcagacaaaaatgtggtagtgtttgataaatccagcgaacagattctggcaaccctgaaaggccacacgaagaaggtcacatcagtcgtgttccatcccagccaagatctagtgttttccgcctctccggatgcgactattaggatctggagcgtccccaatgcatcttgtgtacaagtggtgcgggcgcacgagagcgccgtgacaggattgagcttgcatgctaccggcgattatctgctgtcctccagcgacgatcagtattgggccttctctgacattcaaactgggagggtgttgaccaaggtgaccgacgaaacctccggctgcagccttacttgcgctcaatttcacccggatggactgattttcggcacgggaactatggactcgcaaatcaaaatttgggacctgaaggagcgaaccaatgtcgctaattttccaggtcatagcgggccaataacaagtatcgcctttagtgagaacgggtattatctggccacagccgctgacgattcttctgttaaattatgggacctgcggaagctcaagaattttaaaaccctgcagctggataataacttcgaagtgaagagtctgattttcgatcagagcggaacttatctcgctctgggaggaactgatgtgcagatctatatttgtaagcagtggactgagattctgcactttacggaacacagtggcctgactactggcgtagcattcggccaccacgcgaaatttatcgcctccaccggaatggaccggagtttgaagttttactcactatag

SEQ ID NO: 180414 - DNA, 1515 bp, Artificial Sequence
  derived and/or modified sequence
atgagtctcatttgctctatctccaacgaggtccccgagcatccttgcgtgagcccggtcagcaaccacgtgtacgagcgtcgccttattgaaaaatacatagcagaaaacggaaccgaccctataaacaatcagcctctttcggaggagcaactgatcgacattaaagtggcccatcctatccgaccaaagcccccttccgccacaagtatccccgctattttgaaagctttgcaagatgagtgggacgcagtgatgttacactcttttacactcagacagcagcttcagactacccgccaggagctgtctcatgctctctatcaacatgacgcagcatgtcgggtcattgctcgcttaaccaaggaggtgacggccgctagggaggccctggccactctgaagccccaggccggattgattgtcccacaggctgtaccaagcagccagccttctgtggtcggtgctggagagcctatggacttaggggaactggtaggcatgacaccggagatcattcagaagttgcaggataaagcgacagtcctgaccacagagcgtaagaagcggggaaaaaccgtgcctgaggaattagtgaagcccgaggagctgtctaaatatagacaggtagcatctcacgtgggtctgcattccgctagcatacctggaattctggctctggacttgtgccccagtgatacaaataagatcctgactggcggagccgataaaaacgtagtggtcttcgataagtcttccgaacaaattttggctacactgaaaggccacaccaaaaaagtcacctcagtagtgttccacccatcccaggatctcgttttcagtgcttcacctgacgccaccatccggatttggagtgtccccaacgcctcgtgtgtgcaagtagtgcgcgctcatgagtcggccgttactggattatccctccatgccacaggggactacttgctttcttcctccgacgatcagtactgggcattttctgatattcagacaggcagggtgctgactaaggtgactgacgagacttccgggtgcagcctaacctgcgcacaattccatcccgatggactcatttttggaactggtaccatggacagccagatcaaaatttgggacctgaaggaaaggactaatgtggccaacttccccggtcacagtggaccaattacctcgatagccttctcagaaaacgggtactaccttgccacagcagctgacgactcctcggtaaaactgtgggacctgcgaaaactcaagaatttcaagacactacagctggacaacaactttgaggttaagtcccttatcttcgatcagagcggaacttatcttgccctgggcggtacagatgtgcagatctatatctgcaaacagtggacagagatcctccattttacagaacacagtggcctgacaaccggagtggcatttggccaccacgcgaagtttattgcaagtaccggcatggataggagtctgaaattttactcgctgtag

SEQ ID NO: 180415 - DNA, 2157 bp, Artificial Sequence
  derived and/or modified sequence
ggcaatttccgttaggtgctgaaggctgtggcgcgcggctgtccccattcccacgtgaagcgctacgctagcatcgctcggctggcggctcccagctcgccgcggagcagtcccggcagcagcgggggaccggaagtggctcgcggaggctcagaagctagtcccggagcccggcgtgtggcgcctcggagcacggtgacggcgccatgtccctaatctgctccatctctaacgaagtgccggagcacccatgtgtatcccctgtctctaatcatgtttatgagcggcggctcatcgagaagtacattgcggagaatggtaccgaccccatcaacaaccagcctctctccgaggagcagctcatcgacatcaaagttgctcacccaatccggcccaagcctccctcagccaccagcatcccggccattctgaaagctttgcaggatgagtgggatgcagtcatgctgcacagcttcactctgcgccagcagctgcagacaacccgccaagagctgtcacacgctctgtaccagcacgatgccgcctgccgtgtcattgcccgtctcaccaaggaagtcactgctgcccgagaagctctggctaccctgaaaccacaggctggcctcattgtgccccaggctgtgccaagttcccaaccaagtgttgtgggtgcgggtgagccaatggatttgggtgagctggtgggaatgaccccagagattattcagaagcttcaagacaaagccactgtgctaaccacggagcgcaagaagagagggaagactgtgcctgaggagctggtgaagccagaagagctcagcaaataccggcaggtggcatcccacgtggggttgcacagtgccagcattcctgggatcctggccctggacctctgcccgtccgacaccaacaagatcctcactggtggggcggataaaaatgtcgttgtgtttgacaaaagttctgaacaaatcctggctaccctcaaaggccataccaagaaggtcaccagcgtggtgtttcacccttcccaggacctggtgttttctgcttcccccgatgccactatcaggatttggtcggtccccaatgcctcttgtgtacaggtggttcgggcccatgagagtgctgtgacaggcctcagccttcatgccactggcgactatctcctgagctcctccgatgatcagtactgggctttctctgacatccagacagggcgtgtgctcaccaaggtgacagatgagacctccggctgctctctcacctgtgcacagttccaccctgacggactcatctttggaacaggaaccatggactctcagatcaagatctgggacttgaaggaacgtactaatgtggccaacttccctggccactcgggccccatcactagcatcgccttctctgagaatggttactacctggctacagcggctgatgactcctctgtcaagctctgggatctgcgcaagcttaagaactttaagactttgcagctggataacaactttgaggtaaagtcactgatctttgaccagagtggtacctacctggctcttgggggcacggatgtccagatctacatctgcaaacaatggacggagattcttcactttacagagcatagcggcctgaccacaggggtggccttcgggcatcacgccaagttcatcgcttcaacaggcatggacagaagcctcaagttctacagcctgtaggccctggcccttctgatggaagctgggcctcatctcagtagaggggtagaattagggtttgggggggggggtggggggaatctatggggggagggggctctgtggggtgggacattcacatcatttcactctggtctgagtggtggcctgagaaccatggtggcatggaccaccctcatccatgcaactccaggccccatgggaacggatgtggaaggaagaactgtcaccctcttaaggcccagggtcggagcccagggcctctcccttcctgtcgttcaatggacgtggtggtggctgttccacacccattttgttgcagttcctgtgagacaggagaggctgagccaagggaactgtgaaggggatgggcaggagggcttgtgcagggttttgtaagcagtgatctagtttcattaaaaaaagaaaacaataa

SEQ ID NO: 180416 - protein, 2785 aa, Artificial Sequence
  derived and/or modified sequence
MKTKPVSHKTENTYRFLTFAERLGNVNIDIIHRIDRTASYEEEVETYFFEGLLKWRELNLTEHFGKFYKEVIDKCQSFNQLVYHQNEIVQSLKTHLQVKNSFAYQPLLDLVVQLARDLQMDFYPHFPEFFLTITSILETQDTELLEWAFTSLSYLYKYLWRLMVKDMSSIYSMYSTLLAHKKLHIRNFAAESFTFLMRKVSDKNALFNLMFLDLDKHPEKVEGVGQLLFEMCKGVRNMFHSCTGQAVKLILRKLGPVTETETQLPWMLIGETLKNMVKSTVSYISKEHFGTFFECLQESLLDLHTKVTKTNCCESSEQIKRLLETYLILVKHGSGTKIPTPADVCKVLSQTLQVASLSTSCWETLLDVISALILGENVSLPETLIKETIEKIFESRFEKRLIFSFSEVMFAMKQFEQLFLPSFLSYIVNCFLIDDAVVKDEALAILAKLILNKAAPPTAGSMAIEKYPLVFSPQMVGFYIKQKKTRSKGRNEQFPVLDHLLSIIKLPPNKDTTYLSQSWAALVVLPHIRPLEKEKVIPLVTGFIEALFMTVDKGSFGKGNLFVLCQAVNTLLSLEESSELLHLVPVERVKNLVLTFPLEPSVLLLTDLYYQRLALCGCKGPLSQEALMELFPKLQANISTGVSKIRLLTIRILNHFDVQLPESMEDDGLSERQSVFAILRQAELVPATVNDYREKLLHLRKLRHDVVQTAVPDGPLQEVPLRYLLGMLYINFSALWDPVIELISSHAHEMENKQFWKVYYEHLEKAATHAEKELQNDMTDEKSVGDESWEQTQEGDVGALYHEQLALKTDCQERLDHTNFRFLLWRALTKFPERVEPRSRELSPLFLRFINNEYYPADLQVAPTQDLRRKGKGMVAEEIEEEPAAGDDEELEEEAVPQDESSQKKKTRRAAAKQLIAHLQVFSKFSNPRALYLESKLYELYLQLLLHQDQMVQKITLDCIMTYKHPHVLPYRENLQRLLEDRSFKEEIVHFSISEDNAVVKTAHRADLFPILMRILYGRMKNKTGSKTQGKSASGTRMAIVLRFLAGTQPEEIQIFLDLLFEPVRHFKNGECHSAVIQAVEDLDLSKVLPLGRQHGILNSLEIVLKNISHLISAYLPKILQILLCMTATVSHILDQREKIQLRFINPLKNLRRLGIKMVTDIFLDWESYQFRTEEIDAVFHGAVWPQISRLGSESQYSPTPLLKLISIWSRNARYFPLLAKQKPGHPECDILTNVFAILSAKNLSDATASIVMDIVDDLLNLPDFEPTETVLNLLVTGCVYPGIAENIGESITIGGRLILPHVPAILQYLSKTTISAEKVKKKKNRAQVSKELGILSKISKFMKDKEQSSVLITLLLPFLHRGNIAEDTEVDILVTVQNLLKHCVDPTSFLKPIAKLFSVIKNKLSRKLLCTVFETLSDFESGLKYITDVVKLNAFDQRHLDDINFDVRFETFQTITSYIKEMQIVDVNYLIPVMHNCFYNLELGDMSLSDNASMCLMSIIKKLAALNVTEKDYREIIHRSLLEKLRKGLKSQTESIQQDYTTILSCLIQTFPNQLEFKDLVQLTHYHDPEMDFFENMKHIQIHRRARALKKLAKQLMEGKVVLSSKSLQNYIMPYAMTPIFDEKMLKHENITTAATEIIGAICKHLSWSAYMYYLKHFIHVLQTGQINQKLGVSLLVIVLEAFHFDHKTLEEQMGKIENEENAIEAIELPEPEAMELERVDEEEKEYTCKSLSDNGQPGTPDPADSGGTSAKESECITKPVSFLPQNKEEIERTIKNIQGTITGDILPRLHKCLASTTKREEEHKLVKSKVVNDEEVVRVPLAFAMVKLMQSLPQEVMEANLPSILLKVCALLKNRAQEIRDIARSTLAKIIEDLGVHFLLYVLKELQTTLVRGYQVHVLTFTVHMLLQGLTNKLQVGDLDSCLDIMIEIFNHELFGAVAEEKEVKQILSKVMEARRSKSYDSYEILGKFVGKDQVTKLILPLKEILQNTTSLKLARKVHETLRRITVGLIVNQEMTAESILLLSYGLISENLPLLTEKEKNPVAPAPDPRLPPQSCLLLPPTPVRGGQKAVVSRKTNMHIFIESGLRLLHLSLKTSKIKSSGECVLEMLDPFVSLLIDCLGSMDVKVITGALQCLIWVLRFPLPSIETKAEQLTKHLFLLLKDYAKLGAARGQNFHLVVNCFKCVTILVKKVKSYQITEKQLQVLLAYAEEDIYDTSRQATAFGLLKAILSRKLLVPEIDEVMRKVSKLAVSAQSEPARVQCRQVFLKYILDYPLGDKLRPNLEFMLAQLNYEHETGRESTLEMIAYLFDTFPQGLLHENCGMFFIPLCLMTINDDSATCKKMASMTIKSLLGKISLEKKDWLFDMVTTWFGAKKRLNRQLAALICGLFVESEGVDFEKRLGTVLPVIEKEIDPENFKDIMEETEEKAADRLLFSFLTLITKLIKECNIIQFTKPAETLSKIWSHVHSHLRHPHNWVWLTAAQIFGLLFASCQPEELIQKWNTKKTKKHLPEPVAIKFLASDLDQKMKSISLASCHQLHSKFLDQSLGEQVVKNLLFAAKVLYLLELYCEDKQSKIKEDLEEQEALEDGVACADEKAESDGEEKEEVKEELGRPATLLWLIQKLSRIAKLEAAYSPRNPLKRTCIFKFLGAVAMDLGIDKVKPYLPMIIAPLFRELNSTYSEQDPLLKNLSQEIIELLKKLVGLESFSLAFASVQKQANEKRALRKKRKALEFVTNPDIAAKKKMKKHKNKSEAKKRKIEFLRPGYKAKRQKSHSLKDLAMVE

SEQ ID NO: 180417 - DNA, 8358 bp, Artificial Sequence
  derived and/or modified sequence
atgaagaccaagcccgtgagccacaagaccgagaacacctacagattcctgaccttcgccgagagactgggcaacgtgaacatcgacatcatccacagaatcgacagaaccgccagctacgaggaggaggtggagacctacttcttcgagggcctgctgaagtggagagagctgaacctgaccgagcacttcggcaagttctacaaggaggtgatcgacaagtgccagagcttcaaccagctggtgtaccaccagaacgagatcgtgcagagcctgaagacccacctgcaggtgaagaacagcttcgcctaccagcccctgctggacctggtggtgcagctggccagagacctgcagatggacttctacccccacttccccgagttcttcctgaccatcaccagcatcctggagacccaggacaccgagctgctggagtgggccttcaccagcctgagctacctgtacaagtacctgtggagactgatggtgaaggacatgagcagcatctacagcatgtacagcaccctgctggcccacaagaagctgcacatcagaaacttcgccgccgagagcttcaccttcctgatgagaaaggtgagcgacaagaacgccctgttcaacctgatgttcctggacctggacaagcaccccgagaaggtggagggcgtgggccagctgctgttcgagatgtgcaagggcgtgagaaacatgttccacagctgcaccggccaggccgtgaagctgatcctgagaaagctgggccccgtgaccgagaccgagacccagctgccctggatgctgatcggcgagaccctgaagaacatggtgaagagcaccgtgagctacatcagcaaggagcacttcggcaccttcttcgagtgcctgcaggagagcctgctggacctgcacaccaaggtgaccaagaccaactgctgcgagagcagcgagcagatcaagagactgctggagacctacctgatcctggtgaagcacggcagcggcaccaagatccccacccccgccgacgtgtgcaaggtgctgagccagaccctgcaggtggccagcctgagcaccagctgctgggagaccctgctggacgtgatcagcgccctgatcctgggcgagaacgtgagcctgcccgagaccctgatcaaggagaccatcgagaagatcttcgagagcagattcgagaagagactgatcttcagcttcagcgaggtgatgttcgccatgaagcagttcgagcagctgttcctgcccagcttcctgagctacatcgtgaactgcttcctgatcgacgacgccgtggtgaaggacgaggccctggccatcctggccaagctgatcctgaacaaggccgccccccccaccgccggcagcatggccatcgagaagtaccccctggtgttcagcccccagatggtgggcttctacatcaagcagaagaagaccagaagcaagggcagaaacgagcagttccccgtgctggaccacctgctgagcatcatcaagctgccccccaacaaggacaccacctacctgagccagagctgggccgccctggtggtgctgccccacatcagacccctggagaaggagaaggtgatccccctggtgaccggcttcatcgaggccctgttcatgaccgtggacaagggcagcttcggcaagggcaacctgttcgtgctgtgccaggccgtgaacaccctgctgagcctggaggagagcagcgagctgctgcacctggtgcccgtggagagagtgaagaacctggtgctgaccttccccctggagcccagcgtgctgctgctgaccgacctgtactaccagagactggccctgtgcggctgcaagggccccctgagccaggaggccctgatggagctgttccccaagctgcaggccaacatcagcaccggcgtgagcaagatcagactgctgaccatcagaatcctgaaccacttcgacgtgcagctgcccgagagcatggaggacgacggcctgagcgagagacagagcgtgttcgccatcctgagacaggccgagctggtgcccgccaccgtgaacgactacagagagaagctgctgcacctgagaaagctgagacacgacgtggtgcagaccgccgtgcccgacggccccctgcaggaggtgcccctgagatacctgctgggcatgctgtacatcaacttcagcgccctgtgggaccccgtgatcgagctgatcagcagccacgcccacgagatggagaacaagcagttctggaaggtgtactacgagcacctggagaaggccgccacccacgccgagaaggagctgcagaacgacatgaccgacgagaagagcgtgggcgacgagagctgggagcagacccaggagggcgacgtgggcgccctgtaccacgagcagctggccctgaagaccgactgccaggagagactggaccacaccaacttcagattcctgctgtggagagccctgaccaagttccccgagagagtggagcccagaagcagagagctgagccccctgttcctgagattcatcaacaacgagtactaccccgccgacctgcaggtggcccccacccaggacctgagaagaaagggcaagggcatggtggccgaggagatcgaggaggagcccgccgccggcgacgacgaggagctggaggaggaggccgtgccccaggacgagagcagccagaagaagaagaccagaagagccgccgccaagcagctgatcgcccacctgcaggtgttcagcaagttcagcaaccccagagccctgtacctggagagcaagctgtacgagctgtacctgcagctgctgctgcaccaggaccagatggtgcagaagatcaccctggactgcatcatgacctacaagcacccccacgtgctgccctacagagagaacctgcagagactgctggaggacagaagcttcaaggaggagatcgtgcacttcagcatcagcgaggacaacgccgtggtgaagaccgcccacagagccgacctgttccccatcctgatgagaatcctgtacggcagaatgaagaacaagaccggcagcaagacccagggcaagagcgccagcggcaccagaatggccatcgtgctgagattcctggccggcacccagcccgaggagatccagatcttcctggacctgctgttcgagcccgtgagacacttcaagaacggcgagtgccacagcgccgtgatccaggccgtggaggacctggacctgagcaaggtgctgcccctgggcagacagcacggcatcctgaacagcctggagatcgtgctgaagaacatcagccacctgatcagcgcctacctgcccaagatcctgcagatcctgctgtgcatgaccgccaccgtgagccacatcctggaccagagagagaagatccagctgagattcatcaaccccctgaagaacctgagaagactgggcatcaagatggtgaccgacatcttcctggactgggagagctaccagttcagaaccgaggagatcgacgccgtgttccacggcgccgtgtggccccagatcagcagactgggcagcgagagccagtacagccccacccccctgctgaagctgatcagcatctggagcagaaacgccagatacttccccctgctggccaagcagaagcccggccaccccgagtgcgacatcctgaccaacgtgttcgccatcctgagcgccaagaacctgagcgacgccaccgccagcatcgtgatggacatcgtggacgacctgctgaacctgcccgacttcgagcccaccgagaccgtgctgaacctgctggtgaccggctgcgtgtaccccggcatcgccgagaacatcggcgagagcatcaccatcggcggcagactgatcctgccccacgtgcccgccatcctgcagtacctgagcaagaccaccatcagcgccgagaaggtgaagaagaagaagaacagagcccaggtgagcaaggagctgggcatcctgagcaagatcagcaagttcatgaaggacaaggagcagagcagcgtgctgatcaccctgctgctgcccttcctgcacagaggcaacatcgccgaggacaccgaggtggacatcctggtgaccgtgcagaacctgctgaagcactgcgtggaccccaccagcttcctgaagcccatcgccaagctgttcagcgtgatcaagaacaagctgagcagaaagctgctgtgcaccgtgttcgagaccctgagcgacttcgagagcggcctgaagtacatcaccgacgtggtgaagctgaacgccttcgaccagagacacctggacgacatcaacttcgacgtgagattcgagaccttccagaccatcaccagctacatcaaggagatgcagatcgtggacgtgaactacctgatccccgtgatgcacaactgcttctacaacctggagctgggcgacatgagcctgagcgacaacgccagcatgtgcctgatgagcatcatcaagaagctggccgccctgaacgtgaccgagaaggactacagagagatcatccacagaagcctgctggagaagctgagaaagggcctgaagagccagaccgagagcatccagcaggactacaccaccatcctgagctgcctgatccagaccttccccaaccagctggagttcaaggacctggtgcagctgacccactaccacgaccccgagatggacttcttcgagaacatgaagcacatccagatccacagaagagccagagccctgaagaagctggccaagcagctgatggagggcaaggtggtgctgagcagcaagagcctgcagaactacatcatgccctacgccatgacccccatcttcgacgagaagatgctgaagcacgagaacatcaccaccgccgccaccgagatcatcggcgccatctgcaagcacctgagctggagcgcctacatgtactacctgaagcacttcatccacgtgctgcagaccggccagatcaaccagaagctgggcgtgagcctgctggtgatcgtgctggaggccttccacttcgaccacaagaccctggaggagcagatgggcaagatcgagaacgaggagaacgccatcgaggccatcgagctgcccgagcccgaggccatggagctggagagagtggacgaggaggagaaggagtacacctgcaagagcctgagcgacaacggccagcccggcacccccgaccccgccgacagcggcggcaccagcgccaaggagagcgagtgcatcaccaagcccgtgagcttcctgccccagaacaaggaggagatcgagagaaccatcaagaacatccagggcaccatcaccggcgacatcctgcccagactgcacaagtgcctggccagcaccaccaagagagaggaggagcacaagctggtgaagagcaaggtggtgaacgacgaggaggtggtgagagtgcccctggccttcgccatggtgaagctgatgcagagcctgccccaggaggtgatggaggccaacctgcccagcatcctgctgaaggtgtgcgccctgctgaagaacagagcccaggagatcagagacatcgccagaagcaccctggccaagatcatcgaggacctgggcgtgcacttcctgctgtacgtgctgaaggagctgcagaccaccctggtgagaggctaccaggtgcacgtgctgaccttcaccgtgcacatgctgctgcagggcctgaccaacaagctgcaggtgggcgacctggacagctgcctggacatcatgatcgagatcttcaaccacgagctgttcggcgccgtggccgaggagaaggaggtgaagcagatcctgagcaaggtgatggaggccagaagaagcaagagctacgacagctacgagatcctgggcaagttcgtgggcaaggaccaggtgaccaagctgatcctgcccctgaaggagatcctgcagaacaccaccagcctgaagctggccagaaaggtgcacgagaccctgagaagaatcaccgtgggcctgatcgtgaaccaggagatgaccgccgagagcatcctgctgctgagctacggcctgatcagcgagaacctgcccctgctgaccgagaaggagaagaaccccgtggcccccgcccccgaccccagactgcccccccagagctgcctgctgctgccccccacccccgtgagaggcggccagaaggccgtggtgagcagaaagaccaacatgcacatcttcatcgagagcggcctgagactgctgcacctgagcctgaagaccagcaagatcaagagcagcggcgagtgcgtgctggagatgctggaccccttcgtgagcctgctgatcgactgcctgggcagcatggacgtgaaggtgatcaccggcgccctgcagtgcctgatctgggtgctgagattccccctgcccagcatcgagaccaaggccgagcagctgaccaagcacctgttcctgctgctgaaggactacgccaagctgggcgccgccagaggccagaacttccacctggtggtgaactgcttcaagtgcgtgaccatcctggtgaagaaggtgaagagctaccagatcaccgagaagcagctgcaggtgctgctggcctacgccgaggaggacatctacgacaccagcagacaggccaccgccttcggcctgctgaaggccatcctgagcagaaagctgctggtgcccgagatcgacgaggtgatgagaaaggtgagcaagctggccgtgagcgcccagagcgagcccgccagagtgcagtgcagacaggtgttcctgaagtacatcctggactaccccctgggcgacaagctgagacccaacctggagttcatgctggcccagctgaactacgagcacgagaccggcagagagagcaccctggagatgatcgcctacctgttcgacaccttcccccagggcctgctgcacgagaactgcggcatgttcttcatccccctgtgcctgatgaccatcaacgacgacagcgccacctgcaagaagatggccagcatgaccatcaagagcctgctgggcaagatcagcctggagaagaaggactggctgttcgacatggtgaccacctggttcggcgccaagaagagactgaacagacagctggccgccctgatctgcggcctgttcgtggagagcgagggcgtggacttcgagaagagactgggcaccgtgctgcccgtgatcgagaaggagatcgaccccgagaacttcaaggacatcatggaggagaccgaggagaaggccgccgacagactgctgttcagcttcctgaccctgatcaccaagctgatcaaggagtgcaacatcatccagttcaccaagcccgccgagaccctgagcaagatctggagccacgtgcacagccacctgagacacccccacaactgggtgtggctgaccgccgcccagatcttcggcctgctgttcgccagctgccagcccgaggagctgatccagaagtggaacaccaagaagaccaagaagcacctgcccgagcccgtggccatcaagttcctggccagcgacctggaccagaagatgaagagcatcagcctggccagctgccaccagctgcacagcaagttcctggaccagagcctgggcgagcaggtggtgaagaacctgctgttcgccgccaaggtgctgtacctgctggagctgtactgcgaggacaagcagagcaagatcaaggaggacctggaggagcaggaggccctggaggacggcgtggcctgcgccgacgagaaggccgagagcgacggcgaggagaaggaggaggtgaaggaggagctgggcagacccgccaccctgctgtggctgatccagaagctgagcagaatcgccaagctggaggccgcctacagccccagaaaccccctgaagagaacctgcatcttcaagttcctgggcgccgtggccatggacctgggcatcgacaaggtgaagccctacctgcccatgatcatcgcccccctgttcagagagctgaacagcacctacagcgagcaggaccccctgctgaagaacctgagccaggagatcatcgagctgctgaagaagctggtgggcctggagagcttcagcctggccttcgccagcgtgcagaagcaggccaacgagaagagagccctgagaaagaagagaaaggccctggagttcgtgaccaaccccgacatcgccgccaagaagaagatgaagaagcacaagaacaagagcgaggccaagaagagaaagatcgagttcctgagacccggctacaaggccaagagacagaagagccacagcctgaaggacctggccatggtggagtag

SEQ ID NO: 180418 - DNA, 8358 bp, Artificial Sequence
  derived and/or modified sequence
atgaaaactaaacctgttagccacaaaacagaaaatacataccgattcctgacctttgcggagaggttgggaaacgtgaatatcgatataatacataggatagaccggactgcatcttatgaagaagaggtggaaacctactttttcgaaggcctactgaagtggagggagctgaatctcaccgaacactttggtaagttttataaagaagtgatagataagtgtcagagcttcaaccagctggtgtatcaccagaatgagatcgttcagtcacttaaaacccatcttcaggtaaagaattccttcgcatatcagcccttgctggatctggtggtgcagctggctcgtgacctgcagatggatttttatcctcatttccctgaattcttcctgacaatcacgtcgatcttggaaacccaggatacggaattgctggaatgggccttcacttctctcagttatctatacaagtacctgtggaggcttatggtgaaagacatgtcatcaatatatagcatgtacagcaccctgttggctcataagaagcttcacatccgcaactttgccgccgagtccttcacgttcctgatgcgcaaggtgtcagacaaaaacgcactgttcaatctcatgttcctggacctcgataaacacccagaaaaggttgaaggggtgggccaactgctatttgaaatgtgtaagggagttagaaacatgttccactcgtgcacaggacaggcggttaaactcattctgaggaagctgggcccagtgaccgaaaccgagacacagctcccttggatgcttatcggcgaaactctgaagaacatggttaaaagcactgtgtcttacatctcgaaggaacacttcgggacctttttcgaatgtctccaggaatccttgctcgacctgcatacaaaggtgacaaaaaccaactgctgcgagagcagcgagcagattaaacggctgctggagacctacttgattctggtcaagcacggctccggtacaaaaatcccaacccccgcagatgtttgtaaagttctgtctcagacgcttcaggtcgcaagcctcagtacatcctgctgggaaactcttttggacgtgatctccgctttgatcttgggtgagaatgtgtctttaccagagaccctgatcaaggagaccatcgagaagatattcgaatctagatttgagaagaggttgatcttttctttttcagaggtgatgtttgccatgaagcagttcgagcaactttttcttcctagcttcctgtcctatatcgtaaattgcttcctgatcgatgacgctgtcgtcaaggacgaggcactcgccatcctagctaaacttatcttaaacaaggcggctccaccgaccgcaggaagtatggccatcgaaaagtatccactggtgtttagtccccagatggtcgggttctatattaagcagaagaaaacaaggtccaagggtcgcaacgagcagtttcccgtgctggatcatcttctgtccattattaaactgccccccaataaggatacaacttaccttagccagtcatgggccgctctggtggttctccctcacatcagacctctcgaaaaggaaaaggtcatcccgctcgtgactggattcattgaagccctgtttatgactgtagataaaggttccttcggcaaggggaatctgttcgtcttgtgccaagccgtcaatacactgttatctctggaagaatcaagtgagctcctgcacctggtcccggtggagcgcgttaagaatttagtcctcacctttcctctggaacccagcgtcttattgctgactgacctctattaccagaggctggcactctgtggctgcaaggggccccttagccaggaagcactgatggagcttttccctaaactgcaggcgaatattagcaccggtgtttcgaaaatccggctgctcactatccgtatcctaaatcacttcgacgttcagctccctgaatcaatggaggatgacgggctgtcagagcgacaatccgtcttcgccatcctgcggcaggctgaactggtgccagcaactgtcaatgactacagagaaaaactgctccaccttagaaagctgcgacacgacgtggtccaaaccgccgtgcctgatggcccactgcaggaagtgcccttgcggtatcttctaggcatgctgtacattaatttctccgccttgtgggaccctgtaattgagttgatctcgtctcatgctcacgagatggaaaacaaacaattttggaaggtgtattacgagcatctggaaaaggctgccacccacgcagagaaggagctccagaacgacatgaccgatgaaaagtccgtaggagacgaatcgtgggaacagacccaggaaggtgatgtgggggctctgtaccacgaacagttggctctgaaaacagattgtcaggaaagactcgaccacacgaactttaggtttctgttgtggcgggcacttaccaaattcccagagcgagtggaacctcgctctcgggagctttctcccttgttcctcagattcatcaataacgagtattatccagcagacctgcaggtggcccccacacaggatctgcgtagaaaaggcaaggggatggtcgcagaagagatcgaagaagaaccagcagctggggatgatgaagagctcgaagaagaagctgtgccccaggatgagtcaagtcagaagaaaaagacgcgacgggccgctgccaaacagctcatcgcccatctccaggttttctcaaaattttctaatccaagagctctatacttggagtccaagctttacgagctgtatctccaactactcctgcatcaagaccaaatggtgcagaagataacactggactgcataatgacttacaaacacccccatgtcctgccctatagggagaacctgcagcggctcttagaagataggtcttttaaagaggaaattgtgcactttagcattagcgaagataacgctgtcgtcaagactgcacatcgagctgatctgtttcccattttgatgcggattttgtacggccgtatgaagaacaaaaccgggagcaaaacacagggtaagtccgcaagtggcacccggatggctatagttttaaggtttctggcaggcactcagccagaggagattcagatattcttggacctactctttgagccggtacgccattttaagaacggggagtgccattccgccgtgatccaggctgtagaggatctcgacctaagcaaagttctcccgctgggacgccagcatgggatattgaattccctggaaatcgttctgaagaatatctcgcatctgatctcagcatatttaccaaagatcttgcagatcctcctgtgcatgacagccaccgtctcgcatattctggatcagagggagaagattcagctacgctttattaaccccttaaaaaatcttcgtcgtttaggcatcaaaatggttactgatatctttctagactgggaaagctaccagtttcgcacggaggagatcgatgccgtatttcatggcgcggtgtggccgcaaatctcaagactcggaagcgagtcccaatatagcccaacgcctctgctgaaactgattagtatctggagccgtaatgctcggtacttcccacttcttgctaagcagaagcctggtcaccctgaatgcgatattttgacaaatgtgtttgcaattttatccgcaaagaatctgtccgatgccacagcttctattgtcatggatattgtggacgatttactgaatctgcccgatttcgagcccaccgagactgtgctaaacctgttggtgaccggatgtgtgtatccaggtatcgcagagaatatcggggaaagtatcactataggagggcgactgattttaccacatgtgcctgcgatcctccagtatctgtccaagacaactatatccgctgaaaaggtcaaaaaaaagaaaaatagagcccaagttagcaaggaacttggaatcttgagcaagatatctaagtttatgaaagataaggaacagagttccgttcttatcacactgctgctaccctttttacatcggggcaacatagccgaagacaccgaggttgacattctcgtgacagtgcaaaatctactgaaacactgtgtggatccaacaagtttcctcaagcccatcgcaaagcttttcagtgtgattaaaaacaagttgagcagaaaattactctgtactgtgtttgaaactctgtctgatttcgagtccggactcaaatatattaccgatgtcgtgaagctaaacgccttcgaccaacgtcacctcgacgatatcaatttcgatgtacgcttcgagacctttcagacgattaccagttatattaaggagatgcagatcgtagacgttaactacctcataccagtgatgcacaactgtttttacaacctggagctgggggacatgtctttgagcgacaacgctagcatgtgccttatgtccattatcaaaaagctggctgctctgaatgtgactgagaaagattaccgcgaaattatccatcgatctctgctggaaaagctgagaaagggtcttaagtcccagacagagagtatccagcaggattataccactattctttcatgcctcattcagacttttccaaatcagttggagttcaaggatttggtccaactgactcactatcatgatcctgagatggatttttttgaaaacatgaagcacatccaaatacatcgaagagcccgggcactgaagaagttagcaaagcaactgatggagggtaaggtggtactgagttccaaaagcttgcagaactacatcatgccatacgccatgacacccatttttgacgagaaaatgcttaagcatgagaatatcacgactgccgctaccgagattattggtgcaatctgcaaacacctcagctggagcgcatatatgtactatctcaagcattttatacacgtcctgcaaactgggcaaattaaccagaagctgggcgtctctctgctggtgatcgttttggaggccttccattttgatcataaaacactggaggagcaaatgggcaaaattgaaaacgaagagaatgctattgaggcaatcgagctgccagaaccggaggccatggagctggagcgcgtggacgaggaggagaaggaatatacctgcaagtcactgtccgacaatgggcaaccaggtactcccgaccctgccgattcaggaggcacctctgctaaggaaagcgagtgcatcacgaaacctgtctcattccttcctcagaacaaagaggaaattgagcggacaattaaaaatattcaagggaccatcaccggggacatccttccacggttacataagtgcttagcttcaaccaccaagcgtgaggaagaacacaagctcgtgaagagcaaggtggtcaatgacgaagaggttgttagggttcctcttgcatttgcaatggtgaagttaatgcagtcattgccacaggaggttatggaagccaacttgccaagcatcctgctcaaggtctgtgcgttgctcaagaacagagcacaggagattcgtgatatagcccgctcaaccctggctaaaatcatcgaggatctgggggtacatttcttactatacgtgctgaaggaattgcagaccactttggtgcgtgggtaccaggtccatgttctgactttcacagtacatatgttgctgcagggcttgaccaataagttacaggtcggagatcttgattcttgcttggacataatgatcgagatcttcaatcacgaattgtttggggcagtggccgaggagaaggaagtcaaacagattctctccaaggtcatggaagcaagaagatcaaagagctacgattcgtacgaaatactcggtaagttcgtaggaaaagatcaggtgaccaagctcattctgcccctaaaagagatcctccagaatactacaagtctcaagctggcccgcaaagtccacgagacacttaggaggatcaccgttgggcttatcgtgaaccaggagatgacggccgagtccatcctcttactctcttacggcctgataagtgagaatctgccgttgctgacggagaaagagaagaatccggtggctcctgccccagaccctcgattgccccctcaatcttgtctgttactgccgcctaccccggtgcgcggaggccagaaagccgtggtttcccggaaaactaacatgcacattttcattgaatcggggcttagactgcttcacctgagcctaaagaccagtaagattaagtctagcggggagtgcgtgctggaaatgctcgacccctttgtgagtctactaatcgattgcttgggaagcatggacgtcaaggttattacaggcgcactccagtgtttgatatgggttctgcggttccccctcccgtccatcgagaccaaagccgaacaacttacaaagcacctgttcctgctgctgaaggattatgctaaactgggagccgcgcgtggccaaaacttccacctggtcgttaattgctttaaatgtgtcactattctagtgaaaaaagttaagtcataccagattaccgagaaacaacttcaggtactgctggcatacgccgaggaagacatctacgatacctcgcgacaagccaccgcgtttggtctcctaaaagccatcctcagcagaaagttattggtccccgagattgacgaagtgatgagaaaggtgtccaagttagctgtgtctgcccagtctgagccagctagagttcagtgcaggcaggtttttctgaagtatatccttgactatcctttaggtgataaacttcgacctaatttagagttcatgttagcgcaactaaattatgagcatgagacgggtcgcgagtctacgctggaaatgatcgcttacttgttcgacacatttccccagggcctcctgcacgaaaattgtggcatgtttttcatacctctgtgcttaatgacaattaacgatgactccgccacttgcaaaaaaatggccagtatgaccatcaaaagccttttgggaaaaattagtctggagaaaaaggattggctgtttgatatggtgaccacatggtttggtgctaagaagcggctcaaccgccagctagcagccctgatctgcggcctttttgtagaaagcgagggggtcgatttcgagaagaggttgggcacagttctccccgtgattgaaaaagagattgacccggagaattttaaagatataatggaagagacggaagaaaaggcagccgataggctcctcttctctttcctcaccctgatcacaaagttgataaaagagtgtaatataatccagtttacaaaacccgccgagactctgtctaagatctggagtcacgtacattctcacctgcgccaccctcacaactgggtctggttaaccgcagcccagatcttcggccttcttttcgcctcctgccagcccgaagagctcattcagaagtggaatactaagaaaacgaaaaaacacctacctgaacccgtggcgatcaagtttctggccagtgatttggatcaaaagatgaagagtatcagcctggcctcttgtcatcagctccactcgaagttcctggaccaatcacttggcgagcaggtggttaaaaacctcttattcgccgctaaagtcctgtacctcctggaattgtattgcgaggataagcaatctaagattaaagaggacttggaggaacaggaagccttggaagatggagttgcatgtgcagatgaaaaagccgagagcgacggcgaggagaaggaagaggtaaaagaggaactggggcgtccagccactttactctggctcatacagaaactgtcccgaatcgcaaagctggaggctgcctatagtccgcgcaatcctcttaaaaggacatgtatcttcaagtttctgggagccgttgcgatggacctaggtattgacaaagtgaagccttaccttcctatgatcatcgccccacttttcagagagctcaacagtacctacagcgagcaggatcccctgttaaaaaacctctcccaggagatcatcgagctgctgaagaaactggttgggctggagagcttctctctggctttcgcctctgtgcaaaaacaggctaatgaaaagcgggctctgagaaaaaagcgcaaggccctggagtttgtcaccaatcccgacattgcagcaaaaaaaaaaatgaaaaaacacaagaataagtctgaggccaagaagcggaagatcgagttcctccgacctggttacaaggccaagcgacagaagtcccacagcctaaaggatcttgccatggtggagtag

SEQ ID NO: 180419 - DNA, 8358 bp, Artificial Sequence
  derived and/or modified sequence
atgaagaccaagcctgtgagccacaagacagagaacacctaccgcttcctgacctttgctgagcggctgggcaatgtgaacatcgacatcatccacagaattgacagaacagccagctatgaggaggaggtggagacctacttctttgagggcctgctgaagtggagggagctgaacctgacagagcactttgggaagttctacaaggaggtgattgacaagtgccagagcttcaaccagctggtgtaccaccagaatgagatcgtgcagagcctgaagacccacctgcaggtgaagaacagctttgcctaccagcccctgctggacctggtggtgcagctggcccgggacctgcagatggacttctacccccacttccctgagttcttcctgaccatcaccagcatcctggagacccaggacacagagctgctggagtgggccttcaccagcctgagctacctgtacaagtacctgtggaggctgatggtgaaggacatgagcagcatctacagcatgtacagcaccctgctggcccacaagaagctgcacatccggaactttgctgctgagagcttcaccttcctgatgaggaaggtgtctgacaagaatgccctcttcaacctgatgttcctggacctggacaagcaccctgagaaggtggagggcgtgggccagctgctgtttgagatgtgcaagggcgtgaggaacatgttccacagctgcaccggccaggccgtgaagctgatcctgaggaagctgggccctgtgacagaaacagagacccagctgccctggatgctgattggagagaccctgaagaacatggtgaagagcacagtgtcctacatcagcaaggagcacttcggcaccttctttgagtgcctgcaggagagcctgctggacctgcacaccaaggtgaccaagaccaactgctgtgagagcagcgagcagatcaagaggctgctggagacctacctgatcctggtgaagcacggcagcggcaccaagatccccaccccagcagatgtgtgcaaggtgctgagccagaccctgcaggtggccagcctgagcaccagctgctgggagaccctgctggatgtgatcagcgccctgatcctgggggagaatgtgtccctgcctgagaccctcatcaaggagaccatcgagaagatctttgagagcagatttgagaagaggctcatcttctccttcagcgaggtgatgtttgccatgaagcagtttgagcagctgttcctgcccagcttcctgagctacatcgtgaactgcttcctgattgatgatgctgtggtgaaggatgaggccctggccatcctggccaagctgatcctgaacaaggccgccccacccacagctggctccatggccatcgagaagtaccccctggtgttcagcccccagatggtgggcttctacatcaagcagaagaagaccaggagcaagggcagaaatgagcagtttcctgtgctggaccacctgctgagcatcatcaagctgccccccaacaaggacaccacctacctgagccagagctgggccgccctggtggtgctgccccacatccggcccctggagaaggagaaggtgatccccctggtgacaggcttcatcgaggccctcttcatgacagtggacaagggcagctttgggaagggcaacctgtttgtgctgtgccaggccgtgaacaccctgctgagcctggaggagagcagcgagctgctgcacctggtgcctgtggagcgggtgaagaacctggtgctgaccttccccctggagcccagcgtgctgctgctgacagacctgtactaccagaggctggccctgtgtggctgcaagggccccctgagccaggaggccctgatggagctgttccccaagctgcaggccaacatcagcactggagtgtccaagatccggctgctgaccatccgcatcctgaaccactttgatgtgcagctgcctgagagcatggaggatgatggcctgtctgagcggcagagcgtgtttgccatcctgcggcaggccgagctggtgcctgccaccgtgaatgactaccgggagaagctgctgcacctgaggaagctgcggcatgatgtggtgcagacagctgtgcctgatggccccctgcaggaggtgcccctgcgctacctgctgggcatgctgtacatcaacttcagcgccctgtgggaccccgtcatcgagctgatcagcagccacgcccacgagatggagaacaagcagttctggaaggtgtactatgagcacctggagaaggccgccacccacgccgagaaggagctgcagaatgacatgacagatgagaagtctgtgggagatgagagctgggagcagacccaggagggagatgtgggcgccctgtaccacgagcagctggccctgaagacagactgccaggagcggctggaccacaccaacttccgcttcctgctgtggagggccctgaccaagtttcctgagcgggtggagcccaggagccgggagctgagccccctcttcctgcgcttcatcaacaatgagtactacccagctgacctgcaggtggcccccacccaggacctgcggaggaagggcaagggcatggtggccgaggagattgaggaggagcctgctgctggagatgatgaggagctggaggaggaggccgtgccccaggatgagagcagccagaagaagaagacccggcgggctgctgccaagcagctgattgcccacctgcaggtgttcagcaagttcagcaacccccgggccctgtacctggagagcaagctgtatgagctgtacctgcagctgctgctgcaccaggaccagatggtgcagaagatcaccctggactgcatcatgacctacaagcacccccacgtgctgccctaccgggagaacctgcagaggctgctggaggaccgctccttcaaggaggagatcgtgcacttcagcatcagtgaagataatgctgtggtgaagacagcccacagagctgacctcttccccatcctgatgaggatcctgtatggccgcatgaagaacaagacaggcagcaagacccagggcaagagcgccagcggcaccaggatggccatcgtgctgcgcttcctggccggcacccagcctgaggagatccagatcttcctggacctgctgtttgagcctgtgcgccacttcaagaatggagagtgccacagcgctgtgatccaggccgtggaggacctggacctgagcaaggtgctgcccctgggccggcagcacggcatcctgaacagcctggagatcgtgctgaagaacatcagccacctgatcagcgcctacctgcccaagatcctgcagatcctgctgtgcatgacagccaccgtgagccacatcctggaccagcgggagaagatccagctgcgcttcatcaaccccctgaagaacctgcggcggctgggcatcaagatggtgacagacatcttcctggactgggagagctaccagttcagaacagaggagattgatgctgtgttccatggagctgtgtggccccagatcagccggctgggcagcgagagccagtacagccccacccccctgctgaagctgatcagcatctggagcagaaatgcccgctacttccccctgctggccaagcagaagccaggccacccagaatgtgacatcctgaccaacgtgtttgccatcctgagcgccaagaacctgagtgatgccacagccagcatcgtgatggacatcgtggatgacctgctgaacctgcctgactttgagcccacagagaccgtgctgaacctgctggtgacaggctgtgtgtacccaggcattgctgagaacatcggggagagcatcaccatcggcggccgcctcatcctgccccacgtgcctgccatcctgcagtacctgagcaagaccaccatctctgctgagaaggtgaagaagaagaagaacagagcccaggtgtccaaggagctgggcatcctgagcaagatcagcaagttcatgaaggacaaggagcagagctctgtgctgatcaccctgctgctgcccttcctgcaccggggcaacattgctgaggacacagaggtggacatcctggtgacagtgcagaacctgctgaagcactgtgtggaccccaccagcttcctgaagcccatcgccaagctgttcagcgtcatcaagaacaagctgagcaggaagctgctgtgcaccgtgtttgagaccctgagtgactttgagagcggcctgaagtacatcacagatgtggtgaagctgaatgcctttgaccagaggcacctggatgacatcaactttgatgtgcgctttgagaccttccagaccatcaccagctacatcaaggagatgcagatcgtggatgtgaactacctgatccctgtgatgcacaactgcttctacaacctggagctgggggacatgagcctgagtgacaatgcctccatgtgcctgatgagcatcatcaagaagctggccgccctgaatgtgacagagaaggactaccgggagatcatccacaggagcctgctggagaagctgaggaagggcctgaagagccagacagagagcatccagcaggactacaccaccatcctgagctgcctgatccagaccttccccaaccagctggagttcaaggacctggtgcagctgacccactaccatgaccctgagatggacttctttgagaacatgaagcacatccagatccacagaagagcccgggccctgaagaagctggccaagcagctgatggagggcaaggtggtgctgagcagcaagagcctgcagaactacatcatgccctatgccatgacccccatctttgatgagaagatgctgaagcatgagaacatcaccacagctgccacagagatcatcggggccatctgcaagcacctgtcctggagcgcctacatgtactacctgaagcacttcatccacgtgctgcagacaggccagatcaaccagaagctgggcgtgtccctgctggtgattgtgctggaggccttccactttgaccacaagaccctggaggagcagatgggcaagattgaaaatgaggagaatgccatcgaggccatcgagctgcctgagcctgaggccatggagctggagcgggtggatgaggaggagaaggagtacacctgcaagagcctgagtgacaatggccagcccggcaccccagaccctgctgacagcggcggcaccagcgccaaggagagcgagtgcatcaccaagcctgtgtccttcctgccccagaacaaggaggagattgaaagaaccatcaagaacatccagggcaccatcaccggggacatcctgccccggctgcacaagtgcctggccagcaccaccaagcgggaggaggagcacaagctggtgaagagcaaggtggtgaatgatgaggaggtggtgcgggtgcccctggcctttgccatggtgaagctgatgcagagcctgccccaggaggtgatggaggccaacctgcccagcatcctgctgaaggtgtgtgccctgctgaagaacagagcccaggagatccgggacatcgcccggagcaccctggccaagatcatcgaggacctgggcgtgcacttcctgctgtatgtgctgaaggagctgcagaccaccctggtgcggggctaccaggtgcacgtgctgaccttcaccgtgcacatgctgctgcagggcctgaccaacaagctgcaggtgggggacctggacagctgcctggacatcatgattgagatcttcaaccacgagctgtttggagctgtggccgaggagaaggaggtgaagcagatcctgagcaaggtgatggaggcccggcgcagcaagagctatgacagctatgagatcctgggcaagtttgtgggcaaggaccaggtgaccaagctgatcctgcccctgaaggagatcctgcagaacaccaccagcctgaagctggccaggaaggtgcatgagaccctgcggcgcatcaccgtgggcctcatcgtgaaccaggagatgacagctgagagcatcctgctgctgtcctatggcctcatcagcgagaacctgcccctgctgacagagaaggagaagaaccctgtggccccagccccagacccccggctgcccccccagagctgcctgctgctgccccccacccctgtgcggggcggccagaaggctgtggtgtccaggaagaccaacatgcacatcttcatcgagagcggcctgcggctgctgcacctgagcctgaagaccagcaagatcaagagcagtggagaatgtgtgctggagatgctggacccctttgtgtccctgctgattgactgcctgggctccatggatgtgaaggtgatcactggagccctgcagtgcctgatctgggtgctgcgcttccccctgcccagcattgagaccaaggccgagcagctgaccaagcacctgttcctgctgctgaaggactatgccaagctgggcgccgcccggggccagaacttccacctggtggtgaactgcttcaagtgtgtgaccatcctggtgaagaaggtgaagagctaccagatcacagagaagcagctgcaggtgctgctggcctatgcagaggaggacatctatgacaccagccggcaggccacagccttcggcctgctgaaggccatcctgagcaggaagctgctggtgcctgagattgatgaggtgatgaggaaggtgtccaagctggccgtgtctgcccagagcgagcccgcccgggtgcagtgccggcaggtgttcctgaagtacatcctggactaccccctgggggacaagctgcggcccaacctggagttcatgctggcccagctgaactatgagcacgagaccggccgggagagcaccctggagatgattgcctacctgtttgacaccttcccccagggcctgctgcacgagaactgtggcatgttcttcatccccctgtgcctgatgaccatcaatgatgattctgccacctgcaagaagatggcctccatgaccatcaagagcctgctgggcaagatcagcctggagaagaaggactggctgtttgacatggtgaccacctggtttggagccaagaagaggctgaaccggcagctggccgccctgatctgtggcctgtttgtggagagcgagggcgtggactttgagaagaggctgggcaccgtgctgcccgtcatcgagaaggagattgatcctgagaacttcaaggacatcatggaggagacagaggagaaggctgctgaccggctgctcttctccttcctgaccctcatcaccaagctgatcaaggagtgcaacatcatccagttcaccaagccagctgagaccctgagcaagatctggagccacgtgcacagccacctgcggcacccccacaactgggtgtggctgacagctgcccagatcttcggcctgctgtttgccagctgccagcctgaggagctgatccagaagtggaacaccaagaagaccaagaagcacctgcctgagcctgtggccatcaagttcctggccagtgacctggaccagaagatgaagagcatcagcctggccagctgccaccagctgcacagcaagttcctggaccagagcctgggggagcaggtggtgaagaacctgctgtttgctgccaaggtgctgtacctgctggagctgtactgtgaggacaagcagagcaagatcaaggaggacctggaggagcaggaggccctggaggatggagtggcctgtgctgatgagaaggccgagagtgatggagaggagaaggaggaggtgaaggaggagctgggccggcctgccaccctgctgtggctgatccagaagctgagcagaattgccaagctggaggccgcctacagccccaggaaccccctgaagaggacctgcatcttcaagttcctgggcgctgtggccatggacctgggcatcgacaaggtgaagccctacctgcccatgatcatcgcccccctcttccgggagctgaacagcacctacagcgagcaggaccccctgctgaagaacctgagccaggagatcatcgagctgctgaagaagctggtgggcctggagagcttcagcctggcctttgcctctgtgcagaagcaggccaatgagaagagggccctgaggaagaagaggaaggccctggagtttgtgaccaacccagacattgctgccaagaagaagatgaagaagcacaagaacaagtctgaggccaagaagaggaagattgagttcctgcggcccggctacaaggccaagaggcagaagagccacagcctgaaggacctggccatggtggagtag

SEQ ID NO: 180420 - DNA, 8358 bp, Artificial Sequence
  derived and/or modified sequence
atgaagaccaagcccgtgagccacaagaccgagaacacctaccggttcctcaccttcgctgaacgactcggaaatgttaatatcgacatcattcacagaatcgaccgaacagcctcatacgaagaggaagttgagacttatttcttcgaaggcctgctcaaatggcgggagctcaatttgacagagcatttcgggaagttttacaaagaggtcatcgacaagtgccagagcttcaaccagctcgtgtaccatcagaacgaaatcgttcagtccctcaagacacaccttcaagtcaagaattcattcgcatatcagcctctccttgacctcgtggtacagctcgccagggatctgcagatggacttctaccctcactttccagaattcttccttaccattacctcgattctcgaaacgcaggatactgagcttctagagtgggcctttaccagcctttcctacttgtataagtatctgtggcggcttatggtcaaggacatgtcctccatctacagtatgtatagtacattgcttgcacacaaaaaactgcatatccgcaactttgctgccgagtcatttacgttcctgatgcggaaggtatcagacaaaaatgcactgtttaacctgatgtttcttgacctggacaaacacccagagaaggttgagggagtgggtcagctgctgtttgagatgtgtaagggagttagaaacatgtttcactcttgcacagggcaggctgtgaagctgatcttaagaaagctaggccccgtgactgagacggagacacaactgccttggatgttgatcggcgagaccttgaaaaacatggtcaaaagcaccgtgagctacatcagtaaagaacactttgggacattctttgagtgcctgcaggaatcccttttggacttgcacacgaaagtaactaaaaccaattgttgcgaatcctccgagcaaattaaacgactgctggagacttacctgatccttgtgaaacatggcagcggcacaaagattcctacccctgcagacgtgtgcaaggttctgtctcagacactccaagtcgcttcactctcgacatcttgctgggagacacttctggatgtaattagcgctcttatcctgggtgagaatgtgagcctcccagaaacactcataaaagaaactattgaaaagattttcgaatcccgcttcgagaagcggctgatcttcagcttcagcgaggtgatgtttgccatgaaacagtttgagcagctgttcctgccttctttcctgtcttatatcgtcaactgcttccttatcgacgacgcagtcgttaaagacgaggcattagcaatccttgcgaaactgatccttaataaggcagcacccccgacagcaggctctatggctatcgagaaatatcccttggtgtttagccctcagatggtgggcttctatatcaaacaaaaaaagacccgctctaaaggcaggaacgagcagtttccagtgctggaccacctgctgtcaatcatcaagcttcctccaaataaggacacaacatacttgtcacaatcttgggccgccctcgtggtgctgccccacatacgaccactagagaaagagaaggttattccgctggtgaccggcttcatagaagccctgtttatgaccgtggataaagggagtttcggaaaaggtaatctgtttgttctctgtcaagccgtaaacaccttgctgagtctggaggagtcttccgaacttctgcatctcgtgcccgtggagcgcgtaaagaatctggtgctgacattccccctggagccctccgtgctgctgttgaccgacctgtactatcaacgcttagccctgtgtggctgtaagggacctttgtcgcaggaagccctgatggagctgtttccgaagctgcaggccaacatctctactggagtgtctaagatcagactgttgactattagaatcttgaatcattttgatgtgcagctccccgagtccatggaggatgacgggctgtccgaaaggcagagtgtgtttgcgatcttgaggcaagctgaactcgttcccgcaactgttaatgattaccgcgagaagttgctccatctccgcaaactgagacacgacgttgtgcagaccgcagtgcccgatggccctcttcaagaggttccccttcgatatttacttggaatgctctacattaatttcagcgctctgtgggatcctgtgattgagctgatctctagccatgctcacgaaatggagaacaaacagttttggaaggtgtactatgagcacctggagaaagctgctacacacgctgaaaaggaactccaaaatgacatgacagacgagaagtcggtgggggatgagagctgggagcagactcaggagggggacgtgggggccctttatcacgaacagctggccctaaagaccgattgccaagagagattagatcacaccaacttccggtttttattgtggagggccctcaccaaatttcctgagcgggtcgagccaagatcaagggaactatctcctctcttcctgagatttattaacaatgagtattatccggctgatctgcaagtcgcccctactcaggatttgagacggaaaggaaaaggcatggtagccgaagaaattgaagaggagcccgcggccggagacgatgaggagctggaagaagaagctgttccacaggacgagtcctcccagaagaaaaagacaaggcgagctgcggctaagcagctaattgcccatcttcaagtctttagcaaattcagcaaccctagggccctctacctggaatccaagctttacgaattgtacctccagctgttattgcatcaggatcagatggtgcagaagattactctggactgcattatgacgtataagcatccccacgtattgccctaccgcgaaaacctgcagcgcctcctggaggatcggagcttcaaagaggagattgtgcacttttctatcagtgaggataacgctgtagtcaagacagcacatcgggctgatctgtttccaattctgatgcgaatactgtatggacggatgaagaacaagaccggtagcaagacgcagggaaagtctgcatctggaacccggatggcaatcgtgctccggttcttggctggcactcagccagaagagattcaaatcttcctggatctcctcttcgagcctgtgcggcactttaaaaacggggagtgccatagcgcagtgattcaggcagtcgaggacctcgatctctcaaaggttcttccactggggagacagcacggtattctgaacagcctcgaaattgttctgaagaacattagccacctcataagtgcttatctgcccaagatattgcagatactgctttgcatgacagcgacggtatcacacatcctagaccagagggaaaaaattcagctcaggtttattaatccactcaaaaacctgaggcgactcggcatcaaaatggtgacggacatttttctggactgggaatcttaccagttccgtaccgaagagatagatgctgtgtttcacggcgcggtctggccccaaattagccgactcggctcagagtcccagtattctcccactcccctgttaaagctcatcagcatttggtccaggaatgcccggtatttccctctgctggccaaacagaagcccggccaccctgagtgcgatatcctcacgaacgtcttcgccatactgtcggccaaaaacctgtcagacgcaactgcttccattgttatggatattgtcgacgacctgctaaaccttcccgattttgaaccaactgagaccgttttgaatcttctggtgactgggtgtgtgtatccaggtatagctgagaatattggggagtccattacgatcggcggacggctcattctgcctcatgtccccgccatactccaatatttgagcaaaacaaccatcagcgccgaaaaggtcaagaaaaaaaagaaccgggctcaagtgagtaaggaactgggtattctgtccaagatctccaagttcatgaaagacaaggagcagagttctgtgctgattaccctcttactgccttttctacataggggcaatattgccgaggataccgaggtagatattctcgtcacagtgcagaacttactaaagcactgcgtggacccaacttcctttttgaaaccaatcgcaaagctcttttctgtgatcaaaaataagctcagcaggaagttgttgtgtacggtatttgaaacgttatcggatttcgaatcaggactcaaatatataacggacgtggtgaagttaaatgcctttgaccagaggcacctggatgacatcaacttcgacgtgcgcttcgaaaccttccagaccattacatcctacattaaagagatgcaaattgtggacgtcaattatctgattccagtgatgcacaattgcttctacaacctggagctcggagatatgtccctctcagataacgcttctatgtgtctcatgtccataatcaaaaaactagcggcattgaatgtcacagagaaggactacagagaaatcattcaccggtcactgttagaaaaactgaggaaagggctcaaatcccagaccgaaagcattcaacaagactatacaacaattctgagctgtctgatccagaccttcccgaaccagctggagtttaaggacctagtccaacttacgcattaccatgaccctgaaatggacttctttgagaacatgaagcatatacagatccaccggagagctcgtgctctaaagaagttggccaagcagttgatggaggggaaggtggtgctatcgtctaaatccctgcagaattatattatgccttatgctatgactcccattttcgacgagaaaatgctaaaacacgagaatataactactgcagcaacagagataataggcgcaatctgcaaacatttgtcttggtctgcctatatgtattatctcaaacattttatacatgtgctgcagacgggccagataaaccagaaattgggagtttccctgttagtcattgtcctggaagcctttcatttcgaccacaaaactctcgaagaacagatgggaaagattgagaatgaggagaacgccatcgaagccatcgaattgcccgagcccgaggcaatggagctggagcgcgtggatgaagaggagaaagagtatacatgcaagtctctgtccgacaacgggcaacccggcacaccggatcctgctgattctggagggaccagcgcaaaggaaagtgagtgtataaccaagccggtttcatttcttcctcagaataaagaagaaattgagcgcaccataaaaaacattcaaggtactatcaccggtgatatcttacccaggctccacaagtgcctggcctccactacaaagagggaggaggagcacaaacttgtgaaatccaaagtcgtgaatgacgaggaggtggtccgggttcccctagcttttgcaatggttaagttgatgcaatccctcccccaggaggttatggaagcgaacctccctagtatccttcttaaggtgtgcgctctgttaaaaaatagggcccaagaaatccgggacattgctagatctacactggccaaaatcatcgaagatctgggtgttcacttcctcctgtacgttctgaaggagttgcagacaacactcgtgagaggttaccaggtgcacgtgttaacctttaccgttcacatgttactgcaaggcctgactaataaacttcaagtgggggacctcgacagctgtctcgatataatgattgaaatctttaaccacgaactcttcggcgccgtcgccgaagaaaaagaggtgaaacagatcctctccaaggtgatggaggcccgacggtctaaatcctatgattcgtacgagatcttgggcaagttcgttggcaaagatcaggtgacaaagctgatccttccacttaaagagattctgcagaatacgaccagtctgaaactcgcacggaaggtgcatgagaccctacgccgaattactgtgggcctgattgtcaaccaggagatgacagccgagagcatcttgcttctgagttacgggctaatcagtgagaacctccctttgctgactgaaaaagaaaagaaccccgtggctcctgcccccgatccccgtctacccccacagtcctgcctactgcttcctcccaccccagttcgggggggccagaaagcagtagttagccgcaaaaccaacatgcatattttcatcgagtctggtctccggctcctgcatctgagtctcaaaacatctaagattaagagtagcggggagtgcgtgctcgagatgctggatccttttgtgtctctgcttatcgactgcctgggcagcatggatgtgaaggtcatcactggtgccttacagtgtcttatctgggtcctccggttccccctcccttctatagaaacaaaggcagagcagctcacgaaacatctctttttattgctgaaggattacgcgaagcttggggcagctagaggacaaaattttcacctcgtggtgaactgcttcaagtgcgtgacaatcctcgtgaagaaagttaaatcgtaccagattaccgaaaaacaactacaagtgctattggcttacgccgaagaggatatttacgacacctcccggcaagcaacggcctttgggctgctgaaagctattctcagtcgaaagctcctcgtgcctgaaatcgatgaggttatgaggaaggtgagcaaactggcagtgtctgctcaatctgagccagctcgagtacagtgtaggcaggtctttctgaagtacatcctggattatcctctgggggacaaattacggcccaaccttgagtttatgctggcacaactgaactacgaacacgaaaccggaagggagtccacactggagatgatcgcatatctgtttgatacctttcctcagggattacttcacgaaaactgcggcatgtttttcatcccactctgcctcatgacgattaacgatgactcagccacctgtaagaagatggcttccatgactataaagtctttgctggggaaaattagtctcgaaaagaaagactggctcttcgacatggtgacaacatggttcggtgccaagaagcggctgaatcgacagctggcagccttgatttgcggtttattcgtcgaaagcgagggcgtggacttcgagaagcgattggggactgtgctccccgtcatagagaaggagattgatccagagaattttaaggatatcatggaagagacggaggaaaaggccgcagacaggcttttattttccttcctgacgttgatcacgaaattaatcaaggagtgcaatattattcagtttactaaacctgcagagacactgtctaagatctggtcacacgtacatagccatctccggcacccccataattgggtgtggctgacagctgcccagatcttcgggctgctctttgccagctgtcagccagaggagctcatacaaaagtggaataccaagaagacaaaaaagcatctgcccgagcccgttgccataaaatttttggcctcagacctcgatcagaagatgaaaagcatctccttggcatcctgtcatcagttgcattccaagtttctggaccaatctttgggggaacaggtggttaagaatcttctgttcgccgcaaaagttctgtatcttctcgagctgtattgcgaggacaaacaaagcaaaattaaggaggatttagaggagcaagaggctctggaggatggtgttgcctgcgcggatgagaaagctgaatccgacggggaggaaaaggaggaagtcaaagaggaactagggagaccagcgactttgctgtggcttatccaaaaactaagccgtattgccaagttggaggctgcatatagcccacgaaacccacttaaaaggacctgcatcttcaagtttctgggggcagtagcaatggatctaggtattgataaggtcaaaccctacctgcctatgatcattgcgcccctgttcagagaactgaacagcacctactccgagcaagaccctttgctcaaaaatttatctcaggagattattgaactgctcaagaaactggtgggcctggagtctttttcattagctttcgcttctgtgcagaaacaggctaatgaaaaaagggctctcagaaaaaaacgcaaggctctggagttcgtgacaaaccccgacattgcagctaaaaaaaagatgaaaaaacataaaaataaatctgaggctaaaaaaagaaagatagagtttctcagacctggctacaaagctaaaagacaaaagtcccatagtcttaaagacctggccatggtggagtag

SEQ ID NO: 180421 - DNA, 8358 bp, Artificial Sequence
  derived and/or modified sequence
atgaagacaaagcccgtgagtcacaagacggagaatacttatagatttctgacattcgcagaacgcctgggcaatgtgaatattgatattatccatagaatagaccgtaccgcatcttatgaggaagaggttgaaacctatttcttcgagggcctgctgaaatggcgcgagttaaatctgactgagcatttcggcaaattctacaaggaagtgatcgataaatgccagagttttaaccagcttgtctaccaccagaacgaaatcgtgcagagcctcaagacccacctgcaggtgaaaaattccttcgcctaccaacctctcctggacctggtggtgcagctcgctcgcgacctccaaatggatttctatccacacttcccggagttttttttgaccattacctctatactcgagacccaggatacagagcttctggaatgggcgttcaccagtctttcttacctctacaagtacctgtggcggctcatggtaaaggacatgagttccatctatagcatgtacagcaccttgttagcccacaaaaagctacatatacgcaacttcgccgctgagtcctttacattcttaatgcgaaaggtgtccgacaagaatgcactcttcaatctcatgttcttggacctcgataaacaccctgaaaaagtggagggagtcggccagctcctcttcgagatgtgtaaaggggtgaggaacatgttccacagctgcaccgggcaggccgtaaaacttatactacggaaactgggtccggttacagaaaccgagacacagctgccatggatgctaattggagagacactgaagaatatggtgaaaagcacagtgtcctatatttccaaggagcatttcgggacattcttcgagtgcctacaagagtcattgttggatctgcacaccaaagtgaccaaaactaactgctgcgaaagctccgaacagatcaagagactgttagagacctatctgatcctggtgaagcacggttctggcaccaagattcccacccccgcagacgtgtgtaaagtactgtctcagacgctccaggttgcgagcttgtccacttcatgctgggaaactttattggacgtaattagtgccctaatcctaggcgaaaatgtgtccctgccagagacactgataaaggagacgatagagaaaatcttcgagtctagatttgaaaagcgcctcatcttttcgttctcagaggtgatgtttgccatgaaacagttcgaacagttgttcctgcccagctttctgtcctacattgtcaactgtttcctgattgatgacgctgtggtgaaagacgaggccttggcaatcctcgccaagcttattctcaacaaagccgcaccgccaactgcaggctcaatggcaatcgaaaagtacccactggtgttttcaccccagatggtgggcttctatataaaacaaaagaaaacccgcagcaagggaagaaatgagcaatttccagtgctcgaccatcttctgagcatcatcaaattacccccaaacaaggataccacctacttgtcgcagtcatgggctgcgctggttgttcttccgcatattaggccattggaaaaggaaaaagtgattccgctagttaccggcttcatagaggcgttgttcatgacagttgataaaggctccttcgggaaaggaaatctgttcgttctttgccaggccgtgaatacattgttgtctttggaggaaagctctgaactcctacatttggtgccagtcgagcgtgttaagaatttagtattgacattccctctggagccaagcgtgctgctcctgactgatttgtactatcagcgtctcgctctgtgcggatgtaaggggcctttgtcccaggaagcactgatggaacttttccctaaactgcaagcgaacatttcaacgggagtaagcaagatccggctgctgactatccggatcttgaaccacttcgacgtgcagctgccagagtctatggaggacgacgggctgtctgagaggcagtccgtatttgccattcttaggcaagccgagcttgtgcccgcaaccgtgaatgactatagagagaaactgctccaccttcggaagttgaggcatgacgtggtgcagaccgcagtgcccgacgggcctcttcaggaagtgccgctaagatacctacttggaatgctgtacatcaacttctctgccctgtgggatcccgtgatcgaactaataagctctcacgcccatgaaatggagaataaacagttctggaaggtctactacgaacacctggagaaggcggctacacacgcagagaaagaactgcagaacgacatgacagacgagaagtccgttggggacgagtcctgggaacaaacacaagaaggtgatgtgggcgctctttatcacgagcagcttgcacttaagaccgattgtcaagagcgccttgatcacaccaacttccgttttctactgtggcgtgctctgacaaagttcccggagagagtggaaccacgaagtcgcgagctgtccccactgttcctgcggttcattaacaacgagtattatcctgctgaccttcaagtggcccctactcaagatctcagaagaaaggggaagggtatggtagccgaagagatagaagaagagcccgctgccggtgatgacgaggaactggaggaggaggctgtgccacaggacgaaagctcccagaaaaagaagacgcggagagccgcagccaaacagctgatcgcacacctgcaggtcttcagtaaattctccaatccaagggctctgtacctggagtcaaagctgtatgaactttacttgcagctgctcctgcaccaggaccagatggttcagaaaatcactctggattgcataatgacatataagcacccccacgtcctaccttaccgggagaacctgcagagattgctggaggacaggtcctttaaagaggagatcgtccactttagcataagcgaagataacgctgtcgtaaagacagctcaccgggcagatctcttccctatcctgatgagaatcctctatggccgaatgaaaaacaaaactgggtcaaagacccagggaaaatcagccagtggcactcgcatggcaatagtattgagatttttggccggaactcagccagaagagatccaaatttttcttgatcttcttttcgaaccagttcgacactttaagaatggagaatgccactctgcagtcattcaggctgtggaggacttagacctgtccaaggtgctgcccttaggaagacagcacgggatcctcaatagtcttgaaatcgttcttaagaatatcagccacttgatctcagcgtacctccccaagatcctacagattttattatgcatgactgctacagtaagtcacattctggaccaaagggaaaaaatccaactacgcttcattaaccccttgaaaaacttacgcaggctgggaataaagatggtgacagacatattccttgattgggaatcgtatcaatttaggaccgaggagatcgatgcagtcttccacggggctgtctggcctcaaatctcaagacttggaagcgagtcccaatactcgcctaccccgttgctgaagttgatctccatatggtcccgtaacgctaggtacttccccttgctggctaagcaaaaacctggacaccccgaatgtgacattctgaccaatgtgtttgctatcctgtccgcgaaaaacttgagtgacgctacagccagcatcgtgatggacatcgttgacgatttactgaatctccccgacttcgagcccacagaaactgtccttaacctcctggtaactggatgtgtctaccccggaatcgcggagaatataggcgaaagcattacaatcggaggtcgcctgattcttccacacgtgcccgcaattcttcagtatctgtccaaaaccacaatctctgccgaaaaggtcaaaaagaagaagaatagggcccaagtctccaaggaattaggcatcttatctaaaatctccaagtttatgaaggataaggaacagagcagtgttcttatcacgctgctgttacccttcctgcaccgcggtaacattgccgaggacaccgaagtggatatcctggtgaccgtccagaatttgttaaaacactgtgtagacccaacgtcattcctgaagccaattgcaaaactgtttagtgtgatcaaaaataaactttcaaggaagctcctctgtacagtgtttgagacattaagtgactttgaatccgggctgaagtatataacagacgtggttaagttgaacgcctttgatcagcggcacctggatgacattaattttgatgtgcgttttgaaacattccaaactatcacatcttatatcaaagagatgcagatagtggacgttaactacctgatccctgttatgcacaattgcttctataacctggagcttggagatatgagcctctcggacaatgcctccatgtgcctaatgagcataatcaaaaaactggcagctcttaacgtaaccgagaaagactatagagaaatcatccacaggagcttactggaaaaactccggaagggacttaagagccaaacagagagtattcagcaggactacactacaatcctgagctgtctaatacagacttttcctaatcagctggaattcaaggacctggtgcaattgactcactatcatgatcccgagatggatttttttgaaaacatgaagcacatccaaatacatagaagagctcgtgctctcaaaaagctcgcaaagcagcttatggagggaaaggtggtgctgagctcaaagtcactccagaactacatcatgccttatgcaatgactcccatttttgatgaaaagatgttaaaacacgagaatataactactgccgcaacggaaattataggagcgatctgcaagcatttatcttggagtgcctatatgtattatctgaagcattttatacatgttttgcaaactgggcaaatcaatcagaaactgggggtttcgctgcttgtgattgtacttgaggcctttcacttcgatcacaagactctcgaagaacaaatgggtaaaattgaaaatgaagaaaacgctatagaagcgattgagctcccagagccggaggcgatggaactagaaagggtggacgaagaggagaaggagtacacctgtaagtcattatctgataacggccagcctggcacacccgatccggcagactccggcggaaccagtgctaaggagagtgaatgtatcaccaagccggtgtcattcctgccccagaacaaggaagagattgagcgcaccatcaaaaatatccagggcacaattaccggggatatactgccacgtctgcataaatgtctggccagcactacgaaaagagaggaggaacataaattagtgaaaagcaaagttgtgaacgatgaagaagtcgtgcgcgtccccctcgcgttcgccatggtcaagctgatgcagtctctcccacaggaggttatggaggcgaatctaccatcaatcctcttgaaggtatgcgcgttacttaaaaaccgggctcaggagatccgcgacattgccaggagcacactggctaagatcattgaggatctaggggtccacttcttgttatatgtgctgaaggagttgcagacaactcttgttcgcggataccaagtccatgtgctgaccttcactgttcatatgttgttgcagggactcaccaacaagttgcaggtgggggacttggactcctgccttgacatcatgattgagatctttaaccacgaactctttggagctgtggccgaagagaaggaggtgaagcagatcctgtctaaggtgatggaagctaggcgcagtaaaagctacgacagctacgagatcctgggcaagtttgttggcaaggaccaagttaccaaacttatccttccgcttaaagaaatcttacaaaataccacgtcacttaagcttgctcggaaggtccatgaaacgctgcgaaggatcactgtggggctgatagtgaaccaggagatgactgctgagtcaattttactgttgagctacgggctcatatctgaaaatctaccactgctgacagagaaggagaagaacccggtggctcctgcccctgaccctcgactacctcctcagtcttgcctcctcctcccccctacacctgtcagaggcggacagaaagccgttgtgtcacgcaaaaccaatatgcacatatttatcgaatctggtctgaggctcttgcacctgtccctgaaaactagtaagatcaagagctccggcgagtgtgttctggagatgctggatccatttgtgtcattgctaatcgactgcttgggatctatggacgtgaaagtcataactggcgcactgcagtgtctaatctgggtattgcggttcccactcccaagcatcgaaacgaaagccgaacaactgaccaagcatcttttcttgctgttgaaagactacgccaagctcggtgctgcaagagggcagaactttcacctcgttgtgaattgcttcaagtgcgtaacgatcctggtgaaaaaggtcaagtcctaccagattaccgagaagcagctgcaggtgcttcttgcttacgcagaggaggacatctatgacacttctaggcaggccacagcattcggcttattaaaagcgatactgtcccggaagctgctcgtgcctgagatcgacgaggttatgagaaaagtttccaagctggccgtatcggcccagtctgaaccagctcgggttcagtgccgccaggtcttcctcaagtatatcctggactatcctctgggggacaagttgagacctaaccttgaattcatgctcgcgcaacttaattacgaacacgagactggcagagagtccaccctcgagatgatagcctacctgttcgacaccttcccacagggcctgctgcacgagaattgtggcatgttctttatacccttatgcctcatgacaatcaacgacgactcggccacttgtaagaagatggcctccatgactataaaatcactattaggtaaaatatctctggaaaaaaaagactggctgttcgacatggtgacaacatggtttggcgctaagaaaagacttaaccgtcagttggccgcattgatctgcgggctctttgtagagtcagaaggagtggacttcgaaaaaaggttaggcaccgtcttgccggttatcgagaaggaaattgacccggaaaacttcaaggacatcatggaggagactgaggaaaaggccgcagataggctgctctttagctttttgactctaatcaccaagctcattaaggaatgcaatatcatacaattcaccaagccagctgaaacgctgagcaagatctggagccacgtgcacagtcatttgcgccaccctcacaactgggtctggttgacggcagcacagattttcggcctgctcttcgcctcatgccagcctgaggagcttattcagaagtggaacaccaagaaaactaaaaagcacctgcccgagccggttgctataaaattcctggctagtgatctggaccagaaaatgaagagcatatctctggcctcctgtcaccagctgcattctaagttccttgaccagagcctcggggaacaggtggttaagaacttgctgtttgcggcaaaggtgttgtacctgcttgagctgtattgtgaagataagcagagtaaaattaaggaagacttggaggaacaagaagcattggaggatggggtggcttgtgccgacgagaaggcagagagcgacggtgaagagaaggaggaggtgaaggaagaattagggaggccagcgacgctgttatggcttatccaaaaactgtcccgaatcgccaaacttgaagctgcatactctcccaggaatcctttgaaacggacctgtatcttcaagtttttaggtgcggtggccatggacctgggaattgacaaagtcaagccctacttgcccatgattattgctcccttattccgggaactgaattctacatactccgaacaggatcctttgctaaagaatcttagccaagagattatcgaactgctgaaaaagcttgtagggctggaaagtttctccctggctttcgcctctgtgcagaaacaggcaaatgagaagcgagcactcagaaagaaacgcaaagctctggaatttgtcacaaaccctgatattgccgcaaaaaagaaaatgaagaaacacaaaaacaaatcagaggcgaaaaaaaggaagatagagtttcttcgtccaggatataaggcaaaaaggcagaagagccattcactgaaagacttggctatggtcgaatag

SEQ ID NO: 180422 - DNA, 9025 bp, Artificial Sequence
  derived and/or modified sequence
aggctcctccttgtctccaacatggcggcgcccaggggctcaagccgcacgtgagaaagtctgggcatctgggaatcggagagtatagcctgtgagccgctttcccctccttactgtcggttgcatcccttcgacactcccgaggccgtcgcgggccactggccctctgcagccatgaagacaaagcccgtttcccacaagaccgagaacacctaccggtttcttacatttgctgaacgactggggaatgttaatattgatattattcaccggattgatagaactgcaagctatgaggaggaggttgaaacctacttttttgagggtctgctgaaatggagagaattaaacctcacagaacacttcggaaaattttacaaagaagttattgacaaatgccaatcattcaatcagttggtgtatcaccaaaacgagatagttcagagtttgaagactcacctgcaagttaagaacagttttgcctatcaaccccttttggatttggttgtacagttggcacgagatctgcagatggatttctacccacactttccagagttttttttgactatcacctcgatcctggagactcaggacacagagttgttagaatgggctttcacctcgttatcatatctttataagtacctgtggagactgatggtgaaggacatgtccagtatatacagcatgtacagcacactcctggctcataaaaaactacatataagaaattttgctgctgaaagttttacttttttgatgagaaaggtctctgataaaaacgcacttttcaatttaatgtttcttgatcttgataaacatccagaaaaagttgaaggtgttggacagttgctctttgaaatgtgcaaaggagttagaaatatgtttcactcctgtacaggccaggcagtgaagctaattttgcgaaagctaggaccagtcactgaaacagaaactcaactaccatggatgttaattggagaaacactcaaaaacatggtcaaatccactgtatcctacatctccaaggaacattttggtacattttttgaatgtttgcaagaatcgctcttggatctacacacaaaagtaacaaaaactaactgttgtgaaagttctgaacagattaaaaggttgttggaaacataccttatacttgtaaaacatggaagtgggacaaagatacccacgcctgctgatgtctgtaaggtgttatctcaaacactgcaagtagccagtctctccacatcttgctgggagaccctcttggatgtaatttctgctttgatcctgggtgaaaatgtttccttgccggagaccctcatcaaagaaaccatagaaaaaatatttgagagcagatttgaaaaacgtttaattttcagtttttctgaagtcatgtttgccatgaagcagtttgagcagctttttctaccaagctttctgtcatatattgtgaattgcttcttaattgatgatgctgtagtcaaagatgaagctctggccattctggccaagctcattctgaacaaagcagcacctcccactgctggctcgatggcaattgaaaagtaccctctggttttctcaccgcagatggtgggattctatataaagcagaagaagactagatccaagggaagaaacgaacagtttccagtattggaccatcttttatctataattaagttacccccaaataaagatactacttacctttcacaatcttgggcagccctcgtggtgttacctcatattagacctcttgagaaagagaaggtgataccactcgtcaccggcttcatagaggcactcttcatgactgttgacaaaggaagctttgggaaaggaaacttatttgttctttgtcaagctgtaaatactctactaagtttggaagaatcttctgaacttcttcatttggttcctgtggaacgtgtgaagaatttagtattaacctttcccctggagccatctgtgttgctgttgactgatctctattatcagagattagccttgtgtggctgcaaagggccactttcccaggaggctttaatggaattatttcccaagttacaagcaaacatttcaactggtgtatccaagattcggcttttgacaataaggatcctaaaccattttgatgtccagcttccagaatcaatggaggatgatgggctctcagagcggcagtctgtctttgctatattacgccaggcagaacttgttccagcaactgtgaatgattatagagagaagcttcttcatttgagaaaactaagacatgatgtggtacagactgctgtccctgatgggccgttacaggaggtgccgcttcgttatttgttaggcatgctatatattaatttcagtgcactctgggatcctgttattgaactcataagttctcatgcacacgaaatggaaaataagcaattttggaaagtctactatgagcatctagaaaaagcagctacgcatgctgagaaggaactacagaatgatatgacagatgagaagtccgttggagatgaaagttgggagcagacccaggaaggagatgttggagctctttatcatgagcagttagcattgaaaactgactgtcaggaaagacttgaccacaccaacttcagattcctgctctggagagctctgaccaaattcccagaaagagtagagccacggtccagggagctttccccgcttttcttgagatttatcaacaatgagtattacccagcagatctgcaagttgctccaacccaggatctacggagaaaaggcaaagggatggtggcagaggaaatcgaagaggaacctgccgcaggagatgatgaagagttggaggaagaggcagtgccccaagatgaatcctcacagaagaaaaagacgaggagagctgcagcaaagcaattaattgctcatttgcaagttttctctaaattttcaaatccacgggccttatatctggaatccaaactatatgagttatatcttcagttgttgctacaccaagatcaaatggtgcaaaaaataaccttggattgcataatgacatataaacatcctcatgtcctcccttacagggaaaacttacaaaggttgcttgaagacagaagctttaaggaagagatagtgcattttagcatttcagaagataatgctgtagtgaaaacagcccaccgagcagatctatttcctattctgatgagaattttgtatgggcgaatgaagaataagactgggagtaaaactcaggggaaatctgcttcaggcacccgcatggccattgtcctgcggttcctggccgggacccaacctgaggagatccagatattcttagacctgctgtttgaacctgtgaggcatttcaagaatggagagtgccattctgcagtcattcaagcagtagaagacttggatttgtctaaagttcttcctttaggtcgtcagcacggtatcttaaacagccttgagatagtattgaaaaacattagtcatctgatcagcgcatacctgccgaagattttgcagatactgctctgtatgacagcaaccgtatcacacatccttgaccaacgagaaaagatacagctgagatttattaatccattgaaaaatttaagacgtcttggaatcaaaatggtaactgatatctttttggactgggaatcatatcagtttagaacagaagaaattgatgctgtgtttcatggtgcagtttggccccagatcagcaggcttggatctgagagtcaatattctcctactcctctgctgaaactgatcagtatctggagcagaaacgcaagatatttccctttgctggctaaacagaagcctgggcacccagaatgtgatatcctgaccaatgtttttgcaattctctcagcgaagaatctttctgatgccacagccagtattgtaatggacatagttgatgaccttcttaaccttccagatttcgagcctacagaaacagttttgaacttgctggtaactggatgtgtataccctggcatagcagaaaacatcggtgagtctatcacaataggaggaagattaattctacctcatgtacctgcaattcttcagtatctcagcaaaaccacaataagcgcagaaaaggtgaaaaagaaaaagaatagagcacaagtcagtaaagagcttggcattctttcaaagatcagcaagtttatgaaagacaaagaacaaagttctgtactcattacgcttctccttccattcctccaccgtggcaatattgctgaggatacagaggttgatattctggtgacagtacaaaacttgttaaagcattgtgtggaccctacaagcttcctcaagcctatagcaaaacttttctcagttattaagaacaaattgtcaagaaaattgctttgtacggtttttgagactctttctgattttgagagtgggttaaaatatattactgatgttgtcaagcttaacgccttcgatcaaagacatcttgatgatatcaacttcgacgttcgctttgagactttccagaccatcacctcttacattaaagaaatgcaaattgtggatgttaactacctaattccagttatgcataattgtttctataatctagagttaggagatatgagtttaagtgataatgccagcatgtgcctgatgagtatcatcaaaaagctagctgccttgaatgtcacagagaaagactatagagaaatcatccaccgttcactcctggagaaattgagaaaaggtctgaagagccagacagagagtattcagcaggattataccacaatactttcctgtttaattcaaacctttccaaaccaactggaattcaaagacttggtacaacttactcattaccatgacccagaaatggacttctttgagaacatgaagcacattcagatccacagaagagcaagagccttgaagaaacttgcaaaacaactaatggaaggcaaagttgttctgtcttctaaatctcttcagaattacatcatgccttatgccatgactccaatttttgatgagaaaatgctcaagcatgaaaatataaccactgctgccacagagattattggagccatttgcaaacatctctcttggtcagcgtatatgtattacttgaaacatttcattcatgtcttacaaacgggacagatcaatcaaaaactgggtgtcagtttgctagtaatagtgttagaagcattccactttgaccacaaaactcttgaagaacaaatgggaaaaattgagaatgaagaaaacgcaattgaagcaattgagttaccagagcctgaggccatggaattagagcgtgtggatgaggaagagaaggaatatacatgcaagagtttgtcagacaacggacaaccgggaacccctgatccagctgactctggaggaacatcagctaaagaatccgagtgtatcacaaagcctgtctctttccttcctcaaaacaaggaagaaatagagagaacaattaaaaatatccaaggaaccataaccggggatattctccccaggctacataaatgccttgcatctacgactaaaagggaagaagaacacaagcttgtcaagtcaaaggttgtgaatgatgaggaagtcgttcgagttccattagcttttgccatggttaaactaatgcagtcccttccacaagaagttatggaagctaatctgccaagtattttgctgaaagtgtgtgccctactcaagaacagagcccaagaaatcagagacattgcacgcagcactcttgcgaaaataatagaggatcttggtgtgcacttcctcctatatgttttaaaagaattacagactactcttgtccgtggataccaggtccatgtgctgactttcaccgttcacatgctgctgcaaggcctcaccaataagctgcaggtcggagatttggactcttgtttagatataatgattgagatttttaaccatgagttgtttggtgctgttgctgaagagaaggaagtaaagcagatcctctccaaagtcatggaagcacgaagaagcaaaagttacgactcttatgaaatcctcggcaagtttgtaggaaaagatcaggttacaaaactcatccttccattaaaagagatcttacaaaataccacgagtttgaaactggcccggaaagttcatgaaactttacgccgaatcacagtgggattaattgtaaatcaggaaatgacagctgaatccattctattactcagttatggtttgatcagtgaaaatcttcccctgttaacagagaaagaaaaaaatccagtagccccagcaccagatccacgtctaccaccccagagctgccttctgcttcccccaactccagttcgaggtggacagaaagctgttgtgagcaggaaaaccaacatgcacatatttattgagtccgggcttcggctgctgcatctgagtctgaagacttccaagatcaagtcttcaggtgaatgtgtcctggaaatgctggatccttttgtgtctctcctcatagactgcctgggctccatggatgtgaaggtgatcacaggtgctttacagtgcctcatctgggtcttgaggttcccgctaccttccatagaaacaaaagcagagcagctgacaaaacacctcttccttctgctgaaggactatgcaaagctcggggccgccaggggccagaacttccaccttgtggtcaattgtttcaagtgtgtgaccatacttgtcaagaaagtcaagtcttaccagataactgaaaaacagctccaagttctactggcctatgctgaggaggacatttatgatacttcaagacaagccactgcctttggtcttctgaaggcaattttatcaagaaagctgttggtcccagaaatcgatgaggtcatgcggaaagtatccaagttggcagtctctgcacaaagcgaacctgccagggtccagtgtagacaggtttttctgaaatatattcttgactatcccctgggtgacaaattgagaccaaacttggaattcatgctcgctcaactgaattacgaacatgagaccgggagagagtccaccttggaaatgatcgcctatctctttgacacgttccctcaggggctgctccatgagaactgcggaatgttctttatccctctttgtctaatgacgatcaatgatgactctgccacgtgcaaaaagatggcatccatgacaatcaagtccctacttggtaaaatcagcctcgagaaaaaagattggctgtttgatatggttaccacttggtttggagcaaaaaagcgcttaaatagacaacttgctgccctgatctgtggcttgtttgtggaaagtgaaggagttgattttgagaaaagacttggaactgtccttcctgtgattgaaaaggaaattgatcctgaaaactttaaagatatcatggaagaaactgaagaaaaagctgcagatcgccttctgtttagttttcttacactgataactaaacttatcaaggaatgtaatattattcagtttaccaaacccgctgagactttgagtaaaatctggagtcatgtgcattctcacctgagacatccacacaactgggtgtggctcacagcagcccagatttttggattactctttgcctcttgccagccagaggagcttattcaaaaatggaataccaaaaagaccaaaaaacacctcccagaacctgtagcaatcaagttcctagccagtgaccttgaccaaaagatgaaaagtatctctctcgcctcttgccatcaattgcattccaaattcttggatcagtctctaggagaacaggttgttaagaatttgttgttcgcagccaaagtcttgtatttactggaactttattgtgaggataagcaaagtaagataaaagaagacctggaagaacaagaagctttagaagatggtgtggcctgtgcagatgagaaggcggagtctgacggagaagagaaggaagaggtgaaggaagagctcggcaggccggccacgctgctgtggttgatccagaagctgtcccggattgcaaaactggaagctgcttattcgccgagaaaccccttaaagagaacatgcatctttaagttcctcggcgccgtagcaatggatcttgggatagacaaggtaaagccgtatctcccaatgatcatagctcctttgtttcgggaactcaacagcacctattcagagcaagatcctttgctgaagaatctatcccaggaaatcatagaattactcaaaaagctggttgggcttgagagcttctcattagcctttgcctctgtacagaaacaggctaatgagaaaagggcactccggaaaaagaggaaggccctggagtttgtaactaatcctgatattgctgccaagaaaaaaatgaagaaacacaaaaataaaagtgaagcaaagaagagaaagatagagttcctgcgtccaggatataaggccaagagacaaaaaagccatagcctgaaagatttagcaatggtggagtaatgtctccctgtgctgatacaagcatgaactttctggaatattctgctagtctgaaattacagtaggttgtctggggtaggggggaggcgtttttttttttttttgagacaaggtctcactctgtcacccaaggtggagtgcagtgacgacatcacagctcactgcagcctcaacctgggttcaagtgatcctctcacctcagcctcccaagtagttgtgcctcctaggcacacaacactatgcccggcaaattttttgtattttgtattttttgtagaaacaggatttcgccatgttggccaggctggtctcgaacacctgggctcaactgatccgcctgcctcggcctcccaaagtgctgggattacaggtgtgagccaccctgctcaaccaggttttattatttaagttagttaaactttggatagattgtataatatatagtttaatgtaatcatgctcatattttttaaataaataaaacactatacta

SEQ ID NO: 180423 - protein, 45 aa, Artificial Sequence
  derived and/or modified sequence
MSLKSERRGIHVDQSDLLCKKGCGYYGNPAWQGFCSKCWREEYHK

SEQ ID NO: 180424 - DNA, 1728 bp, Artificial Sequence
  derived and/or modified sequence
gtgtcccgaaagaagatgagtctgaaatctgagagaaggggcatacacgttgatcagagtgatctgctatgcaagaagggttgtgggtactacgggaaccctgcatggcagggattctgctccaagtgttggcgcgaggagtaccacaaagctagacagaaacagatccaggaagactgggagctggccgaacgagtgttactctgttacccgggttggtcagccatggtacagttccagctcaccgccacttctgcatcatgggcgcaggtcatactgctcctgcagccacccaacgtgttgggtctgcaggctctacagagagaggaagaggaggctttcgcctctagtcaaagtagccaaggagcccagagcttgacgttttcaaagttcgaggagaagaagacaaatgagaaaacccggaaagtcacaaccgtgaagaagttcttcagtgccagtagccgggtggggtctaagaaagagattcaggaggctaaagccccaagtcccagtataaatcgtcagactagcattgaaacagacagggtatctaaagagtttatagagtttctgaaaacatttcataaaactggacaagagatatataaacagaccaaactgtttttggagggaatgcactacaaacgcgatctgagtatcgaggagcagtccgagtgtgcccaggatttttaccataatgtggctgagcgaatgcagacacgtggtaaagagcgaaggttccaccacgtggggcaggctggtttggaactcttaacttccggcgatccacccgcctccgcctctcaatccgccgggaacactggagtcgaaccgcctcaccctgctgtccctccagagagagtggagaagataatggaccagattgagaaatatataatgactaggctgtataagtatgtgttttgtccagagaccacagatgatgaaaaaaaagacctggcaattcaaaagagaatccgggctctgcggtgggttactccccagatgctttgcgtgccagtcaacgaggatattcctgaggtgagtgacatggtagttaaggccatcaccgacatcattgaaatggattccaagagagtcccccgcgataagctcgcttgcatcacaaagtgctctaagcatatcttcaacgccatcaaaattaccaagaacgagccagcgtcagctgatgactttcttcctactctgatctatatcgttctgaaaggcaaccccccaaggcttcagagtaacattcagtacatcactagattctgcaatccaagcaggctgatgactggagaagacggttactactttaccaatctgtgctgtgccgttgcctttatcgaaaaactggacgcccagagcttaaatctctcacaggaggactttgatcgctacatgtccggacagacaagtccacgcaagcaggaggcagagtcttggtcaccagatgcatgtcttggagtgaagcaaatgtacaagaatctagatttgctgtcccaactaaacgagaggcaagagaggatcatgaacgaagctaagaaactggaaaaggacttaatcgattggaccgacggaatcgcacgggaggtgcaagacattgtggaaaaataccctttggaaatcaaaccaccaaatcagccactggcggccattgactctgagaatgttgaaaatgacaagttgccgcctcctctacagccgcaggtatatgcaggatag

SEQ ID NO: 180425 - DNA, 1596 bp, Artificial Sequence
  derived and/or modified sequence
atgagcttgaagtctgagagacggggcattcacgtggaccagtcggacctgctctgcaaaaaaggctgtgggtattacggcaatcctgcgtggcaagggttctgcagcaaatgttggcgagaggaataccacaaggctcggcaaaaacaaatccaggaagattgggagctggccgaaagagtactcctgtgctacccaggatggtcagcaatggtccaatttcagctgaccgcgactagcgctagctgggctcaggttatcttactccttcagccacccaacgtacttggcctccaagctctccagcgggaggaggaagaagcctttgctagttcgcagtcgtcccagggagcccagtctctgacattctcaaagttcgaggagaaaaagactaatgaaaagaccaggaaggtcacaaccgtcaagaaattctttagcgcgtcttctagagtgggtagcaaaaaagaaattcaggaagcgaaggctccaagcccaagcattaacaggcagacctcaattgagactgatcgggtgtccaaggagttcattgagttcttgaaaaccttccacaaaacagggcaggagatttacaagcaaacgaagttgttcctcgaaggaatgcattataagcgcgacctgtctatcgaggaacagtcagagtgcgcccaggatttctaccacaatgtggctgagaggatgcagactaggggcaaagtgccccccgagcgggtagaaaaaataatggaccagattgagaagtacatcatgacacgactgtacaagtatgtcttctgccccgaaaccactgatgatgagaagaaggatttagccattcagaagagaatcagggcactaagatgggtgactcctcagatgctctgtgtgcctgtgaatgaagacattcctgaggtatcagatatggtggtgaaagcaatcaccgacataattgagatggatagcaagagagtgccccgtgacaaattagcttgcatcaccaaatgtagcaagcatatcttcaatgccattaaaattacaaagaatgaacctgcatctgccgacgatttcctacctacgcttatctacatcgttctgaaagggaacccccctagactgcaaagcaacatacaatatattacaaggttttgtaacccatcacggctgatgacaggagaggatgggtattacttcactaatctgtgctgtgccgtggctttcatcgaaaagctagatgctcaatccctaaacctcagccaggaagacttcgacagatacatgagcggccagacctccccccgtaaacaagaggccgagtcatggtcccctgacgcatgtcttggcgtaaagcaaatgtataagaatcttgatctattgagccaattaaacgaacgtcaggaaaggatcatgaacgaagccaagaagctcgagaaagatttaatagattggaccgatggtatcgctagagaagtgcaagacatcgtggagaaatacccactggagatcaagcctcccaaccaacccttggcagctatcgacagcgagaatgtggaaaatgacaagctacctcctcccctgcaacctcaggtctatgcgggatag

SEQ ID NO: 180426 - DNA, 1476 bp, Artificial Sequence
  derived and/or modified sequence
atgtctctgaaaagtgagcgacgcggcatccacgttgatcagtctgacctgctgtgcaagaagggctgtggatattacgggaatccagcatggcagggattttgttccaagtgctggcgagaagagtaccacaaagccagacagaagcagatccaagaagattgggagttagcagagcgactgcagcgtgaagaggaggaggccttcgcctcaagccagagcagtcagggtgcacagtcactaaccttttccaaatttgaggaaaaaaagaccaatgaaaaaacacggaaggtcaccaccgtcaagaagttcttctctgcctcttccagggtaggatctaaaaaggaaattcaggaagcaaaagccccttcaccatcaatcaaccggcagaccagcatcgaaaccgacagagtgagtaaagagttcatagaatttctcaagacatttcacaagactggacaggagatctacaaacagacgaaattgtttctcgaaggtatgcattataagcgggacttgtcaatcgaggagcaatccgaatgcgcccaggacttttatcacaatgtggctgagcgtatgcagacccggggcaaggtcccccccgaaagagtcgagaagataatggatcagattgagaaatatatcatgacacgtttgtataaatacgtgttctgtcccgagacgaccgacgatgaaaagaaggatctggctatccagaagaggattcgcgcgctcaggtgggtgacgccacagatgctgtgtgtgcccgtgaacgaggatataccagaggtgtctgatatggtggtaaaagctataaccgatatcattgaaatggactccaagagggtgccacgtgacaaacttgcgtgcatcacaaaatgcagcaaacacatctttaatgccatcaagatcacaaaaaacgagccagcttccgctgacgattttctgcctacgctgatctatatcgtgctcaaaggaaatccccctcgccttcagagcaatatacagtatatcacacgcttctgtaatccctctagacttatgacaggagaggatgggtattattttactaatttgtgttgcgcggtcgctttcatcgagaaactggacgcccagtccctgaacctctcccaagaggactttgacaggtatatgagtggccagacttccccgaggaaacaggaggcagagagctggagtcccgatgcatgccttggggtcaaacagatgtacaaaaatctggacctgctgtcacagctgaatgagagacaagagaggattatgaacgaagctaaaaaactggagaaagatctcatagactggactgatggtatcgcccgcgaggtgcaggacatcgtggagaaataccctctggagatcaagcccccaaatcaaccacttgctgctattgacagcgaaaatgttgagaatgataagcttcccccccctctccagcctcaggtctacgctggatag

SEQ ID NO: 180427 - DNA, 1476 bp, Artificial Sequence
  derived and/or modified sequence
atgagtctaaaatcagagcgccgcggcattcacgttgaccagtctgatctgctctgtaagaaggggtgtggctattacgggaacccggcttggcagggcttctgttcaaagtgttggcgagaagagtaccataaggcaaggcagaagcagattcaggaagactgggaacttgcagagaggctacagcgcgaggaagaggaagccttcgcatccagtcagtcaagccagggggcacagtctcttacattctccaaatttgaagagaagaagacgaacgagaaaactcggaaagtcacgactgttaaaaaattcttcagcgcctctagtcgagtgggcagcaagaaagaaatccaagaagcaaaagccccttcacctagcattaacagacagacctctatcgaaaccgacagggtaagtaaggagtttattgaatttctgaaaactttccataagaccggccaagaaatctataaacaaaccaaactctttctggaaggcatgcactacaagagagacttgtccatagaggagcagtccgagtgcgcccaggacttttatcataacgttgccgagcggatgcaaacacggggaaaggtcccaccagagagagtcgagaaaataatggatcagatcgagaagtatattatgactcgactctacaagtatgttttctgtccagagacaacggatgatgagaaaaaggacctcgccatacagaagcgaatcagagctctgcgatgggtgaccccccagatgctgtgtgtgcccgttaacgaagacatacccgaggtctctgacatggtggttaaggctataaccgatatcatcgagatggactcaaaaagggtgcctagggacaaattggcttgtataactaaatgctccaagcacattttcaatgcaattaaaatcaccaaaaacgaacctgccagtgccgacgacttcctgcccactctgatatatattgtcctcaaaggaaatcctccgcgtcttcagagtaacattcagtacattactaggttttgcaacccatcccgattaatgacaggggaagatggctactacttcacaaacctttgttgcgccgtggccttcattgagaagctggacgcccagtctctaaatctgagccaagaggatttcgatagatatatgtccgggcagacatcccccagaaagcaggaggccgagtcctggagccctgatgcttgtttaggtgtgaagcaaatgtataagaatcttgaccttttaagtcagttaaatgagcgccaagaaagaatcatgaatgaggctaagaagctggaaaaagacctgattgactggacagatggtattgccagggaggtgcaggacatcgtggaaaaatacccacttgagattaagccacccaatcagccactagcagccatcgattctgagaacgtggagaacgacaaactgcctcccccgttgcaacctcaggtatatgcaggatag

SEQ ID NO: 180428 - DNA, 1476 bp, Artificial Sequence
  derived and/or modified sequence
atgtctctgaaaagcgagaggagaggtatacacgtcgatcagtccgacttgctgtgtaagaaagggtgcggctattacggcaatcccgcttggcaggggttttgctcgaagtgctggcgcgaggaatatcacaaggcaaggcagaagcagatccaagaagactgggagttggcggagagactccaaagagaagaggaagaagcttttgcctctagccagtcatcccagggggcccagtccctgacctttagcaaattcgaggagaagaagactaatgagaaaacaagaaaggtgacaaccgtcaaaaaatttttttcggcatcatcacgcgttggctccaagaaggaaatccaggaggccaaagccccgtcaccgagtatcaatcgccagaccagtattgagactgacagagttagcaaggaatttatcgaattcctgaagacattccacaagaccgggcaagagatttacaaacagacaaagttgttcctggaaggcatgcattacaagcgcgatctgagcatcgaggaacagagcgagtgtgcacaagatttttatcacaacgttgcagaaagaatgcagacacgcgggaaagtaccacctgagagagttgagaagatcatggatcagatcgaaaagtacatcatgactcggctatataaatacgtgttctgtccagagacgaccgatgacgaaaaaaaagaccttgccattcagaagaggattcgcgccctgaggtgggtcacgccccaaatgctctgcgtgcctgtgaacgaagacatccccgaggtttcggacatggtggtgaaagccatcaccgatattattgagatggacagcaagagggtgcctagagataaactggcttgcatcactaagtgttccaaacacatctttaacgcaatcaagataaccaagaatgagcctgcgtcggcagatgactttctgccaacactgatctatatcgtactgaaggggaaccctccccggctgcaaagtaacattcaatacattacccggttttgtaatccatcccgactcatgaccggcgaagacggttactattttacaaatctgtgctgcgccgtggcgtttatcgagaagctggacgcgcagagcctaaacctctcacaggaggattttgacagatatatgtccggacagacctcccctagaaagcaggaggctgaaagctggagcccagacgcctgtctgggcgtgaagcagatgtacaagaatctggacttactgagccagctgaacgagcggcaggagaggatcatgaatgaagcaaagaaactagagaaagacctgattgattggaccgatgggattgccagggaagtgcaggacattgtggaaaagtatcctcttgaaataaaacccccaaatcagcctctcgcggccatagactctgagaatgtggagaacgacaaactaccccccccccttcagccccaggtctacgcaggctag

SEQ ID NO: 180429 - DNA, 138 bp, Artificial Sequence
  derived and/or modified sequence
atgtctctgaagagcgagaggcggggcattcacgtcgaccaatcggatttattgtgtaagaaaggctgtggctactatgggaatcctgcttggcaggggttctgtagcaagtgttggagggaagagtaccacaaatag

SEQ ID NO: 180430 - DNA, 1476 bp, Artificial Sequence
  derived and/or modified sequence
atgtctctaaagtcagagagacgcggaatacacgttgaccagagcgacctgttgtgtaaaaaaggctgtgggtactacggtaatcctgcgtggcagggattttgctcaaagtgctggcgggaggagtaccataaggcccgacaaaaacagattcaggaggattgggaattggccgagaggctgcagagggaggaggaggaagccttcgctagctcacagtccagtcagggggcccaatccctgactttttctaagtttgaagaaaaaaaaaccaacgagaaaactcgtaaagtgactacagtgaagaagttcttcagtgcgagctcccgcgtgggtagtaaaaaggaaatacaggaagccaaagccccctcaccaagcatcaaccggcagaccagcatagagaccgacagggtgtccaaggaattcattgagttcttgaaaacatttcacaaaaccggtcaggaaatttataagcagactaaactgtttcttgaggggatgcattacaaaagggatcttagtatagaggagcaaagcgagtgtgctcaagacttttaccataacgtggccgagagaatgcaaacccgtggaaaagtcccccctgaacgcgtcgaaaagatcatggaccaaatcgagaaatatatcatgactcgcctctacaagtacgttttttgccctgagacaacagatgacgagaaaaaagaccttgcaattcaaaagcgtatccgagctctgcggtgggtaacaccccaaatgttgtgcgtgcccgtgaacgaagatatcccagaggtgtccgatatggtcgtcaaagcaatcactgatattatagagatggatagcaaacgggtgccgcgggacaagctcgcatgcatcacaaagtgttcaaagcatatcttcaatgcaatcaagattacaaagaacgaacctgcgagcgcagacgacttcctgcccacccttatttacatcgtgctgaaaggcaacccaccccgcctgcaaagcaacatccagtatattacaagattttgcaacccttcaaggctgatgacaggtgaggacggctattattttacgaatctgtgctgtgcagttgcatttatcgaaaagcttgacgcgcagtcactcaacctgtcccaggaagacttcgacaggtacatgtccggtcagacatcacctcgcaagcaggaggctgagagctggagcccagacgcatgtttaggcgttaaacaaatgtataagaatctggatctcctgagccagcttaacgaacgacaggagaggattatgaacgaagccaagaaactggagaaagatctcattgattggacggacgggatcgcgcgcgaggtgcaagatattgtggaaaagtatcctctagaaattaaaccaccaaatcaaccccttgccgcaatcgactcagagaatgtcgaaaacgacaagttgcctcccccactgcaaccccaggtgtatgccggctag

SEQ ID NO: 180431 - DNA, 1728 bp, Artificial Sequence
  derived and/or modified sequence
gtgtccaggaagaagatgagcctgaagtctgagcggcggggcatccacgtggaccagagcgacctgctgtgcaagaagggctgcggctactacggcaacccagcctggcagggcttctgcagcaagtgctggagggaggagtaccacaaggcccggcagaagcagatccaggaggactgggagctggccgagcgggtgctgctgtgctacccaggctggagcgccatggtgcagttccagctgacagccaccagcgcctcctgggcccaggtgatcctgctgctgcagcccccaaatgtgctgggcctgcaggccctgcagcgggaggaggaggaggcctttgccagcagccagagcagccagggcgcccagagcctgaccttcagcaagtttgaggagaagaagaccaatgagaagaccaggaaggtgaccaccgtgaagaagttcttcagcgccagcagccgggtgggcagcaagaaggagatccaggaggccaaggcccccagccccagcatcaaccggcagaccagcattgaaacagacagagtgtccaaggagttcatcgagttcctgaagaccttccacaagacaggccaggagatctacaagcagaccaagctgttcctggagggcatgcactacaagagggacctgagcattgaggagcagagtgaatgtgcccaggacttctaccacaacgtggccgagaggatgcagacccggggcaaggagcggcgcttccaccacgtgggccaggccggcctggagctgctgaccagcggggaccccccagccagcgccagccagagcgctggcaacacaggagtggagcccccccaccctgctgtgcccccagagcgggtggagaagatcatggaccagatcgagaagtacatcatgacccggctgtacaagtatgtgttctgcccagagaccacagatgatgagaagaaggacctggccatccagaagaggatccgggccctgcgctgggtgaccccccagatgctgtgtgtgcctgtgaatgaagacatccctgaggtgtctgacatggtggtgaaggccatcacagacatcatcgagatggacagcaagagggtgccccgggacaagctggcctgcatcaccaagtgcagcaagcacatcttcaatgccatcaagatcaccaagaatgaaccagccagcgcagatgacttcctgcccaccctcatctacatcgtgctgaagggcaaccccccccggctgcagagcaacatccagtacatcacccgcttctgcaaccccagccggctgatgactggagaagatggctactacttcaccaacctgtgctgtgctgtggccttcatcgagaagctggatgcccagagcctgaacctgagccaggaggactttgaccgctacatgagcggccagaccagccccaggaagcaggaggccgagagctggagcccagatgcctgcctgggcgtgaagcagatgtacaagaacctggacctgctgagccagctgaatgaaaggcaggagcgcatcatgaatgaggccaagaagctggagaaggacctgattgactggacagatggcatcgcccgggaggtgcaggacatcgtggagaagtaccccctggagatcaagccacccaaccagcccctggccgccatcgacagtgaaaatgtggagaatgacaagctgcccccacccctgcagccccaggtgtatgccggctag

SEQ ID NO: 180432 - DNA, 1596 bp, Artificial Sequence
  derived and/or modified sequence
atgagcctgaagtcagaaagaagaggcatccacgtggaccagagcgacctgctgtgcaagaagggctgcggctactacggcaacccagcctggcagggcttctgcagcaagtgctggagggaggagtaccacaaggcccggcagaagcagatccaggaggactgggagctggccgagcgggtgctgctgtgctacccaggctggagcgccatggtgcagttccagctgacagccaccagcgcctcctgggcccaggtgatcctgctgctgcagccccccaacgtgctgggcctgcaggccctgcagcgggaggaggaggaggcctttgccagcagccagagcagccagggcgcccagagcctgaccttcagcaagtttgaggagaagaagaccaatgagaagaccaggaaggtgaccaccgtgaagaagttcttcagcgccagcagccgggtgggcagcaagaaggagatccaggaggccaaggcccccagccccagcatcaaccggcagaccagcattgaaacagacagagtgtccaaggagttcatcgagttcctgaagaccttccacaagacaggccaggagatctacaagcagaccaagctgttcctggagggcatgcactacaagagggacctgagcattgaggagcagagtgaatgtgcccaggacttctaccacaacgtggccgagaggatgcagacccggggcaaggtgcccccagagcgggtggagaagatcatggaccagatcgagaagtacatcatgacccggctgtacaagtatgtgttctgcccagagaccacagatgatgagaagaaggacctggccatccagaagaggatccgggccctgcgctgggtgaccccccagatgctgtgtgtgcctgtgaatgaagacatccctgaggtgtctgacatggtggtgaaggccatcacagacatcatcgagatggacagcaagagggtgccccgggacaagctggcctgcatcaccaagtgcagcaagcacatcttcaatgccatcaagatcaccaagaatgaaccagccagcgcagatgacttcctgcccaccctcatctacatcgtgctgaagggcaaccccccccggctgcagagcaacatccagtacatcacccgcttctgcaaccccagccggctgatgactggagaagatggctactacttcaccaacctgtgctgtgctgtggccttcatcgagaagctggatgcccagagcctgaacctgagccaggaggactttgaccgctacatgagcggccagaccagccccaggaagcaggaggccgagagctggagcccagatgcctgcctgggcgtgaagcagatgtacaagaacctggacctgctgagccagctgaatgaaaggcaggagcgcatcatgaatgaggccaagaagctggagaaggacctgattgactggacagatggcatcgcccgggaggtgcaggacatcgtggagaagtaccccctggagatcaagccacccaaccagcccctggccgccatcgacagtgaaaatgtggagaatgacaagctgcccccacccctgcagccccaggtgtatgccggctag

SEQ ID NO: 180433 - DNA, 1476 bp, Artificial Sequence
  derived and/or modified sequence
atgagcctgaagtcagaaagaagaggcatccacgtggaccagagcgacctgctgtgcaagaagggctgcggctactacggcaacccagcctggcagggcttctgcagcaagtgctggagggaggagtaccacaaggcccggcagaagcagatccaggaggactgggagctggccgagcggctgcagcgggaggaggaggaggcctttgccagcagccagagcagccagggcgcccagagcctgaccttcagcaagtttgaggagaagaagaccaatgagaagaccaggaaggtgaccaccgtgaagaagttcttcagcgccagcagccgggtgggcagcaagaaggagatccaggaggccaaggcccccagccccagcatcaaccggcagaccagcattgaaacagacagagtgtccaaggagttcatcgagttcctgaagaccttccacaagacaggccaggagatctacaagcagaccaagctgttcctggagggcatgcactacaagagggacctgagcattgaggagcagagtgaatgtgcccaggacttctaccacaacgtggccgagaggatgcagacccggggcaaggtgcccccagagcgggtggagaagatcatggaccagatcgagaagtacatcatgacccggctgtacaagtatgtgttctgcccagagaccacagatgatgagaagaaggacctggccatccagaagaggatccgggccctgcgctgggtgaccccccagatgctgtgtgtgcctgtgaatgaagacatccctgaggtgtctgacatggtggtgaaggccatcacagacatcatcgagatggacagcaagagggtgccccgggacaagctggcctgcatcaccaagtgcagcaagcacatcttcaatgccatcaagatcaccaagaatgaaccagccagcgcagatgacttcctgcccaccctcatctacatcgtgctgaagggcaaccccccccggctgcagagcaacatccagtacatcacccgcttctgcaaccccagccggctgatgactggagaagatggctactacttcaccaacctgtgctgtgctgtggccttcatcgagaagctggatgcccagagcctgaacctgagccaggaggactttgaccgctacatgagcggccagaccagccccaggaagcaggaggccgagagctggagcccagatgcctgcctgggcgtgaagcagatgtacaagaacctggacctgctgagccagctgaatgaaaggcaggagcgcatcatgaatgaggccaagaagctggagaaggacctgattgactggacagatggcatcgcccgggaggtgcaggacatcgtggagaagtaccccctggagatcaagccacccaaccagcccctggccgccatcgacagtgaaaatgtggagaatgacaagctgcccccacccctgcagccccaggtgtatgccggctag

SEQ ID NO: 180434 - DNA, 138 bp, Artificial Sequence
  derived and/or modified sequence
atgagcctgaagtcagaaagaagaggcatccacgtggaccagagcgacctgctgtgcaagaagggctgcggctactacggcaacccagcctggcagggcttctgcagcaagtgctggagggaggagtaccacaagtag

SEQ ID NO: 180435 - DNA, 1728 bp, Artificial Sequence
  derived and/or modified sequence
gtgagccggaagaagatgagcctgaagagcgagcggcggggcatccacgtagaccaatccgacctgctctgcaaaaagggatgtggttactatggcaatcctgcttggcaagggttctgttccaagtgctggcgggaagaatatcacaaggcaaggcagaagcagattcaagaggactgggaacttgccgaacgcgttctgctctgttatccgggttggtctgccatggtgcagttccagcttaccgccacttcggcttcgtgggcgcaggttattctgctgctccagcctccaaatgttctagggctgcaggccttgcagagggaagaagaggaggcctttgcatctagtcaatcatctcaaggagctcaaagcctcacgtttagcaagtttgaagagaagaagacaaatgagaagacaaggaaggtgacaactgtgaaaaagttcttctcagcttccagtcgggtcggaagcaaaaaagaaatccaggaggccaaagctccatctccatccatcaacaggcaaacatccatcgagaccgacagggtatctaaagagtttatcgaattcctgaagacattccacaaaactgggcaggagatctataagcagaccaaattgtttctggagggcatgcattataaaagagatctgtcaatcgaggagcagtccgaatgcgcccaggacttttaccacaacgtagccgagcggatgcaaacgagaggcaaagaaagacgctttcaccatgttggccaggctggcctcgaacttctcacctcaggcgatccacccgcctccgcctcccagagcgctgggaataccggagtcgagcctccacacccggctgtcccgcccgaacgggttgaaaagattatggaccaaattgaaaaatacatcatgactagactttacaaatacgtgttctgccccgaaaccaccgatgatgagaagaaagatcttgccattcaaaaaagaatccgcgccctgaggtgggtgacaccgcaaatgctctgcgtccctgtgaacgaggacattccagaggtgagcgatatggtcgtcaaggctataaccgatatcattgaaatggacagcaagagggtgccgcgagataagctggcatgcattaccaaatgctctaaacacatatttaacgccatcaaaattacaaagaacgaacccgcatccgcagatgactttctgccaacactcatctatatcgttcttaagggcaaccctcctcggctgcagtctaatatccagtatatcacccgtttttgcaacccaagtcggcttatgaccggcgaggacgggtactatttcacaaatctgtgttgtgcagtcgcgttcatcgagaagctcgatgcacagtcacttaatttaagtcaggaggatttcgatagatacatgtctggtcagacatcccctagaaagcaagaggcagagtcttggagcccagatgcctgcttgggagtgaaacagatgtacaagaacctagacctgctgtcgcagctcaacgaacgccaggaacggatcatgaacgaggcaaagaaactcgagaaggacctcatcgactggactgatgggatagcacgggaggtacaagacatcgtcgaaaaatatcccctggaaatcaaaccaccaaaccagcccctcgccgcaatcgactccgagaacgtcgaaaacgacaaactcccacccccactgcagcctcaggtgtacgcggggtag

SEQ ID NO: 180436 - DNA, 1596 bp, Artificial Sequence
  derived and/or modified sequence
atgagcctgaagagcgagcggcggggcatccacgtggaccagagcgacctactgtgcaagaaaggttgcggctactatggaaaccccgcttggcaggggttttgcagcaagtgctggcgagaagagtaccataaagccagacaaaaacagatacaagaagactgggagctcgcagaaagagttttgctttgttatccaggttggtctgctatggtccaattccagctgactgccacatctgcaagctgggcacaggtgatcctgttgctgcaaccgcctaacgtccttggactacaggcgcttcagagggaagaagaagaggcttttgcctcctcccagtcatcccaaggcgcccagtcactgacgttttctaaatttgaggaaaagaagaccaatgaaaagacaaggaaagtgaccactgtgaagaagtttttctctgcttcttcccgggtcggatccaaaaaggaaattcaggaggcaaaggccccatctccttctattaatcgccagacctccatcgagacagatagagtgtcaaaggagtttatcgagtttctgaagacattccacaagacaggtcaggagatatataagcaaacaaagctgttcctggagggcatgcattacaaacgggatctcagcattgaggaacaatctgagtgcgcacaggacttctaccacaatgtggctgagagaatgcagacccgaggcaaagttcctcctgagcgggtggaaaagatcatggatcagatcgaaaagtatatcatgaccagactatacaagtacgtcttctgtcctgagactacagacgacgagaaaaaggacctcgccattcagaaacggattcgcgccctaagatgggtaacccctcagatgctgtgtgtaccggtcaacgaagatatcccggaggtttccgatatggtcgtgaaagcgattaccgatattattgagatggattcaaagcgcgtcccacgcgacaaactggcttgcatcactaagtgctcaaagcacattttcaacgctatcaagattaccaaaaacgagccggcgtcagccgacgacttcctccctaccctgatctatatcgtcctgaagggcaaccccccacgcctacagtcgaacatacagtatattactcggttttgtaaccccagccggctcatgaccggggaagatgggtactatttcacaaacctctgttgtgcagttgcgtttattgaaaaactcgatgcccagtcactgaatctgtctcaggaggattttgatcgctacatgtctggacaaacttcgcccagaaagcaggaggccgaaagctggtctcctgatgcttgtttgggtgttaaacagatgtataaaaatctcgatcttctatcccagctgaatgaacgacaagagaggatcatgaatgaggcgaaaaaactggagaaggacttaatagattggaccgatggtatcgcaagagaggtgcaagatatcgtcgaaaagtaccctttagagatcaagccaccaaaccaaccactggcggcgatcgattccgagaacgtggaaaatgataaattacccccacctctccagccgcaggtatacgcaggctag

SEQ ID NO: 180437 - DNA, 1476 bp, Artificial Sequence
  derived and/or modified sequence
atgagcctgaagagcgagcggcggggcatccacgtggaccagagcgacctcctgtgcaagaaaggctgcggatactatggcaatcccgcctggcaaggcttctgcagcaagtgctggcgtgaagagtatcacaaagcacgccagaagcagatccaagaagattgggaactcgcagagcgactgcaaagggaggaagaggaggccttcgccagcagtcaaagcagtcagggcgcccagtcacttactttcagcaaattcgaggaaaaaaaaaccaacgagaagactcggaaagtcaccactgtgaagaaattcttctctgccagcagtagggtcggctccaagaaggaaatccaggaagcgaaagcgcctagcccgagtattaacagacaaacttccatcgagaccgatcgtgtttcaaaggaattcatagagtttcttaaaacatttcacaaaacaggacaagagatctacaaacagaccaagttgtttcttgaaggcatgcactacaagcgggatctgagcattgaagagcagagtgagtgcgcccaggatttttaccacaatgtggcggaaaggatgcaaactcggggcaaagtcccacctgagcgcgtggaaaagattatggaccaaattgagaagtacataatgacgcgactctataagtacgttttttgccctgagaccaccgacgatgaaaaaaaggatctggccatccagaagagaataagagccctccgctgggtgactccccaaatgctgtgcgtacccgtcaacgaggatatacccgaagttagtgatatggttgtgaaggccattacagatattatcgagatggactccaaacgcgttcctagggataaactggcctgtataacaaagtgttcaaagcacatattcaatgccatcaaaattacgaagaacgagcccgcatctgcagatgatttcctacccaccctcatttacatagttctgaaaggaaaccccccacgtctccagtcgaacattcagtacattacccgattctgtaatccgtctcgtctgatgacgggggaggacggatattatttcactaatctgtgttgtgcagtggcctttattgaaaaacttgacgctcagtctctcaatctttcccaggaggacttcgacagatacatgagcggacagacatcaccacggaagcaggaagcggaaagctggagccccgatgcatgccttggggtcaaacagatgtacaaaaacctggacctgctatctcagcttaatgaacggcaggaacggatcatgaacgaggccaagaaactggaaaaggatctgatagactggacggatggcattgcccgggaggtgcaggatatagtggagaagtaccctctcgagataaagcccccaaatcaaccattagccgctatcgactctgaaaacgtagagaacgacaagctccccccaccgctacagcctcaggtgtacgccggatag

SEQ ID NO: 180438 - DNA, 1476 bp, Artificial Sequence
  derived and/or modified sequence
atgagcctgaagagcgagcggcggggcatccacgtggaccagagcgacctactctgcaaaaagggctgcggatactacgggaacccagcctggcagggcttttgctctaagtgctggcgcgaagaatatcataaggcccggcagaagcagatacaggaagactgggagctggccgagcggctgcagagagaggaggaggaggcattcgcttccagtcagagcagccagggcgctcagagccttacattcagcaagttcgaagaaaaaaaaaccaatgaaaagaccaggaaagtgacgaccgttaagaagttcttcagtgcatcaagcagggtgggaagtaaaaaggaaatccaggaggctaaggctccttcccctagcatcaatcggcaaacttcaatcgaaacagaccgagtgtcgaaggagtttatagagtttcttaagaccttccacaagactggccaggaaatttataagcagacaaagttattcttggagggaatgcactacaaacgggacctctctattgaagagcagtccgagtgcgctcaggatttttatcacaatgtggcagaaaggatgcagacacgcggaaaggtcccgcccgaacgagtggagaaaattatggaccagatcgagaagtacataatgacaagactgtataaatatgtgttttgtccagagaccaccgatgatgagaaaaaggatctggctattcaaaaacgtattcgggccctacggtgggtgactcctcagatgctgtgtgttccggtaaacgaagacattcccgaggtgtcagacatggtggtgaaagccatcacagacattatcgagatggactcaaagagagtcccgcgcgataaactagcttgcattactaaatgttccaagcatattttcaacgccatcaaaatcacaaagaacgaaccggccagtgccgatgactttctgccaacactgatttatatagtgctgaaaggcaatcccccaaggctccagtctaatatacagtacatcaccaggttttgcaatccctcgcgcctaatgacaggcgaggatggctactattttactaacctctgctgcgcagtggcattcatagagaaattggacgctcagtccctcaatcttagccaggaggacttcgacaggtatatgtcaggccagacctctcccagaaagcaggaggccgagtcatggtcacctgatgcatgtctcggcgtgaagcagatgtacaaaaacttagatttgctgtcgcaacttaacgagcgacaggaacgtattatgaatgaggccaaaaagcttgagaaggatctcattgactggacagacggcattgcacgcgaagtgcaggacatagtggagaaatacccactggaaattaaaccgccaaaccagcctctggctgccatcgacagcgaaaacgtagagaatgacaaattgccgcctccattacagccgcaggtgtatgctgggtag

SEQ ID NO: 180439 - DNA, 1476 bp, Artificial Sequence
  derived and/or modified sequence
atgagcctgaagagcgagcggcggggcatccacgtggaccagagcgacctcctgtgcaaaaaaggatgtgggtactacggtaacccagcgtggcaaggcttctgttctaagtgttggagagaagaataccacaaagcgcgccagaagcagattcaggaagattgggagctggccgaaaggctgcagcgtgaagaggaggaggccttcgcatcctcgcagagctcccagggggcacagagtttgacattttctaagttcgaagaaaagaaaactaatgaaaaaacccgcaaggttactactgtgaagaaattctttagcgccagtagtagagtaggttccaaaaaggaaattcaggaagcaaaagccccaagtccttctatcaatcggcaaacctcaattgaaactgatcgcgtatccaaggaatttattgagtttttgaaaacctttcacaagaccggacaggaaatttataagcaaactaagctgtttctagagggcatgcactacaagcgcgacttgagcatcgaagaacagagcgagtgcgcccaggatttttatcacaatgttgccgagcgcatgcagaccaggggcaaggtacctcccgaaagggtcgagaaaatcatggaccagattgagaaatatattatgacgcgtttgtataagtacgtgttctgtcccgaaactaccgatgatgagaaaaaagacctggccatccagaaacggatcagagccctgaggtgggtcacaccacaaatgctatgcgtgcccgtgaatgaggacatccccgaggtcagcgatatggtggtcaaagcaatcacagatataatcgagatggactccaaacgggtgccacgggataagctcgcatgtattacaaagtgctccaagcacatcttcaacgcaattaagatcaccaagaatgagccggcgtctgccgacgactttctgcccacactgatctacatcgttcttaaaggtaatccgccacggttgcagtctaacatacagtacatcaccagattttgtaaccccagcaggttgatgacaggggaggatggatactactttaccaatctctgctgtgccgtggcatttattgaaaagctcgacgctcagtccttgaacttatctcaggaagattttgacagatatatgtccggtcagacttccccccggaaacaagaggctgaaagctggtctcctgatgcttgtttgggggtgaaacagatgtacaagaacctggatttactgtcccagctgaacgagaggcaggagcgcattatgaatgaggcaaagaaactggagaaagacctcatagattggaccgacggaattgcccgggaagtccaggatatcgtcgaaaagtatcccctggagatcaagccgccaaatcaacctctggcggctatcgattcagagaatgtggaaaacgataaactacctcctcccctgcagcctcaggtttatgccgggtag

SEQ ID NO: 180440 - DNA, 138 bp, Artificial Sequence
  derived and/or modified sequence
atgagcctgaagagcgagcggcggggcatccacgtggaccagagcgatcttctctgtaaaaagggctgcggttactatgggaaccccgcttggcagggcttttgctcaaagtgttggagagaagagtatcataaatag

SEQ ID NO: 180441 - DNA, 1476 bp, Artificial Sequence
  derived and/or modified sequence
atgagcctgaagagcgagcggcggggcatccacgtggaccagagcgacctgctgtgcaagaaaggatgcggctactacgggaatcccgcttggcaaggcttctgtagcaagtgctggcgggaggaatatcacaaagcacgccagaagcagatacaagaagattgggaactcgcggagcgcctccagagagaggaagaggaggcgttcgcctcctcgcagagcagtcagggcgcgcaaagcttgacattctccaaatttgaggagaagaaaacaaacgagaagacacgtaaggtgactacggtgaaaaaatttttctcagctagcagccgggtgggtagcaaaaaagagatacaagaagcgaaggctcccagcccttcaattaaccgccagacatctattgaaaccgatcgggtcagtaaagagttcatcgagttcctgaagaccttccataagacaggccaggagatatacaaacagactaaactgtttctggaaggaatgcactataagcgagacctgtccatcgaggagcagagtgagtgcgctcaagacttctaccacaacgtggccgagagaatgcagactcgcggcaaggtgcctcctgagagggtggaaaaaatcatggaccagatagaaaaatatattatgacacgactctacaagtacgtattttgtcccgagaccacagacgatgaaaagaaagacctcgccatacagaagcgtatcagagctcttcgttgggtgaccccacagatgttatgcgtcccagtgaatgaggacattcccgaggtgagcgatatggtagtaaaggctattactgatattattgaaatggattccaaacgcgtgccaagagataagctcgcttgtatcaccaagtgctctaaacatattttcaatgccattaaaatcacgaagaacgagcccgccagcgcagacgatttcttacctacccttatctacatcgttctaaaaggaaatccccctaggctccagagcaatattcaatacatcactaggttctgtaacccatcaaggctgatgactggagaggatgggtattatttcacaaatctctgctgtgccgttgcctttattgagaagctcgatgcacagtccctgaacctctcacaggaagatttcgatcgctatatgtcgggccaaacaagcccgagaaagcaggaagccgagtcatggagcccggacgcctgccttggcgtcaaacagatgtacaaaaatcttgatctgttgtcccaactgaatgagcgacaagagagaatcatgaatgaggcaaagaagttagaaaaggacctgattgactggactgatgggatagcacgggaagtgcaagacattgtagaaaagtaccctctggagatcaagccccccaatcaacccttagccgccatcgactccgagaacgtggagaacgataaattacctccaccactgcagccacaggtgtacgcaggttag

SEQ ID NO: 180442 - DNA, 4042 bp, Artificial Sequence
  derived and/or modified sequence
aacgtgcgttcgctggcggtgccgggggcggggcgagcaggagggtgggtgtgaggcgggagctggccgcggagcccagacctacccgggcgaagcgggcgagcggtggtttggacgccggcggagacgcgggcgagtggttagcaggaagaagatgagccttaagtctgaacgccgaggaattcatgtggatcaatcggatctcctgtgcaagaaaggatgtggttactacggcaaccctgcctggcagggtttctgctccaagtgctggagggaagagtaccacaaagccaggcagaagcagattcaggaggactgggagctggcggagcgggtcttgctctgttaccctggctggagtgcaatggtgcaatttcaacttactgcaacctctgcttcctgggctcaagtgatcctcctgcttcagcctcccaatgtgctgggattacaggcactccagcgggaggaagaagaggcctttgccagcagtcagagcagccaaggggcccaatccctcacattctccaagtttgaagaaaagaaaaccaacgagaagacccgcaaggttaccacagtgaagaaattcttcagtgcatcttccagggtcggatcaaagaaggaaattcaggaagcaaaagctcccagtccttccataaaccggcaaaccagcattgaaacggatagagtgtctaaggagttcatagaatttctcaagaccttccacaagacaggccaagaaatctataaacagaccaagctgtttttggaaggaatgcattacaaaagggatctaagcattgaagaacagtcagagtgtgctcaggatttctaccacaatgtggccgaaaggatgcaaactcgtgggaaagagaggagatttcaccatgttggccaggctggtcttgaactcctgacctcaggcgatccacctgcctcagcctcccaaagtgctgggaatacaggagtagagccaccgcacccagctgtgcctccagaaagagtcgagaagataatggatcagattgaaaagtacatcatgactcgtctctataaatatgtattctgtccagaaactactgatgatgagaagaaagatcttgccattcaaaagagaatcagagccctgcgctgggttacgcctcagatgctgtgtgtccctgttaatgaagacatcccagaagtgtctgatatggtggtgaaggcgatcacagatatcattgaaatggattccaagcgtgtgcctcgagacaagctggcctgcatcaccaagtgcagcaagcacatcttcaatgccatcaagatcaccaagaatgagccggcgtcagcggatgacttcctccccaccctcatctacattgttttgaagggcaaccccccacgccttcagtctaatatccagtatatcacgcgcttctgcaatccaagccgactgatgactggagaggatggctactatttcaccaatctgtgctgtgctgtggctttcattgagaagctagacgcccagtctttgaatctaagtcaggaggattttgatcgctacatgtctggccagacctctcccaggaagcaagaagctgagagttggtctcctgatgcttgcttaggcgtcaagcaaatgtataagaacttggatctcttgtctcagttgaatgaacgacaagaaaggatcatgaatgaagccaagaaactggaaaaagacctcatagattggacagatggaattgcaagagaagttcaagacatcgttgagaaatacccactggaaattaagcctccgaatcaaccgttagcagctattgactctgaaaacgttgaaaatgataaacttcctccaccactgcaacctcaagtttatgcaggatgatcacaatttagtggagagtatttatttgagcctaaattgtaggtagcccttactacactcaactgattgggatctagaatgtaactaaattgcttataaatgtcagcattttttaaaggtacagtatatggggattgtttcgtttttcctagcaggggaaccttagttaataataaaatactacttatttgagttactgatacagattcatttaaggcttgtgtgcaaattttgtctcaatcttttttccctccatgattttcctatgtgcttcctctggcattcactgtggttttggtaaataattgccttttaaaggattaaacaaatgaatgctacaaagtgtatgttcaagaaaattaaatggtaccactcttccacagtttggaataattttataattgtaaagatagaaattatattgataagtaaatatgtaaaattgtaaatatgtaaaaaaaagaatggtgtctgctgtgcatggcattttatatgttaattttttagtttaaaatgaagtatattgaatgtttgcctttagcaccattttatttggtttgtcccactaaaatgactcgagaagtgtttagacaaactccccttaagatgtgcactccatctttaagaacgtgttagccttaactttgaggttctatatagtcagagactatgacaccactaaggttcagaataaagtttaggccacataaaattgctgtttaatgtagtcgatggaagactttaaactatgcttctagcttatttttccctcattcattcagcaaatctctattgagttcttcagtgagaaggagcaggcactgggcctggaatggaaggcgggaatgaatgggcctctgatggtgagaggtgacggggtccctcagctgtgagatgcaaggggcgccttgcagcctccataatatacatttgactttgcaaacgtctagacatgttttctgaacctttttcaggacatttcaacctcgggactattcatattagtggcctgagaggtgtttgttgtggggccaccctgtgcatggtagaatgttcagcagcattcctgccatccatatccattaggtgccagtagcacccccgctagagctgtgaaaaattctctccagacatagtcagatgtctcctggggccatatcacccctccgttaagaaccactgatgtcttttacaaaccaggagttatcctcctggtggttaatatggtgtaaccaaagaatcttgcactcaatgcacagtgtgatgttaactaaaacgagttaaatatttaggaggcttgacagctacctgcattgtagaaccttttcttatctcagtggaaccttctataacctaaatataccattgatgattcttcttccattcagtgacatccacagattatgcagctatacttgtgaaatcgtgcatgaggccccagggcaccgttctagaacaacgtcacttcacacaggcagctgagaaaggttctcttgcttttccagtatcttcctaaggatggagcccaaaattgcagagcagtaactttggaataaaaccagggtgggtataaaacttcttattcttaaatttacatataagatctattaagcttgacacatctgtgtcatcacgcactgaagacaggaagcagttcactgagtcagctggttcccaagctcgcacagaaggtgataagttactatcaaatgccagtgagaatcttcttatagaataacctgggcccaagtgattttagtacaaaacttgcccttctttggtttaattttctatgtgcttttaggtgtgaatccagatatgcggtcttaattcctttggaaatacacagttcgtttagttactgtacactctgtttgttcaataaactgcatatcaacttcccacaaaagctgacttttttgggtctcttacatataaagtaggttattgagttgatttttttggaggtatctcatattggtcgaattcttctggtatggactcttgccttatatagaggcttctatttctcttaagtcagcatcaatacaacggccggagtttctgtttttgcaataagaagatgttggtattttatgtagggtaaatgtgactggaatacacctttggaacggaattctttatcaataaagtttcacaatccgtccctcttcc

SEQ ID NO: 180443 - DNA, 3925 bp, Artificial Sequence
  derived and/or modified sequence
aacgtgcgttcgctggcggtgccgggggcggggcgagcaggagggtgggtgtgaggcgggagctggccgcggagcccagacctacccgggcgaagcgggcgagcggtggtttggacgccggcggagacgcgggcgagtggttagcaggaagaagatgagccttaagtctgaacgccgaggaattcatgtggatcaatcggatctcctgtgcaagaaaggatgtggttactacggcaaccctgcctggcagggtttctgctccaagtgctggagggaagagtaccacaaagccaggcagaagcagattcaggaggactgggagctggcggagcgggtcttgctctgttaccctggctggagtgcaatggtgcaatttcaacttactgcaacctctgcttcctgggctcaagtgatcctcctgcttcagcctcccaatgtgctgggattacaggcactccagcgggaggaagaagaggcctttgccagcagtcagagcagccaaggggcccaatccctcacattctccaagtttgaagaaaagaaaaccaacgagaagacccgcaaggttaccacagtgaagaaattcttcagtgcatcttccagggtcggatcaaagaaggaaattcaggaagcaaaagctcccagtccttccataaaccggcaaaccagcattgaaacggatagagtgtctaaggagttcatagaatttctcaagaccttccacaagacaggccaagaaatctataaacagaccaagctgtttttggaaggaatgcattacaaaagggatctaagcattgaagaacagtcagagtgtgctcaggatttctaccacaatgtggccgaaaggatgcaaactcgtgggaaagtgcctccagaaagagtcgagaagataatggatcagattgaaaagtacatcatgactcgtctctataaatatgtattctgtccagaaactactgatgatgagaagaaagatcttgccattcaaaagagaatcagagccctgcgctgggttacgcctcagatgctgtgtgtccctgttaatgaagacatcccagaagtgtctgatatggtggtgaaggcgatcacagatatcattgaaatggattccaagcgtgtgcctcgagacaagctggcctgcatcaccaagtgcagcaagcacatcttcaatgccatcaagatcaccaagaatgagccggcgtcagcggatgacttcctccccaccctcatctacattgttttgaagggcaaccccccacgccttcagtctaatatccagtatatcacgcgcttctgcaatccaagccgactgatgactggagaggatggctactatttcaccaatctgtgctgtgctgtggctttcattgagaagctagacgcccagtctttgaatctaagtcaggaggattttgatcgctacatgtctggccagacctctcccaggaagcaagaagctgagagttggtctcctgatgcttgcttaggcgtcaagcaaatgtataagaacttggatctcttgtctcagttgaatgaacgacaagaaaggatcatgaatgaagccaagaaactggaaaaagacctcatagattggacagatggaattgcaagagaagttcaagacatcgttgagaaatacccactggaaattaagcctccgaatcaaccgttagcagctattgactctgaaaacgttgaaaatgataaacttcctccaccactgcaacctcaagtttatgcaggatgatcacaatttagtggagagtatttatttgagcctaaattgtaggtagcccttactacactcaactgattgggatctagaatgtaactaaattgcttataaatgtcagcattttttaaaggtacagtatatggggattgtttcgtttttcctagcaggggaaccttagttaataataaaatactacttatttgagttactgatacagattcatttaaggcttgtgtgcaaattttgtctcaatcttttttccctccatgattttcctatgtgcttcctctggcattcactgtggttttggtaaataattgccttttaaaggattaaacaaatgaatgctacaaagtgtatgttcaagaaaattaaatggtaccactcttccacagtttggaataattttataattgtaaagatagaaattatattgataagtaaatatgtaaaattgtaaatatgtaaaaaaaagaatggtgtctgctgtgcatggcattttatatgttaattttttagtttaaaatgaagtatattgaatgtttgcctttagcaccattttatttggtttgtcccactaaaatgactcgagaagtgtttagacaaactccccttaagatgtgcactccatctttaagaacgtgttagccttaactttgaggttctatatagtcagagactatgacaccactaaggttcagaataaagtttaggccacataaaattgctgtttaatgtagtcgatggaagactttaaactatgcttctagcttatttttccctcattcattcagcaaatctctattgagttcttcagtgagaaggagcaggcactgggcctggaatggaaggcgggaatgaatgggcctctgatggtgagaggtgacggggtccctcagctgtgagatgcaaggggcgccttgcagcctccataatatacatttgactttgcaaacgtctagacatgttttctgaacctttttcaggacatttcaacctcgggactattcatattagtggcctgagaggtgtttgttgtggggccaccctgtgcatggtagaatgttcagcagcattcctgccatccatatccattaggtgccagtagcacccccgctagagctgtgaaaaattctctccagacatagtcagatgtctcctggggccatatcacccctccgttaagaaccactgatgtcttttacaaaccaggagttatcctcctggtggttaatatggtgtaaccaaagaatcttgcactcaatgcacagtgtgatgttaactaaaacgagttaaatatttaggaggcttgacagctacctgcattgtagaaccttttcttatctcagtggaaccttctataacctaaatataccattgatgattcttcttccattcagtgacatccacagattatgcagctatacttgtgaaatcgtgcatgaggccccagggcaccgttctagaacaacgtcacttcacacaggcagctgagaaaggttctcttgcttttccagtatcttcctaaggatggagcccaaaattgcagagcagtaactttggaataaaaccagggtgggtataaaacttcttattcttaaatttacatataagatctattaagcttgacacatctgtgtcatcacgcactgaagacaggaagcagttcactgagtcagctggttcccaagctcgcacagaaggtgataagttactatcaaatgccagtgagaatcttcttatagaataacctgggcccaagtgattttagtacaaaacttgcccttctttggtttaattttctatgtgcttttaggtgtgaatccagatatgcggtcttaattcctttggaaatacacagttcgtttagttactgtacactctgtttgttcaataaactgcatatcaacttcccacaaaagctgacttttttgggtctcttacatataaagtaggttattgagttgatttttttggaggtatctcatattggtcgaattcttctggtatggactcttgccttatatagaggcttctatttctcttaagtcagcatcaatacaacggccggagtttctgtttttgcaataagaagatgttggtattttatgtagggtaaatgtgactggaatacacctttggaacggaattctttatcaataaagtttcacaatccgtccctcttcc

SEQ ID NO: 180444 - DNA, 1728 bp, Artificial Sequence
  derived and/or modified sequence
gtcagcaggaaaaagatgagcctcaaatcagaacggagaggaatccatgttgaccagagtgacctgctttgcaagaaggggtgcggctactatggtaaccccgcttggcagggattctgctccaagtgttggcgggaggagtatcacaaggcgagacagaaacagatccaagaagattgggagctggcagaaagagtcctactgtgttacccgggatggtctgccatggtccagttccagctgaccgctacatcggcctcgtgggcacaggtaatcctgctgctgcagccacccaatgtgctcggccttcaagccctgcagcgagaggaggaagaggccttcgcttcctcccaatccagtcaaggggctcagtcactgaccttctctaagtttgaggaaaagaaaaccaacgagaaaacgagaaaggtcacaactgtaaagaagttttttagtgcctcctcacgagtgggcagcaaaaaggagatccaggaggcaaaagctccctctccatcgattaaccggcaaactagcatcgagaccgatcgcgtgtccaaggagtttatcgaattcctgaagacattccacaagacaggccaggagatctataagcagactaaactgttcctagagggtatgcactacaagagagatctttccatagaagaacagtctgaatgcgcacaggatttctaccacaacgtcgctgagcgcatgcaaacaagaggtaaggaaagacgattccatcacgtcgggcaggcaggtcttgaactcctcaccagtggcgatcctcccgcaagcgccagccagtctgcaggaaacacaggcgttgagcccccacatcccgcagttccgcctgaacgggtggagaaaataatggatcagatcgaaaagtatataatgacacggttatacaagtacgtcttttgcccggagaccacagatgatgaaaagaaggacctggctatacagaaaaggatccgagcgctccgctgggtcactccgcagatgctgtgtgtaccggtgaacgaagacatccctgaggttagtgacatggtcgtgaaagcaatcacagatatcatcgaaatggacagtaagcgagtcccaagagataagctggcgtgtataactaaatgctctaagcacatattcaatgccattaagattactaagaatgaaccagctagcgcagacgattttttacctactttgatttacatcgtgctgaaggggaacccgcctaggcttcaaagtaacatccaatacatcacgcgcttttgtaatccaagtaggctgatgaccggggaggatggttactattttacaaacctgtgctgcgctgtggccttcatcgagaaactggacgctcagtctttgaacctgtcacaagaggacttcgaccgctatatgagcgggcaaacctcacccaggaagcaggaggcagaatcctggagtcccgacgcatgccttggcgtgaagcaaatgtacaagaacctggatctgctgagtcagctgaatgaacgacaggagcggattatgaacgaagctaaaaagctggagaaagacttaatcgactggactgacggcattgccagggaggtgcaagatattgtagagaagtacccactggaaatcaaacctccgaatcagcccctcgccgctatcgacagtgaaaacgtggaaaatgataaactgccaccacccctgcagccccaggtgtatgcgggttag

SEQ ID NO: 180445 - DNA, 1596 bp, Artificial Sequence
  derived and/or modified sequence
atgtcactgaaaagtgagaggcgaggaatacatgtagatcagagtgatctactctgcaagaagggttgtggatactacggcaatccagcttggcaagggttctgttcgaaatgctggcgcgaagagtaccataaagctcgacagaaacagatccaggaagactgggagctggctgaaagggtactcctgtgttacccgggatggagtgctatggtacagttccaactaacggccacgtctgcgagttgggcacaagttatccttctgctacagcccccaaacgtactgggcctgcaggccctccagcgtgaggaggaagaggctttcgcaagctcccaatccagtcagggcgctcagagcctgacgtttagtaagttcgaagaaaagaagaccaacgagaagacaaggaaagttacaaccgtgaaaaaatttttcagcgcctcatcccgagtcgggagcaagaaggaaatccaagaggctaaagcgcctagcccttcgattaaccgccagacttctattgagaccgacagggttagtaaggagttcattgagtttctgaaaacatttcataagacgggacaggagatctacaagcagaccaaattgttcctggagggcatgcactacaagagggatctatcaatcgaagaacagagtgagtgtgcccaagacttctaccataatgtagccgaaaggatgcagacacggggaaaagtccctccagaaagggttgaaaaaatcatggaccaaatcgaaaagtacattatgacaaggctttacaaatatgtgttctgccccgaaactacagacgatgagaaaaaagatcttgccattcagaaaagaattcgcgctttaaggtgggttactccccaaatgctttgcgtccccgtcaatgaggacattcctgaggtgtccgacatggtggtgaaggctatcactgacattatagagatggactcgaaaagggttccccgagacaagctggcctgcattactaagtgctcgaaacatatctttaatgcaatcaagatcaccaagaatgagcccgcttcagctgatgacttcctaccaaccctgatctacatcgtgctgaagggcaatccccctagactgcagtccaatatccagtacatcacgcggttctgtaatccctctcggttgatgaccggggaggatggttattatttcacaaatttatgttgcgctgtcgcatttatagagaaactcgatgcgcagagccttaacctgtcccaagaggacttcgacagatatatgtcaggccaaacatcccctcgaaagcaagaggccgaaagttggtctccagacgcatgtttaggcgtgaaacaaatgtacaaaaacctggatctcttgtcccagttgaacgaacggcaagagcgcatcatgaatgaggcaaaaaagctggagaaagatctcattgattggaccgacggaattgccagagaagtgcaggatatcgtggagaagtacccactggaaataaaaccccctaaccaacctctggccgctatcgattccgagaacgtggagaatgacaaactgcccccaccactccagccacaggtttacgctgggtag

SEQ ID NO: 180446 - DNA, 1476 bp, Artificial Sequence
  derived and/or modified sequence
atgagtttaaagtctgagcgccgaggaattcacgtggatcagagcgatctcctgtgtaaaaagggctgcggatactatggtaatccagcatggcaaggcttttgtagcaagtgctggagagaggagtatcataaggccaggcagaagcaaattcaggaggactgggagcttgcggaacgacttcagagagaagaagaggaagccttcgccagctctcaatcttcccaaggagctcagtcattgaccttcagcaaattcgaggaaaaaaagactaatgaaaagacgagaaaggtgaccaccgtgaagaaatttttttccgcatcttcaagggtaggcagtaagaaagaaatacaggaagccaaagcgccatccccttcaatcaaccggcagactagcatcgagaccgacagagtatccaaggagtttattgagtttcttaagactttccataaaacaggacaggagatatacaagcagactaagctgttcctggagggcatgcactataagagagacctctccatcgaagagcagagtgaatgcgcccaggatttctaccataacgtggccgaaagaatgcaaacccgcggtaaggtaccacccgagcgcgtggaaaagattatggatcagattgagaaatacatcatgacacggctctacaagtatgtcttttgccctgagacaacagacgacgagaagaaagacctggccatacagaaacggattcgagcactgaggtgggtcacaccccagatgctctgtgtgcctgtgaatgaagacattcctgaggtatctgacatggtggtaaaagccataaccgacattatcgagatggacagcaagcgggtgcccagggataagttggcttgcattacaaagtgctcgaaacatatctttaacgccattaaaatcaccaagaacgaaccagcttctgctgacgatttccttcctactctgatttacatcgtcctgaagggaaatccacccaggctccaatccaatatccagtatattaccaggttttgtaacccaagccgcttgatgacaggggaggacggctattattttaccaatctgtgctgtgccgtggcatttatcgagaaactggacgcccaatccctgaatttgagtcaggaagatttcgatcgctatatgagcggacaaacaagtccccgaaaacaggaggctgagagctggagccccgacgcctgtcttggggtcaaacagatgtacaaaaacttagatctcctgtcacagctaaacgagaggcaggagaggattatgaatgaagctaaaaagctcgagaaagatctcatcgactggaccgacggtatcgctagggaagtccaggacatcgtcgagaagtatccgcttgaaatcaaaccacccaatcagcctctggcagccatcgactccgagaatgtcgaaaacgataaattgcctccgccacttcagccacaggtatacgccggatag

SEQ ID NO: 180447 - DNA, 1476 bp, Artificial Sequence
  derived and/or modified sequence
atgagtctgaagtctgaaagaagaggaatccacgttgaccagtctgacctgttatgtaaaaagggctgtggctattatggcaatcctgcctggcagggcttttgctccaaatgttggagagaggagtatcacaaagcacgccaaaagcagatccaggaggactgggaattggccgagaggttgcagagagaagaggaggaagctttcgcctcctcccagagtagccagggagcccagagcttaacttttagcaaattcgaggagaaaaaaaccaatgagaagacacgaaaggttacaaccgtcaagaagtttttcagtgcctctagcagggtcggctctaagaaggagattcaggaggctaaggcgccttctccttcaattaacaggcaaacctcaatcgagaccgatagagtttccaaagaatttatcgaatttctaaaaacctttcataagaccgggcaagagatttacaagcaaacaaaactttttctggaaggtatgcactataagcgagatctgagtatcgaggagcaatccgagtgcgctcaggatttttaccataatgtggctgaacggatgcaaacacggggtaaggtcccgcctgaaagagtggaaaaaattatggaccaaattgagaagtatatcatgactaggctgtacaagtatgtcttctgccctgagacaacagacgacgagaaaaaggacctggctatccagaaacggatacgggctctgaggtgggtaaccccacagatgttatgtgttcccgttaacgaggacatccctgaagtctccgacatggtagtaaaagcgatcacagacatcatagagatggatagcaaaagggtcccacgtgacaagctggcttgtatcacaaaatgttcaaaacacatcttcaatgccattaagataactaagaacgaacccgcatcagccgatgattttctgcctactctgatatacattgttctgaaaggtaacccgccacgcctccaatctaatatccaatatattacccggttctgcaacccctccaggttaatgactggagaagatggatattattttaccaacctgtgctgcgctgtagcttttatcgagaagctggatgctcagtcgcttaacttgagccaagaagactttgacagatatatgagtggacaaacctccccacggaaacaggaagcagagtcatggtcccccgatgcctgtctgggagtcaagcagatgtataaaaatctggacctgctgagccagctcaatgagcggcaggagcgcataatgaacgaggctaagaagctagagaaggacctgattgattggactgacggaatcgccagggaggtccaggatatcgtggagaaatatcccctcgagatcaaacctccaaaccagcctctcgcagccatagactcagagaacgtggaaaatgataagttacctccccctctgcaacctcaggtatatgcaggatag

SEQ ID NO: 180448 - DNA, 1476 bp, Artificial Sequence
  derived and/or modified sequence
atgtcattgaaatccgaaaggcgtgggatccacgtggaccagagtgacctgctttgtaagaagggatgcgggtattatggcaaccctgcatggcagggattctgttctaaatgttggcgggaagaataccataaagcccgtcagaagcagatccaagaagactgggagttagccgagaggctgcaaagagaagaggaagaggcgttcgcttccagccagagcagtcagggcgctcagtccctgacattctctaagttcgaggagaaaaaaactaacgagaaaaccaggaaggtgaccacagtaaagaagttcttctctgccagctcccgtgtgggaagcaaaaaggagatacaagaagccaaggctcctagtccgtctatcaatcgccagacctctattgaaactgacagggtgtccaaggaatttatagagtttctcaagacctttcacaagactggtcaggagatctataagcagaccaagctcttcctggagggcatgcactacaagcgcgatctgtctatagaggagcaaagcgagtgcgcacaggacttctaccataacgtagccgagaggatgcaaacccggggtaaggtgcctcctgaacgagtggaaaagatcatggatcagattgagaagtatatcatgacgcgcctctataaatacgtcttttgtcctgagaccacagatgacgagaagaaggacctggccatccagaagaggatcagggcgttacgttgggtcacaccacagatgctttgcgtccccgttaatgaagatatcccagaggtctcggatatggtggtgaaggcaatcaccgacatcattgagatggacagtaagcgcgtgccaagggataagttagcttgcatcacgaaatgcagcaagcatatcttcaatgctattaagattacaaaaaatgagcccgcttcagccgacgacttcttgcctacgctgatttatatcgtactgaaagggaaccctccccgactgcagagcaatatccagtatattacaagattctgtaacccaagtaggttgatgactggcgaggacggctattacttcacgaatctctgttgtgcagtcgcattcatcgaaaagctggacgcacagagcctgaatctgtcccaggaggattttgataggtacatgtcgggccaaaccagtcctcggaagcaggaggcagagtcttggagcccagacgcgtgcttgggtgtgaagcagatgtacaaaaacttggacctcctttcacagctgaacgaaaggcaagagagaatcatgaatgaggccaagaagttagagaaggacttgattgattggacagatggaattgccagggaggtgcaggacattgttgaaaagtacccattagaaattaagcctccaaaccaaccgttagcggcaattgatagtgagaatgtcgaaaatgacaagcttccgccacccctgcagccccaagtctacgcagggtag

SEQ ID NO: 180449 - DNA, 138 bp, Artificial Sequence
  derived and/or modified sequence
atgtccctgaagtcggaaagacgcggaattcacgtagaccagtcagacctgctgtgcaagaaggggtgtggatattatggtaatcccgcatggcaaggattctgttccaagtgctggcgcgaggaataccacaagtag

SEQ ID NO: 180450 - DNA, 1476 bp, Artificial Sequence
  derived and/or modified sequence
atgtctcttaaatcggagaggcggggtatccatgtggatcagagtgacctcctctgcaagaagggctgcggatactacggcaatccggcttggcaagggttctgcagcaagtgctggcgggaggagtaccacaaggccaggcaaaaacagatccaggaggactgggagctcgctgagaggctccaaagggaggaggaagaagcctttgcaagcagccagtcctcccagggagcccagagcctgactttttctaagttcgaggagaagaaaacaaatgagaaaacaagaaaggtcaccacggtgaaaaagttcttttcggcaagttcccgagttgggtccaagaaagagatccaggaagcaaaagccccttcccccagtattaataggcaaaccagcattgaaacagatcgcgtgtccaaagaattcatcgagttccttaagacttttcacaagaccgggcaagagatttacaagcaaaccaagctttttctggaggggatgcactacaagagggatctgagcatcgaggagcaatcagagtgcgcccaagacttctaccacaacgttgccgaaaggatgcaaacaagagggaaggtgccacctgaaagagtagagaagatcatggatcaaattgagaaatatattatgacgcgactttacaagtatgtgttctgccccgagaccaccgacgacgagaaaaaggatcttgccatccagaagcggatacgcgctctacgctgggtaacgccccagatgctctgcgtccctgtcaacgaggatataccagaggtgtccgatatggtcgtcaaggctatcactgatattattgagatggatagcaagcgcgtgcccagagacaaactggcatgcattaccaagtgttcaaaacatatattcaacgctataaaaatcacaaaaaacgagccagcatcagcagacgatttcctgcccacgctgatttatattgtcttgaaggggaatcccccacgattgcagagcaatattcagtatattactcggttctgtaacccgtctcggctcatgaccggagaagacggttattattttacgaacctgtgctgtgcagtagcattcatagaaaagcttgacgcgcaatcactaaatttatctcaagaagatttcgatcgttatatgtcaggacagacctctcctcggaagcaagaagcagagagctggtcccccgacgcttgtttaggcgtgaagcagatgtataagaatctggacttgctgtctcaactaaacgaacgacaggagcgcattatgaatgaggctaagaagctcgaaaaggatcttatcgactggactgacggaatcgcccgagaagtccaggatattgtcgagaagtaccccctcgagatcaagcccccaaaccagccacttgcagccattgactcggaaaacgtggagaatgacaaactccctcctccactgcagccacaggtgtacgcaggctag

SEQ ID NO: 180451 - DNA, 1728 bp, Artificial Sequence
  derived and/or modified sequence
gtgagcagaaagaagatgagcctgaagagcgagagaagaggcatccacgtggaccagagcgacctgctgtgcaagaagggctgcggctactacggcaaccccgcctggcagggcttctgcagcaagtgctggagagaggagtaccacaaggccagacagaagcagatccaggaggactgggagctggccgagagagtgctgctgtgctaccccggctggagcgccatggtgcagttccagctgaccgccaccagcgccagctgggcccaggtgatcctgctgctgcagccccccaacgtgctgggcctgcaggccctgcagagagaggaggaggaggccttcgccagcagccagagcagccagggcgcccagagcctgaccttcagcaagttcgaggagaagaagaccaacgagaagaccagaaaggtgaccaccgtgaagaagttcttcagcgccagcagcagagtgggcagcaagaaggagatccaggaggccaaggcccccagccccagcatcaacagacagaccagcatcgagaccgacagagtgagcaaggagttcatcgagttcctgaagaccttccacaagaccggccaggagatctacaagcagaccaagctgttcctggagggcatgcactacaagagagacctgagcatcgaggagcagagcgagtgcgcccaggacttctaccacaacgtggccgagagaatgcagaccagaggcaaggagagaagattccaccacgtgggccaggccggcctggagctgctgaccagcggcgacccccccgccagcgccagccagagcgccggcaacaccggcgtggagcccccccaccccgccgtgccccccgagagagtggagaagatcatggaccagatcgagaagtacatcatgaccagactgtacaagtacgtgttctgccccgagaccaccgacgacgagaagaaggacctggccatccagaagagaatcagagccctgagatgggtgaccccccagatgctgtgcgtgcccgtgaacgaggacatccccgaggtgagcgacatggtggtgaaggccatcaccgacatcatcgagatggacagcaagagagtgcccagagacaagctggcctgcatcaccaagtgcagcaagcacatcttcaacgccatcaagatcaccaagaacgagcccgccagcgccgacgacttcctgcccaccctgatctacatcgtgctgaagggcaacccccccagactgcagagcaacatccagtacatcaccagattctgcaaccccagcagactgatgaccggcgaggacggctactacttcaccaacctgtgctgcgccgtggccttcatcgagaagctggacgcccagagcctgaacctgagccaggaggacttcgacagatacatgagcggccagaccagccccagaaagcaggaggccgagagctggagccccgacgcctgcctgggcgtgaagcagatgtacaagaacctggacctgctgagccagctgaacgagagacaggagagaatcatgaacgaggccaagaagctggagaaggacctgatcgactggaccgacggcatcgccagagaggtgcaggacatcgtggagaagtaccccctggagatcaagccccccaaccagcccctggccgccatcgacagcgagaacgtggagaacgacaagctgcccccccccctgcagccccaggtgtacgccggctag

SEQ ID NO: 180452 - DNA, 1596 bp, Artificial Sequence
  derived and/or modified sequence
atgagcctgaagagcgagagaagaggcatccacgtggaccagagcgacctgctgtgcaagaagggctgcggctactacggcaaccccgcctggcagggcttctgcagcaagtgctggagagaggagtaccacaaggccagacagaagcagatccaggaggactgggagctggccgagagagtgctgctgtgctaccccggctggagcgccatggtgcagttccagctgaccgccaccagcgccagctgggcccaggtgatcctgctgctgcagccccccaacgtgctgggcctgcaggccctgcagagagaggaggaggaggccttcgccagcagccagagcagccagggcgcccagagcctgaccttcagcaagttcgaggagaagaagaccaacgagaagaccagaaaggtgaccaccgtgaagaagttcttcagcgccagcagcagagtgggcagcaagaaggagatccaggaggccaaggcccccagccccagcatcaacagacagaccagcatcgagaccgacagagtgagcaaggagttcatcgagttcctgaagaccttccacaagaccggccaggagatctacaagcagaccaagctgttcctggagggcatgcactacaagagagacctgagcatcgaggagcagagcgagtgcgcccaggacttctaccacaacgtggccgagagaatgcagaccagaggcaaggtgccccccgagagagtggagaagatcatggaccagatcgagaagtacatcatgaccagactgtacaagtacgtgttctgccccgagaccaccgacgacgagaagaaggacctggccatccagaagagaatcagagccctgagatgggtgaccccccagatgctgtgcgtgcccgtgaacgaggacatccccgaggtgagcgacatggtggtgaaggccatcaccgacatcatcgagatggacagcaagagagtgcccagagacaagctggcctgcatcaccaagtgcagcaagcacatcttcaacgccatcaagatcaccaagaacgagcccgccagcgccgacgacttcctgcccaccctgatctacatcgtgctgaagggcaacccccccagactgcagagcaacatccagtacatcaccagattctgcaaccccagcagactgatgaccggcgaggacggctactacttcaccaacctgtgctgcgccgtggccttcatcgagaagctggacgcccagagcctgaacctgagccaggaggacttcgacagatacatgagcggccagaccagccccagaaagcaggaggccgagagctggagccccgacgcctgcctgggcgtgaagcagatgtacaagaacctggacctgctgagccagctgaacgagagacaggagagaatcatgaacgaggccaagaagctggagaaggacctgatcgactggaccgacggcatcgccagagaggtgcaggacatcgtggagaagtaccccctggagatcaagccccccaaccagcccctggccgccatcgacagcgagaacgtggagaacgacaagctgcccccccccctgcagccccaggtgtacgccggctag

SEQ ID NO: 180453 - DNA, 1476 bp, Artificial Sequence
  derived and/or modified sequence
atgagcctgaagagcgagagaagaggcatccacgtggaccagagcgacctgctgtgcaagaagggctgcggctactacggcaaccccgcctggcagggcttctgcagcaagtgctggagagaggagtaccacaaggccagacagaagcagatccaggaggactgggagctggccgagagactgcagagagaggaggaggaggccttcgccagcagccagagcagccagggcgcccagagcctgaccttcagcaagttcgaggagaagaagaccaacgagaagaccagaaaggtgaccaccgtgaagaagttcttcagcgccagcagcagagtgggcagcaagaaggagatccaggaggccaaggcccccagccccagcatcaacagacagaccagcatcgagaccgacagagtgagcaaggagttcatcgagttcctgaagaccttccacaagaccggccaggagatctacaagcagaccaagctgttcctggagggcatgcactacaagagagacctgagcatcgaggagcagagcgagtgcgcccaggacttctaccacaacgtggccgagagaatgcagaccagaggcaaggtgccccccgagagagtggagaagatcatggaccagatcgagaagtacatcatgaccagactgtacaagtacgtgttctgccccgagaccaccgacgacgagaagaaggacctggccatccagaagagaatcagagccctgagatgggtgaccccccagatgctgtgcgtgcccgtgaacgaggacatccccgaggtgagcgacatggtggtgaaggccatcaccgacatcatcgagatggacagcaagagagtgcccagagacaagctggcctgcatcaccaagtgcagcaagcacatcttcaacgccatcaagatcaccaagaacgagcccgccagcgccgacgacttcctgcccaccctgatctacatcgtgctgaagggcaacccccccagactgcagagcaacatccagtacatcaccagattctgcaaccccagcagactgatgaccggcgaggacggctactacttcaccaacctgtgctgcgccgtggccttcatcgagaagctggacgcccagagcctgaacctgagccaggaggacttcgacagatacatgagcggccagaccagccccagaaagcaggaggccgagagctggagccccgacgcctgcctgggcgtgaagcagatgtacaagaacctggacctgctgagccagctgaacgagagacaggagagaatcatgaacgaggccaagaagctggagaaggacctgatcgactggaccgacggcatcgccagagaggtgcaggacatcgtggagaagtaccccctggagatcaagccccccaaccagcccctggccgccatcgacagcgagaacgtggagaacgacaagctgcccccccccctgcagccccaggtgtacgccggctag

SEQ ID NO: 180454 - DNA, 138 bp, Artificial Sequence
  derived and/or modified sequence
atgagcctgaagagcgagagaagaggcatccacgtggaccagagcgacctgctgtgcaagaagggctgcggctactacggcaaccccgcctggcagggcttctgcagcaagtgctggagagaggagtaccacaagtag

SEQ ID NO: 180455 - protein, 210 aa, Artificial Sequence
  derived and/or modified sequence
MAKLRVAYEYTEAEDKSIRLGLFLIISGVVSLFIFGFCWLSPALQDLQATEANCTVLSVQQIGEVFECTFTCGADCRGTSQYPCVQVYVNNSESNSRALLHSDEHQLLTNPKCSYIPPCKRENQKNLESVMNWQQYWKDEIGSQPFTCYFNQHQRPDDVLLHRTHDEIVLLHCFLWPLVTFVVGVLIVVLTICAKSLAVKAEAMKKRKFS

SEQ ID NO: 180456 - DNA, 633 bp, Artificial Sequence
  derived and/or modified sequence
atggccaagcttcgcgtagcctacgaatacactgaggctgaagataaaagcataagactggggctctttctgattatttcaggtgttgtctcactgttcatttttggattctgttggctatcccctgctctccaggacctgcaggccactgaagccaactgtacagttttgagcgtccagcagatcggtgaggtgtttgaatgcacttttacgtgtggggccgactgccggggcactagccagtacccttgtgtgcaggtatatgtgaataacagtgaatccaactctagggctcttttacactctgacgaacatcaactgctgacaaatcctaaatgtagctatatccccccttgcaagcgagaaaaccagaagaatctcgagtcggtgatgaattggcagcaatactggaaggacgagatcggatcccagccttttacctgttactttaaccagcaccagcgacccgatgatgtgctgttgcaccgaacacacgacgaaatcgtgctgctacattgcttcctgtggccactcgtgacatttgttgttggagtgcttatagttgtgctgacaatctgtgctaagtcccttgctgtcaaggctgaagcaatgaaaaaacgcaaatttagctag

SEQ ID NO: 180457 - DNA, 633 bp, Artificial Sequence
  derived and/or modified sequence
atggccaagctgcgggtggcctatgagtacacagaagctgaggacaagagcatccggctgggcctcttcctgatcatctctggagtggtgtccctcttcatcttcggcttctgctggctgagccctgccctgcaggacctgcaggccacagaggccaactgcaccgtgctgtctgtgcagcagatcggggaggtgtttgaatgtaccttcacctgtggggctgactgccggggcaccagccagtacccctgtgtgcaggtgtatgtgaacaacagcgagagcaacagccgggccctgctgcacagtgatgagcaccagctgctgaccaaccccaagtgcagctacatccccccctgcaagcgggagaaccagaagaacctggagagcgtgatgaactggcagcagtactggaaggatgaaattggcagccagcccttcacctgctacttcaaccagcaccagaggccagatgatgtgctgctgcacaggacccatgatgagatcgtgctgctgcactgcttcctgtggcccctggtgacctttgtggtgggcgtgctgattgtggtgctgaccatctgtgccaagagcctggccgtgaaggccgaggccatgaagaagaggaagttctcctag

SEQ ID NO: 180458 - DNA, 633 bp, Artificial Sequence
  derived and/or modified sequence
atggccaagctgcgggtggcctacgagtacaccgaggccgaggacaaatctattaggctcgggctgtttttgatcatcagcggagttgttagcctgttcatctttggcttttgctggttgtcccctgccttacaggatctccaagccaccgaagcaaactgtaccgtgctctcggtccaacagataggagaggtattcgagtgcacgttcacttgcggcgctgactgtcgcggaacatcacagtacccatgcgtccaggtgtacgtgaacaattccgaaagcaattcccgggccctcttacatagcgatgagcaccaattgctgaccaacccaaaatgctcttatatacctccctgcaaacgggaaaaccagaaaaacctggagagcgttatgaactggcagcagtactggaaagatgagattggctcccagccattcacctgctacttcaaccagcaccagcgcccagacgacgtgctgcttcatcgtacccacgatgaaatagtcctgctacactgtttcctgtggcctctggtgacctttgtggtgggtgtcctgatcgtggtactgacaatttgtgctaaaagcctggccgtgaaggctgaggctatgaagaaaagaaaattctcatag

SEQ ID NO: 180459 - DNA, 4731 bp, Artificial Sequence
  derived and/or modified sequence
gctcgccccagctcagacactcctagccttggggcagctgccgggcgagtcagcggagtagcggccagcgggcgatggagacagagagacacccgacgagaggaggcggggtgggggaggcggggagagtgcgggggcggaggctggcagggggcgctggaagctggagcggtccgtgcgctccccgcgcccgagggtgcaggaggctctgaagcggctgctgcaccgcggggcccaggcggcggctggggggctggggggcgctgccgccgccgccgccgggggcgtcgctggcctcggcccctttgttctcgcgcgctccccctcgccgcccactcccctgctgtcgcgcggcggcggcggtggcggcggcggctcctcccgcccgaggcagtcgggctcggcgccgggggcgggagggggcggggggagcacgccagccgccgagagtggggggcgatggcgaagctccgggtggcttacgagtacacggaagccgaggacaagagcatccggctcggcttgtttctcatcatctccggcgtcgtgtcgctcttcatcttcggcttctgctggctgagtcccgcgctgcaggatctgcaagccacggaggccaattgcacggtgctgtcggtgcagcagatcggcgaggtgttcgagtgcaccttcacctgtggcgccgactgcaggggcacctcgcagtacccctgcgtccaggtctacgtgaacaactctgagtccaactctagggcgctgctgcacagcgacgagcaccagctcctgaccaaccccaagtgctcctatatccctccctgtaagagagaaaatcagaagaatttggaaagtgtcatgaattggcaacagtactggaaagatgagattggttcccagccatttacttgctattttaatcaacatcaaagaccagatgatgtgcttctgcatcgcactcatgatgagattgtcctcctgcattgcttcctctggcccctggtgacatttgtggtgggcgttctcattgtggtcctgaccatctgtgccaagagcttggcggtcaaggcggaagccatgaagaagcgcaagttctcttaaaggggaaggaggcttgtagaaagcaaagtacagaagctgtactcatcggcacgcgtccacctgcggaacctgtgtttcctggcgcaggagatggacagggccacgacagggctctgagaggctcatccctcagtggcaacagaaacaggcacaactggaagacttggaacctcaaagcttgtattccatctgctgtagcaatggctaaagggtcaagatcttagctgtatggagtaactatttcagaaaaccctataagaagttcattttctttcaaaagtaacagtatattatttgtacagtgtagtatacaaaccattatgatttatgctacttaaaaatattaaaatagagtggtctgtgttattttctatttccttttttatgcttagaacaccagggtttaaaaaaaaaaaaaaggtgaggacatctgggtctcatttgcttctgctaggttaaacttttacttgacaacaaggattcctgctgaagtctgaaccttactgtgtaaccctcagtttccactattaaagagtatcttttgacgtctgcttggaaaatgaatagtatactggtaactcagtctccagtcacctctgtgtctcttaagcaagagattctaaaagattgggaaaacatatcctccaacacctgcctttgcctaaccattatttttcaccagattacttcttaagagagggaggtgattctgaagaaggcttctatctcaaaaagcactgggcttccttattcatctgttcttgttgtttttgacggagttaaaaaagtttgtgtgcaatacaatatacatgatgtgaaggacactcttcagcttagtgaaacgctgttttcatttttttttttttttgtaggtcagaaaaaaacaacaaaatcagttcaagcatttttttttctttgtccttgccttgatgttatgagtattaaaaccaggaggattgctgccattgtgcagtttgcttagacaaacctggagatgcaacccagctcacatcattgctactgatgagctttctgtgcctttatcaaaagttgattgagaagaccatatttctttgtatctttttataaactcaaattccaagtatcaaatcgcaggtctcagtgaacatcaaacctatttactacatagaatcaaacctttgtttaggtgagatgtacatcgttagtggaggaaaaactgacaacctaatttcatttgttttcttctgatactcttcagacatgcctctattagaataaaggtaaactggaatttaaagacaagttcccctcagttatttccatggagctgtaatatgtatatatggagtgatggtttcctgacctttagtccacataccaatgttttcttttttcttttttttttttttttttgagatggtgtctcactctgttgccaggctggagtgcagtggcacgatctcggctcactacagtctccacctcctgggttcaagtcattcctctgcctcagcctcccgagtagctgggactacaggcacgcaccaccacgcctggctaatttttttgtatttttagtagagacggggtttcaccgtgttagccaggatggtctcaatctcctgaccttgtgatctgcccacttcacctcccaaagtgctgggattacaggccaatgttttcttaatcttagaatgtgaataactgaaaatcatagtctgtggaaaggtgttgaattgagtataatcttcttctgtttatttttgtgttttgttttttaacagatgggtatcttgctatgttgcccaggatggagtgcagtagctattcacaggtatgatcatagcacactgcagcctcaagctcctgggctcaagcgatccccctccctcagcctcccaagtatctggggttactggtgtgcaccaccgtgcttggctccaataattttttttctaattcaaaagttacagtttcactgtgaaaaaggccttgaacacactatttatgacatcttttgaggcagctccagtgccttgacttcaatcccagtttccggttgcagcatccttgttgtcttagcaacacagtgaactattctgaagcatagagtaacacgaaactgggagtccgagaaataatcatctctgcatcacattatgggagacgaagtctgctttatccattttatctttattcagttgtctatgattaattgattacagagtagtagattagaatagtgcatggatatacatttgtgttgaaaaaaggggaagttgatatatatcaatcttagttttcatttatcagtttgatattcatgcatttacactaaacgcttccatttatcccgaaaaagtatatgcaactgtattctgtaggttgatttttggaaaaggggagaagcacactgaattcataaggtcacatgtagtcttaaggtcttacttgcttacagccaattaaatttgaagcaccttatttatacttgttaaaggtaaaacccaaaagaacaagcagaggacattttaaggtcataaaaggtaaataagcttaccttcttaatgttttcattctctttttgtataaatcagaaaatgatctaaactgctgtaacaaagagaccccaaaatatgatggctcatgtaagataatttatttttttctcacatagcaatccagaagtggcttcatttcacaaggtattcaagggatataggagtcatctaccttgttagttctcttaatacccaagggtattgttctttccatggtcaaagctggctcaagacttcctagcctgtgaaaaaagaagaaggtggagcaagccatttcctttttaggaaattacagccatcacttctgcccaccgtccattcatgaatacttactatatagctatacctagcttcaagaaagcctgggacgtgtctctaactagatggacatgtgccctactaaaactccagggaaagggttctattactaaagctaaaaagaggggaatgaatactagagttaaagacaaaaatgatagcagccaatggcccatgccgtgataatctgctgagcaggcatgatggagatcccttgcccagcagaaagtgttccttggtgaaatcatgaatctgctatctaggagaaactcccttgtccattgtcttctgtggccactagtttgacctctaggaaagtcttgctcgtcagcttctgtggccccgtctgaaacttttgagggacatcgcagcttttgcagcccctgcttgctggtgcagacttttagacctagattgccttagagactgaaaaatatacgcttttataggccggggttttagttcatttgactgtaataaagacgtcaatgccgtttttaatgtttgactgctgacatctttcaagactcacctttcccttctcccttatgctgcacatctgggcaagctgatggaagcatgggtgcctcctcctttggccccagcaggaagttcaaatcacgcaagccctggcatgcatgcaggaagcttcaccccagcctcacactctaagacggataaaagccaaaccaattaagccgtttctcgaccctcctgggagcctgccctatctccctggaaagtctcagtatgtgagtaataaacctttttataccca

SEQ ID NO: 180460 - DNA, 633 bp, Artificial Sequence
  derived and/or modified sequence
atggctaagttgcgggtggcttatgagtacactgaggccgaagacaagtcaattcggctgggtttgttcctgatcatttcaggggtagtgtctctgttcattttcggcttttgttggctctcccctgccctacaagacctgcaggctaccgaggcaaactgtacagtgctctcagttcagcagattggcgaagtgttcgaatgcacttttacctgcggtgccgattgccggggaacttcccagtacccttgcgttcaggtgtacgtcaataatagcgaatctaatagcagagcgctgctccactccgatgaacaccaacttctcaccaatcctaaatgtagctatatccctccctgcaagcgcgaaaatcagaagaacctagagtctgtgatgaattggcagcagtattggaaggacgagatcggatctcagcccttcacctgttactttaaccaacaccaaagacccgatgacgtcctgttacatcggacccacgacgaaattgtgcttctgcattgcttcttatggcccctggtaacctttgtcgtgggtgttttgatagtcgtcttaactatctgtgcaaagagtctggccgttaaggctgaagccatgaagaagagaaagttttcttag

SEQ ID NO: 180461 - DNA, 633 bp, Artificial Sequence
  derived and/or modified sequence
atggccaagctgagagtggcctacgagtacaccgaggccgaggacaagagcatcagactgggcctgttcctgatcatcagcggcgtggtgagcctgttcatcttcggcttctgctggctgagccccgccctgcaggacctgcaggccaccgaggccaactgcaccgtgctgagcgtgcagcagatcggcgaggtgttcgagtgcaccttcacctgcggcgccgactgcagaggcaccagccagtacccctgcgtgcaggtgtacgtgaacaacagcgagagcaacagcagagccctgctgcacagcgacgagcaccagctgctgaccaaccccaagtgcagctacatccccccctgcaagagagagaaccagaagaacctggagagcgtgatgaactggcagcagtactggaaggacgagatcggcagccagcccttcacctgctacttcaaccagcaccagagacccgacgacgtgctgctgcacagaacccacgacgagatcgtgctgctgcactgcttcctgtggcccctggtgaccttcgtggtgggcgtgctgatcgtggtgctgaccatctgcgccaagagcctggccgtgaaggccgaggccatgaagaagagaaagttcagctag

SEQ ID NO: 180462 - protein, 336 aa, Artificial Sequence
  derived and/or modified sequence
MLRAGWLRGAAALALLLAARVVAAFEPITVGLAIGAASAITGYLSYNDIYCRFAECCREERPLNASALKLDLEEKLFGQHLATEVIFKALTGFRNNKNPKKPLTLSLHGWAGTGKNFVSQIVAENLHPKGLKSNFVHLFVSTLHFPHEQKIKLYQDQLQKWIRGNVSACANSVFIFDEMDKLHPGIIDAIKPFLDYYEQVDGVSYRKAIFIFLSNAGGDLITKTALDFWRAGRKREDIQLKDLEPVLSVGVFNNKHSGLWHSGLIDKNLIDYFIPFLPLEYRHVKMCVRAEMRARGSAIDEDIVTRVAEEMTFFPRDEKIYSDKGCKTVQSRLDFH

SEQ ID NO: 180463 - protein, 305 aa, Artificial Sequence
  derived and/or modified sequence
MLRAGWLRGAAALALLLAARVVAAFEPITVGLAIGAASAITGYLSYNDIYCRFAECCREERPLNASALKLDLEEKLFGQHLATEVIFKALTGFRNNKNPKKPLTLSLFVSTLHFPHEQKIKLYQDQLQKWIRGNVSACANSVFIFDEMDKLHPGIIDAIKPFLDYYEQVDGVSYRKAIFIFLSNAGGDLITKTALDFWRAGRKREDIQLKDLEPVLSVGVFNNKHSGLWHSGLIDKNLIDYFIPFLPLEYRHVKMCVRAEMRARGSAIDEDIVTRVAEEMTFFPRDEKIYSDKGCKTVQSRLDFH

SEQ ID NO: 180464 - DNA, 1011 bp, Artificial Sequence
  derived and/or modified sequence
atgctgagagccggctggctgagaggcgccgccgccctggccctgctgctggccgccagagtggtggccgccttcgagcccatcaccgtgggcctggccatcggcgccgccagcgccatcaccggctacctgagctacaacgacatctactgcagattcgccgagtgctgcagagaggagagacccctgaacgccagcgccctgaagctggacctggaggagaagctgttcggccagcacctggccaccgaggtgatcttcaaggccctgaccggcttcagaaacaacaagaaccccaagaagcccctgaccctgagcctgcacggctgggccggcaccggcaagaacttcgtgagccagatcgtggccgagaacctgcaccccaagggcctgaagagcaacttcgtgcacctgttcgtgagcaccctgcacttcccccacgagcagaagatcaagctgtaccaggaccagctgcagaagtggatcagaggcaacgtgagcgcctgcgccaacagcgtgttcatcttcgacgagatggacaagctgcaccccggcatcatcgacgccatcaagcccttcctggactactacgagcaggtggacggcgtgagctacagaaaggccatcttcatcttcctgagcaacgccggcggcgacctgatcaccaagaccgccctggacttctggagagccggcagaaagagagaggacatccagctgaaggacctggagcccgtgctgagcgtgggcgtgttcaacaacaagcacagcggcctgtggcacagcggcctgatcgacaagaacctgatcgactacttcatccccttcctgcccctggagtacagacacgtgaagatgtgcgtgagagccgagatgagagccagaggcagcgccatcgacgaggacatcgtgaccagagtggccgaggagatgaccttcttccccagagacgagaagatctacagcgacaagggctgcaagaccgtgcagagcagactggacttccactag

SEQ ID NO: 180465 - DNA, 918 bp, Artificial Sequence
  derived and/or modified sequence
atgctgagagccggctggctgagaggcgccgccgccctggccctgctgctggccgccagagtggtggccgccttcgagcccatcaccgtgggcctggccatcggcgccgccagcgccatcaccggctacctgagctacaacgacatctactgcagattcgccgagtgctgcagagaggagagacccctgaacgccagcgccctgaagctggacctggaggagaagctgttcggccagcacctggccaccgaggtgatcttcaaggccctgaccggcttcagaaacaacaagaaccccaagaagcccctgaccctgagcctgttcgtgagcaccctgcacttcccccacgagcagaagatcaagctgtaccaggaccagctgcagaagtggatcagaggcaacgtgagcgcctgcgccaacagcgtgttcatcttcgacgagatggacaagctgcaccccggcatcatcgacgccatcaagcccttcctggactactacgagcaggtggacggcgtgagctacagaaaggccatcttcatcttcctgagcaacgccggcggcgacctgatcaccaagaccgccctggacttctggagagccggcagaaagagagaggacatccagctgaaggacctggagcccgtgctgagcgtgggcgtgttcaacaacaagcacagcggcctgtggcacagcggcctgatcgacaagaacctgatcgactacttcatccccttcctgcccctggagtacagacacgtgaagatgtgcgtgagagccgagatgagagccagaggcagcgccatcgacgaggacatcgtgaccagagtggccgaggagatgaccttcttccccagagacgagaagatctacagcgacaagggctgcaagaccgtgcagagcagactggacttccactag

SEQ ID NO: 180466 - DNA, 1011 bp, Artificial Sequence
  derived and/or modified sequence
atgctgcgtgcaggatggctgcgcggagcggccgcactcgccctattactcgctgctagagttgtggccgctttcgaaccaattactgtaggactagccatcggagcggccagtgctattacaggttacttgagctacaatgacatttattgccggttcgcggaatgctgtagagaagagagacctctaaatgcctctgcactcaaactggacctcgaggaaaaactgtttgggcagcatctggcaactgaagtgatcttcaaggccctcacaggttttagaaataacaaaaaccccaaaaagccccttacactgagccttcacggctgggccggcactggcaaaaactttgtaagccagatcgttgctgaaaatctgcatcctaaagggctcaagagcaatttcgtgcacctatttgtgtccacccttcacttcccgcatgaacagaaaatcaagctgtatcaagaccagctgcaaaaatggatccgcggaaatgtgagtgcctgcgctaactccgtttttattttcgatgagatggacaagctacatccaggaatcattgacgctattaaacccttcctggactactacgagcaagtggacggcgtcagttatcgcaaggctatctttatcttcctttcaaatgcagggggcgacttaatcaccaaaactgctttggacttttggcgagccgggaggaagcgtgaggacatacagctgaaagacttggaaccagtgctgagcgtgggtgtgtttaacaacaagcacagcggcctgtggcactctgggctaattgacaaaaatctgatcgactactttatcccattcttgcctttagagtacaggcatgtaaagatgtgtgtgcgagcggaaatgagagcaaggggatccgctatcgacgaagatatcgtgacacgggtagcagaggagatgacattctttccccgcgacgaaaagatctattctgacaaaggatgcaagacagttcagtctcgactcgactttcactag

SEQ ID NO: 180467 - DNA, 918 bp, Artificial Sequence
  derived and/or modified sequence
atgctccgtgcgggatggctgaggggggctgcagctctcgccctgctgctcgccgctcgagtggtcgcagcgtttgaacctataaccgtggggttggcaattggcgccgcgtctgccatcacagggtatctcagctataacgacatttattgccgattcgccgaatgctgtagagaagagcgccccctgaacgctagcgccctgaaattggacctggaggaaaagttgtttggacagcacctagcaacagaagtgatttttaaggcactaactgggtttcgtaataacaaaaaccctaaaaagccacttacccttagcttgttcgtgtcgactcttcactttccccatgagcagaaaattaagctctaccaagatcagttgcagaaatggattagagggaacgtgagcgcttgcgccaattcagtgttcatcttcgacgagatggacaaactgcatcctggtatcatcgatgcaatcaaacctttccttgattattacgagcaggtagacggcgtgtcctataggaaggctattttcatcttcctcagcaatgccggcggtgatctgatcaccaagacggcactggacttttggagagcaggcaggaagcgtgaggacattcaattgaaagacctggaacctgtgctgtcggtgggggtgtttaacaataagcacagcgggctgtggcatagcgggttgatagacaagaatctgattgactatttcattcccttcctgccactcgagtataggcacgtgaagatgtgtgtccgcgccgagatgcgggcccgaggcagcgccattgacgaggatatcgtgacccgcgtcgccgaagagatgacctttttcccccgggacgaaaaaatctactcagacaaggggtgtaaaaccgtgcagtccaggctagatttccactag

SEQ ID NO: 180468 - DNA, 1011 bp, Artificial Sequence
  derived and/or modified sequence
atgctgcgggccggctggctgcggggagctgctgccctggccctgctgctggccgcccgggtggtggccgcctttgagcccatcaccgtgggcctggccatcggggccgccagcgccatcaccggctacctgagctacaatgacatctactgccgctttgctgagtgctgccgggaggagcggcccctgaatgccagcgccctgaagctggacctggaggagaagctgtttggccagcacctggccacagaggtgatcttcaaggccctgaccggcttcaggaacaacaagaaccccaagaagcccctgaccctgagcctgcacggctgggccggcaccgggaagaactttgtgtcccagatcgtggccgagaacctgcaccccaagggcctgaagagcaactttgtgcacctgtttgtgtccaccctgcacttcccccatgagcagaagatcaagctgtaccaggaccagctgcagaagtggatcagaggaaatgtgtctgcctgtgccaacagcgtcttcatctttgatgagatggacaagctgcaccctggcatcattgatgccatcaagcccttcctggactactatgagcaggtggatggagtgtcctacaggaaggccatcttcatcttcctgagcaatgctggaggagacctgatcaccaagacagccctggacttctggagggctggcaggaagcgggaggacatccagctgaaggacctggagcctgtgctgtctgtgggcgtcttcaacaacaagcacagcggcctgtggcacagcggcctgattgacaagaacctgattgactacttcatccccttcctgcccctggagtacagacatgtgaagatgtgtgtgcgggcagagatgagggcccggggcagcgccattgatgaagatattgtgaccagggtggccgaggagatgaccttcttccccagagatgagaagatctacagcgacaagggctgcaagacagtgcagagccggctggacttccactag

SEQ ID NO: 180469 - DNA, 918 bp, Artificial Sequence
  derived and/or modified sequence
atgctgcgggccggctggctgcggggagctgctgccctggccctgctgctggccgcccgggtggtggccgcctttgagcccatcaccgtgggcctggccatcggggccgccagcgccatcaccggctacctgagctacaatgacatctactgccgctttgctgagtgctgccgggaggagcggcccctgaatgccagcgccctgaagctggacctggaggagaagctgtttggccagcacctggccacagaggtgatcttcaaggccctgaccggcttcaggaacaacaagaaccccaagaagcccctgaccctgagcctgtttgtgtccaccctgcacttcccccatgagcagaagatcaagctgtaccaggaccagctgcagaagtggatcagaggaaatgtgtctgcctgtgccaacagcgtcttcatctttgatgagatggacaagctgcaccctggcatcattgatgccatcaagcccttcctggactactatgagcaggtggatggagtgtcctacaggaaggccatcttcatcttcctgagcaatgccggcggggacctgatcaccaagacagccctggacttctggagggctggcaggaagcgggaggacatccagctgaaggacctggagcctgtgctgtctgtgggcgtcttcaacaacaagcacagcggcctgtggcacagcggcctgattgacaagaacctgattgactacttcatccccttcctgcccctggagtaccgccacgtgaagatgtgtgtgcgggcagagatgagggcccggggcagcgccattgatgaggacatcgtgaccagggtggccgaggagatgaccttcttccccagagatgagaagatctacagcgacaagggctgcaagacagtgcagagccggctggacttccactag

SEQ ID NO: 180470 - DNA, 1011 bp, Artificial Sequence
  derived and/or modified sequence
atgctgcgggccggctggctgcggggcgccgccgccctggccctgcttctcgctgccagggtggtggctgcattcgagcctatcaccgtgggactcgccattggcgccgcctcggctattacgggctacttatcttacaacgatatctattgccgttttgcagaatgctgtagggaggagaggccactgaacgctagcgcgctgaaacttgacctggaagagaagctgttcggacaacacctggctactgaagtcatttttaaagctctgacaggattcaggaacaacaagaatcctaagaagccactgactctgtccctgcatggctgggctggaaccggaaagaatttcgtatcccaaatcgttgcagagaatctccaccctaaagggctgaaatctaattttgttcatctgttcgtaagtactctgcacttcccgcatgaacaaaagattaagctctaccaagatcaactgcagaagtggatccgcggtaatgtgagcgcctgcgccaacagcgtcttcatattcgatgagatggataaactccatcctggcattatcgacgctataaaaccatttctggattattacgagcaagtagacggcgtgagctatcgtaaggccattttcatatttttgagcaacgccggtggcgacctgatcaccaagacggctttggatttttggagagccggccggaagcgagaggatatccagctgaaagacctggaacccgtgctttctgttggtgtgtttaataataagcacagtggcctgtggcactctggcctcattgataaaaatctgatagactattttataccctttctccccttggagtatagacatgtgaagatgtgcgtgcgagctgaaatgagagccagaggtagtgctatcgatgaggacatagtgacaagggttgccgaggaaatgacatttttcccccgggatgagaagatctatagtgacaaaggttgcaagactgtccagtccagattggattttcattag

SEQ ID NO: 180471 - DNA, 918 bp, Artificial Sequence
  derived and/or modified sequence
atgctgcgggccggctggctgcggggcgccgccgccctggccctgctcctcgctgccagagtggtggcggcatttgaacctatcaccgtcggactggcgattggtgccgcaagcgcaatcaccggctacctctcgtacaacgatatatactgtagattcgcggagtgctgtcgggaagaacgtccattaaacgcatccgccctcaagctggacctggaggaaaagctcttcgggcagcatctggcgacagaagtcatcttcaaggcactgacaggcttcagaaataataaaaaccccaaaaagccgctgacccttagcttattcgtgagtactctgcactttccccacgagcagaagatcaaactttaccaggaccagttgcagaagtggattagggggaacgtctcagcatgtgcgaactcagtcttcatcttcgacgaaatggataagttgcatcccgggatcatcgatgcaatcaagccattccttgattactatgagcaggtggacggtgtgtcttatcgcaaagcgatctttatatttctttcgaatgctggcggggacctgatcactaaaaccgccctggacttttggagagcagggcggaaaagggaagacattcaactcaaagaccttgaacctgttctctctgtgggagtttttaataacaaacatagtgggctttggcacagcggactaatagacaaaaacttgattgattattttataccttttctccctcttgagtatcgtcacgtcaaaatgtgcgtgcgggctgagatgcgagccagaggaagcgctatcgatgaggatattgtgacaagggtcgccgaagaaatgaccttctttccacgagatgagaagatatatagcgacaaaggctgtaaaaccgtccagtccagattggatttccattag

SEQ ID NO: 180472 - DNA, 1011 bp, Artificial Sequence
  derived and/or modified sequence
atgttacgagccggatggctgagaggggcagcagctctggccctactgttagccgctagagtcgtggccgcattcgaacctattaccgtaggcctcgcaattggagcggcttcagctatcaccggttacctgagctataacgatatctactgccggtttgctgagtgctgcagagaggagaggccactgaacgcttctgctctgaaactcgatctggaagagaaactctttggccagcatttggctactgaagtaatcttcaaggctttgacaggcttcaggaacaacaaaaatcctaaaaaaccgcttaccctctctttacatgggtgggccggtacaggcaaaaatttcgtgagccagatcgttgccgagaacttgcacccaaaagggctcaaatcgaacttcgtgcacctgttcgtgagcacgctccatttccctcacgaacagaagatcaagctttatcaggaccagcttcagaaatggatccgcggaaacgttagcgcttgtgcaaatagtgtgtttatctttgacgagatggataagctgcaccccggaattatcgatgccatcaagcccttcttggactattacgaacaagttgacggtgtttcctacagaaaagcgatctttatcttcctctcaaatgcgggtggggacttgatcacgaagacggcccttgatttctggcgggctggcaggaaacgtgaggacattcagctcaaagacctcgaacctgtcctgtcagttggcgtgtttaacaataagcattcaggcctgtggcattcagggctgatcgataagaatctgattgactattttatcccgttcctgccactggagtatcggcacgtcaaaatgtgtgtcagggcagaaatgcgcgcacggggatccgccatcgatgaggacatcgtgacccgcgtagcagaagagatgacattctttcctagagacgagaagatatattcagacaagggctgcaagactgtccaatctagactagacttccactag

SEQ ID NO: 180473 - DNA, 918 bp, Artificial Sequence
  derived and/or modified sequence
atgctgcgagccggatggttgcggggagccgctgccttggccctgctgctagctgctcgcgttgtggccgcatttgaacctatcaccgtgggactggccatcggcgctgcatcggcaatcaccggctacttatcatacaacgatatctattgccgattcgccgaatgttgtagggaagaaagaccacttaacgctagtgccttgaagcttgatctggaggagaaactcttcggccagcacctggctacagaagtgatcttcaaagccctaacagggttccggaataataaaaacccaaagaagcccctaacgctgtcacttttcgtatctacactgcatttcccgcacgagcagaaaattaaactgtaccaggaccagctgcaaaaatggattcggggaaacgtatccgcgtgcgctaatagtgtgtttattttcgatgagatggacaaattgcaccctggcatcattgacgcgattaaaccatttctcgactactacgagcaggtggacggggtctcctataggaaagctatctttatatttttaagtaacgcagggggtgatttgatcaccaaaactgccctggacttctggagggcgggacggaagagagaagacatccaactgaaagacttagaaccggtgttatcagtcggcgtgttcaataataagcatagcggcctctggcactccgggctgatagataagaacttgattgactacttcattccttttctcccactggagtaccgccacgtgaaaatgtgtgtgagggccgaaatgcgagccaggggaagcgccatcgacgaggacattgtgacacgcgtcgccgaggaaatgacctttttcccccgtgacgaaaaaatttattccgataagggttgtaagaccgtccaatcccgcctggatttccattag

SEQ ID NO: 180474 - DNA, 2769 bp, Artificial Sequence
  derived and/or modified sequence
tcctgccgcttggccgcggggcgcctggctcagtggcttctgcgggcttcgaggagcgggatgttgcgggctgggtggctccggggcgcggcggcgctggcgctgctgctggcggcccgagtggtggcggcgttcgagcccatcaccgtgggcctagccatcggggccgcgtcggccatcaccggctacctgtcctacaatgacatctactgccgcttcgccgagtgctgccgcgaggagcggccgctcaacgcttcggctctcaagctggatttggaggagaagctgtttggacagcatctagccacggaagtgattttcaaggcgctgactggcttcaggaacaacaaaaatcccaagaaaccactgaccctttccttacacggctgggctggcacaggcaagaattttgtcagtcaaattgtggctgaaaatcttcacccaaaaggtctgaagagtaactttgtccacctgtttgtatcgactctgcacttccctcatgagcagaagataaaactgtaccaggaccagttacagaagtggatccgcggtaatgtgagtgcatgtgcgaactctgttttcatatttgacgagatggataaattgcaccccgggatcattgacgcaatcaagccgtttctagactactacgagcaggttgacggagtgtcttaccgcaaagccatcttcatctttctcagcaatgcaggcggggaccttataactaagacggctcttgacttttggcgggccggaagaaagagggaagacattcagctgaaggacctggaacctgtactgtctgtcggagtcttcaataataaacacagtggcctgtggcacagtggactgatcgacaaaaacctcattgattactttatccccttcctgcctttggagtacagacatgtgaaaatgtgtgtgagggccgagatgagggcccgtggttctgccatagatgaagacattgtcacaagagtggcagaggaaatgacgtttttccccagagacgagaaaatctactcagacaagggctgcaagactgtgcagtcgcggctggatttccactgagctcctatccagatggggtaggagacagctgggaggctccgcacgccagaggccttgcctttcagaagaaccctgaagaccgctttggggttttgcctgtttgcaccttagacttttgggtatagaatcttttttttgagaagaggtctcactccgtcatccaagctggagtgcagtggtgcaatcctcaactcactgcaacctccgctcccggtttgagtgattctcatgcctcagcctcccgagtagctgggattacaggcatgagccactgtgcccagctgggatatagaatctaagagttgattgtggaaaacacgtgaatctattgcgcgcatttgtcatttagcaagatggcagcagtccagctgttctttgcagctggagatgaacttttaaaaatccccttcacacttaatgtactgaccgagacagaagtacctgaaaacagctgtgcatggcaggcccggcaatagcttctgacccacagcacccgcgcctcagaagctacggtcacaactaaaggagtccagggacttgctgcaggctggggggcactgggtggttctcaccagcaggctgcggggcactgtgttctcattggccaaaaacatccttttgctctgtctcgttctttacacagagttcactgacttgaagtatactcagttaaaatcggggctggaggtgcagacggtgtctgaccggaggatgtggccgtgcccgccgagcactcttgatctgagctgacctgtgtgtgtgtgtgtgggggggtggggccttcacctaagacctctgcagcagacctggacagacaggcccctcccgcctgtccatcgctctagctgctaatacagccctggctgtggaatccttcaccgtctcagctggtatcagccccagcctgccttgtgccatatctcagcttggatctctgctagagtccccccaaccatatatcatagagttgaatcacaatgagaccgttggctttgaatttgagtcgttggttcccatggtgagatgcttgttaagactttatacttgggtcaatctctcactttattttgtagaaccatttgaaatcctaggatgtgcttgttctggaaggatgacatgggcccagactgaacaagtcagcttgatgatcttaaatgatggaagtataggacgttgcttattttaaaacaagggaaggacacaaaatggaatgactgcttagtcctttctcagatactcttaaaacaattttttattgttaaatttgtggtaatacatggtcacaaccgtggatcaaacaaggtcagtctaaagtggcaggtcctaggtgtgacctgataccaccaccctttgtggcagcaccgggctggactgccctgatccctgggacgtgagacttagcttccagccagtgtgaatcattgtatctgtctcataatcacagcacagctgcagacacaacaacgtgcagcattttttacataaaaatatggtagaattaatttatgacatggaaatgccttacgtggtatcacacttagtcttgaaaaaaacaccaaggtgacgtttaaaatttttagtacatatcctcaaattggagctaagttatacttcttttataaccttttgggcatctggtcgagagaagacaagattttctctatttacagtgaggcaataaatatgtttgccaccttt

SEQ ID NO: 180475 - DNA, 2631 bp, Artificial Sequence
  derived and/or modified sequence
gcttcgaggagcgggatgttgcgggctgggtggctccggggcgcggcggcgctggcgctgctgctggcggcccgagtggtggcggcgttcgagcccatcaccgtgggcctagccatcggggccgcgtcggccatcaccggctacctgtcctacaatgacatctactgccgcttcgccgagtgctgccgcgaggagcggccgctcaacgcttcggctctcaagctggatttggaggagaagctgtttggacagcatctagccacggaagtgattttcaaggcgctgactggcttcaggaacaacaaaaatcccaagaaaccactgaccctttccctgtttgtatcgactctgcacttccctcatgagcagaagataaaactgtaccaggaccagttacagaagtggatccgcggtaatgtgagtgcatgtgcgaactctgttttcatatttgacgagatggataaattgcaccccgggatcattgacgcaatcaagccgtttctagactactacgagcaggttgacggagtgtcttaccgcaaagccatcttcatctttctcagcaatgcaggcggggaccttataactaagacggctcttgacttttggcgggccggaagaaagagggaagacattcagctgaaggacctggaacctgtactgtctgtcggagtcttcaataataaacacagtggcctgtggcacagtggactgatcgacaaaaacctcattgattactttatccccttcctgcctttggagtacagacatgtgaaaatgtgtgtgagggccgagatgagggcccgtggttctgccatagatgaagacattgtcacaagagtggcagaggaaatgacgtttttccccagagacgagaaaatctactcagacaagggctgcaagactgtgcagtcgcggctggatttccactgagctcctatccagatggggtaggagacagctgggaggctccgcacgccagaggccttgcctttcagaagaaccctgaagaccgctttggggttttgcctgtttgcaccttagacttttgggtatagaatcttttttttgagaagaggtctcactccgtcatccaagctggagtgcagtggtgcaatcctcaactcactgcaacctccgctcccggtttgagtgattctcatgcctcagcctcccgagtagctgggattacaggcatgagccactgtgcccagctgggatatagaatctaagagttgattgtggaaaacacgtgaatctattgcgcgcatttgtcatttagcaagatggcagcagtccagctgttctttgcagctggagatgaacttttaaaaatccccttcacacttaatgtactgaccgagacagaagtacctgaaaacagctgtgcatggcaggcccggcaatagcttctgacccacagcacccgcgcctcagaagctacggtcacaactaaaggagtccagggacttgctgcaggctggggggcactgggtggttctcaccagcaggctgcggggcactgtgttctcattggccaaaaacatccttttgctctgtctcgttctttacacagagttcactgacttgaagtatactcagttaaaatcggggctggaggtgcagacggtgtctgaccggaggatgtggccgtgcccgccgagcactcttgatctgagctgacctgtgtgtgtgtgtgtgggggggtggggccttcacctaagacctctgcagcagacctggacagacaggcccctcccgcctgtccatcgctctagctgctaatacagccctggctgtggaatccttcaccgtctcagctggtatcagccccagcctgccttgtgccatatctcagcttggatctctgctagagtccccccaaccatatatcatagagttgaatcacaatgagaccgttggctttgaatttgagtcgttggttcccatggtgagatgcttgttaagactttatacttgggtcaatctctcactttattttgtagaaccatttgaaatcctaggatgtgcttgttctggaaggatgacatgggcccagactgaacaagtcagcttgatgatcttaaatgatggaagtataggacgttgcttattttaaaacaagggaaggacacaaaatggaatgactgcttagtcctttctcagatactcttaaaacaattttttattgttaaatttgtggtaatacatggtcacaaccgtggatcaaacaaggtcagtctaaagtggcaggtcctaggtgtgacctgataccaccaccctttgtggcagcaccgggctggactgccctgatccctgggacgtgagacttagcttccagccagtgtgaatcattgtatctgtctcataatcacagcacagctgcagacacaacaacgtgcagcattttttacataaaaatatggtagaattaatttatgacatggaaatgccttacgtggtatcacacttagtcttgaaaaaaacaccaaggtgacgtttaaaatttttagtacatatcctcaaattggagctaagttatacttcttttataaccttttgggcatctggtcgagagaagacaagattttctctatttacagtgaggcaataaatatgtttgccaccttt

SEQ ID NO: 180476 - protein, 180 aa, Artificial Sequence
  derived and/or modified sequence
MSVRVARVAWVRGLGASYRRGASSFPVPPPGAQGVAELLRDATGAEEEAPWAATERRMPGQCSVLLFPGQGSQVVGMGRGLLNYPRVRELYAAARRVLGYDLLELSLHGPQETLDRTVHCQPAIFVASLAAVEKLHHLQPSVIENCVAAAGFSVGEFAALVFAGAMEFAEGSTVSPEEFL

SEQ ID NO: 180477 - DNA, 543 bp, Artificial Sequence
  derived and/or modified sequence
atgagcgtgagagtggccagagtggcctgggtgagaggcctgggcgccagctacagaagaggcgccagcagcttccccgtgcccccccccggcgcccagggcgtggccgagctgctgagagacgccaccggcgccgaggaggaggccccctgggccgccaccgagagaagaatgcccggccagtgcagcgtgctgctgttccccggccagggcagccaggtggtgggcatgggcagaggcctgctgaactaccccagagtgagagagctgtacgccgccgccagaagagtgctgggctacgacctgctggagctgagcctgcacggcccccaggagaccctggacagaaccgtgcactgccagcccgccatcttcgtggccagcctggccgccgtggagaagctgcaccacctgcagcccagcgtgatcgagaactgcgtggccgccgccggcttcagcgtgggcgagttcgccgccctggtgttcgccggcgccatggagttcgccgagggcagcaccgtgagccccgaggagttcctgtag

SEQ ID NO: 180478 - DNA, 543 bp, Artificial Sequence
  derived and/or modified sequence
atgtcagttcgcgttgctagagtggcctgggtcaggggcctgggggcaagctaccgcagaggagccagtagcttccctgtcccccctccgggcgcacaaggcgtggccgagctgctgcgtgacgcaacaggggccgaagaggaggcaccttgggctgcaacggaaaggcgtatgccaggtcagtgcagcgtactgctgtttcccgggcagggatcccaagtcgtcggcatgggaaggggcctgcttaattatcccagagtacgcgagctttatgccgctgccaggcgggtgttgggctacgacttactggagctcagtcttcacggaccccaggagactttggatcggacagtccactgtcagccagcgatcttcgtcgcaagtctggctgcagtcgagaaattgcaccacctccagccatctgttatcgaaaactgcgtcgccgccgccggattttccgtcggggaattcgctgcattggtcttcgccggagccatggagtttgctgagggttctacggtgagtcctgaagaatttctgtag

SEQ ID NO: 180479 - DNA, 543 bp, Artificial Sequence
  derived and/or modified sequence
atgtctgtgcgggtggcccgggtggcctgggtgcggggcctgggcgccagctacagaagaggagccagcagcttccctgtgcccccacctggggcccagggcgtggccgagctgctgagagatgccactggagctgaggaggaggccccctgggccgccacagagaggaggatgcctggccagtgcagcgtgctgctcttccctggccagggcagccaggtggtgggcatgggccggggcctgctgaactacccccgggtgcgggagctgtatgctgctgccaggagagtgctgggctatgacctgctggagctgagcctgcacggcccccaggagaccctggacagaacagtgcactgccagcctgccatctttgtggccagcctggccgctgtggagaagctgcaccacctgcagcccagcgtgattgagaactgtgtggccgccgccggcttctctgtgggggagtttgctgccctggtgtttgctggggccatggagtttgctgagggcagcacagtgtccccagaggagttcctgtag

SEQ ID NO: 180480 - DNA, 1134 bp, Artificial Sequence
  derived and/or modified sequence
gggcaggtgtccgaccatgagcgtccgggtcgcacgggtagcgtgggtcaggggcttgggcgccagctaccgccgcggcgcctcgagcttcccggtgcctccgccgggcgcccagggtgtagcggagctgctgcgagatgcgaccggggcggaggaggaggcgccctgggcggcgacggagcggcgaatgccgggccagtgctccgtgctgctcttcccgggccagggcagccaggtggtgggcatgggccgcggtctgctcaactacccgcgcgtccgcgaactctacgccgccgcccgccgcgtgctgggctacgacctgctggaactgagcctgcacgggccgcaggagaccctggaccgcaccgtgcactgtcagcccgcgatcttcgtggcatcgctggccgctgtcgagaaactacatcacctgcagccctcggtgattgagaactgtgttgctgctgctggattcagtgtgggagagtttgcagccctagtgtttgccggagccatggaatttgctgaaggctctacggtttctccagaagaattcctctaagtttcatttcagacgcaccaggatgttgccggttagtggcgcattccacacccgcctcatggagccagccgtggagcccctgacgcaagctttaaaggcagtcgacattaagaagcctctggtttctgtctactccaacgtccacgcgcatagatacaggcatcccgggcacatccacaagctgctggcccagcagctggtctccccagtgaagtgggagcagacgatgcatgccatatacgaaaggaaaaagggcagggggttcccccaaactttcgaagtaggccctggcaggcagctgggagccatcctgaagagctgtaacatgcaggcctggaagtcctacagcgccgtggatgtgctgcagaccctcgaacatgtggacctggaccctcaggagcccccgagatgactgcagggggctcaaatgcgatgaccccctctgtcctcctgaggagaggctgtaggctgtgcctgtcgccccctaccttcctaatggctcctcctctgaggagtgaaagggatttgtttgcaacgtgctttgaaggccacataaaaagccctaaaaatgagta

SEQ ID NO: 180481 - DNA, 543 bp, Artificial Sequence
  derived and/or modified sequence
atgagcgtgcgggtggcccgggtggcctgggtgcggggcctgggcgcctcctatcggagaggagctagtagctttccagtgcctccacccggtgcacagggagttgccgagcttctacgggacgccaccggcgccgaagaggaggcaccctgggccgccactgaaaggagaatgccgggtcagtgttctgtcctcctgtttccgggccagggcagtcaggtcgtaggaatgggccgagggctgctgaactatccacgtgtcagggagctttacgccgctgccaggagagtcctcggctacgacctcctcgaactgtcccttcacgggccacaggaaacccttgaccgcactgtccactgccagccagcaatcttcgtggcctccttggccgccgttgagaagcttcatcacttgcagccctccgtgatcgagaactgtgtcgcagctgcaggcttttccgtgggagaattcgctgccctggtgttcgccggcgctatggagtttgccgaaggctctaccgtctcacccgaggagtttctgtag

SEQ ID NO: 180482 - DNA, 543 bp, Artificial Sequence
  derived and/or modified sequence
atgagcgttagagtcgctcgagtggcttgggtccggggactcggagccagttaccgaaggggcgctagcagcttcccggtgcccccacccggtgctcagggtgtggccgaattgctgcgcgatgcaactggggctgaagaggaggccccttgggccgcaaccgagcgtagaatgcctggacagtgttccgtgctgctcttcccagggcaaggttcccaggttgtgggtatgggcagagggctcctgaactacccccgtgtcagagaactctatgcggcagcaagaagagtcctcggatacgatctgctggaactctccctccacgggcctcaggaaacactcgaccgcaccgtgcattgccagccggcaattttcgtggcctctcttgccgctgttgaaaagctccaccaccttcagccctcggtaatcgaaaactgcgtggccgctgccggtttttcagttggggagttcgctgctctggtgtttgcaggtgccatggaattcgctgagggcagcacggtgagtcctgaagagtttctttag

SEQ ID NO: 180483 - protein, 190 aa, Artificial Sequence
  derived and/or modified sequence
MNPQIRNPMKAMYPGTFYFQFKNLWEANDRNETWLCFTVEGIKRRSVVSWKTGVFRNQVDSETHCHAERCFLSWFCDDILSPNTKYQVTWYTSWSPCPDCAGEVAEFLARHSNVNLTIFTARLYYFQYPCYQEGLRSLSQEGVAVEIMDYEDFKYCWENFVYNDNEPFKPWKGLKTNFRLLKRRLRESLQ

SEQ ID NO: 180484 - DNA, 573 bp, Artificial Sequence
  derived and/or modified sequence
atgaacccacagatcaggaatccgatgaaagccatgtatcctggtactttttacttccaatttaaaaacttgtgggaggctaacgaccgaaatgaaacgtggttgtgtttcacagttgaggggatcaagcgcagatctgtggtgtcctggaagacgggcgtgttccgcaaccaggtggacagtgaaacccactgccacgcggagcggtgtttcctctcctggttttgcgacgatatcctgagtcccaacacaaagtaccaagtgacttggtacactagctggagcccatgcccagattgtgcaggggaggttgctgagttcctcgcaaggcactctaacgttaacctgacaatcttcactgccagactgtactacttccagtatccatgctaccaggagggccttaggagtttgtctcaggaaggagtggccgtggagataatggactacgaggatttcaaatattgctgggagaattttgtgtataacgacaacgagccttttaagccttggaaaggtctgaagactaactttagattactgaagcggaggcttcgggaaagcctgcagtag

SEQ ID NO: 180485 - DNA, 573 bp, Artificial Sequence
  derived and/or modified sequence
atgaacccccagatccggaaccccatgaaggccatgtacccaggcaccttctacttccagttcaagaacctgtgggaggccaatgacagaaatgagacctggctgtgcttcaccgtggagggcatcaagagaagatctgtggtgtcctggaagacaggagtcttcaggaaccaggtggacagcgagacccactgccacgccgagcgctgcttcctgtcctggttctgtgatgacatcctgagccccaacaccaagtaccaggtgacctggtacacctcctggagcccctgcccagactgtgccggggaggtggccgagttcctggcccggcacagcaatgtgaacctgaccatcttcaccgcccggctgtactacttccagtacccctgctaccaggagggcctgcggagcctgagccaggagggcgtggccgtggagatcatggactatgaggacttcaagtactgctgggagaactttgtgtacaatgacaatgagcccttcaagccctggaagggcctgaagaccaacttccggctgctgaagaggcggctgcgggagagcctgcagtag

SEQ ID NO: 180486 - DNA, 573 bp, Artificial Sequence
  derived and/or modified sequence
atgaacccccagatccggaaccccatgaaggccatgtaccccggcactttctactttcagtttaagaatctgtgggaggcgaatgatcgtaatgagacatggctctgctttaccgttgaggggataaaacggcgttccgtagtgtcgtggaaaacaggcgtgttcagaaaccaggtggatagcgaaacccattgccacgctgaaaggtgcttcctgagctggttctgcgatgacattctgtccccgaacaccaaatatcaggtaacctggtatacttcttggagtccatgccccgattgcgcgggcgaagttgctgagttcctggcacgccattctaatgtaaaccttaccatctttacagcccgcttatactactttcagtatccgtgttaccaggagggccttagatccctgtcccaggaaggggttgctgtggagattatggactacgaagactttaaatattgttgggagaatttcgtgtataatgataacgagccatttaaaccttggaagggattaaagaccaatttccggttgctcaagagacggttacgtgagtctctgcaatag

SEQ ID NO: 180487 - DNA, 573 bp, Artificial Sequence
  derived and/or modified sequence
atgaatccacagatcagaaaccccatgaaggccatgtaccctggcaccttttattttcagtttaagaatctttgggaggccaatgacaggaacgaaacctggctctgtttcaccgttgaaggtattaagagacggtctgtggtgagttggaagacaggggttttccgtaaccaggttgattccgagactcactgtcacgccgagagatgtttcctcagttggttttgcgatgacattctgtctcccaacacaaagtaccaggttacctggtatactagttggagtccatgccccgactgtgccggagaagtggcagaatttcttgccaggcattcaaatgttaacctgacaatcttcaccgccagattgtactattttcagtatccatgttatcaggagggcctgagaagcttgagccaggaaggcgtggcggtggaaatcatggactatgaagactttaaatactgttgggaaaatttcgtgtacaacgacaacgagccatttaagccttggaaaggcctgaagaccaacttccgcctgctgaaaagacgtctccgagagtctcttcagtag

SEQ ID NO: 180488 - DNA, 1309 bp, Artificial Sequence
  derived and/or modified sequence
agataaagacagagcagcctgtctttatcggaggttcctctgccagtaggaggggcccggagaaaaccagaaagagggccagagccagagaaacatgaagcaccccggggcctcccacaccagtgcctgagcaggaatggggaggggccatgattcacaaggccctgggaggtcactttaaagagggctgctcaactgcaaggacgctgtaagcaggaagagaagccacagcgcttcagaaaagagtgggacagggacaagcatatctaagaggctgaacatgaatccacagatcagaaacccgatgaaggcaatgtatccaggcacattctacttccaatttaaaaacctatgggaagccaacgatcggaacgaaacttggctgtgcttcaccgtggaaggtataaagcgccgctcagttgtctcctggaagacgggcgtcttccgaaaccaggtggattctgagacccattgtcatgcagaaaggtgcttcctctcttggttctgcgacgacatactgtctcctaacacaaagtaccaggtcacctggtacacatcttggagcccttgcccagactgtgcaggggaggtggccgagttcctggccaggcacagcaacgtgaatctcaccatcttcaccgcccgcctctactacttccagtatccatgttaccaggaggggctccgcagcctgagtcaggaaggggtcgctgtggagatcatggactatgaagattttaaatattgttgggaaaactttgtgtacaatgataatgagccattcaagccttggaagggattaaaaaccaactttcgacttctgaaaagaaggctacgggagagtctccagtgaggggtctccctgggcctcatggtctgtctcctctagcctcctgctcatgctgcacgggcctcccctccaccctggacccgctctgtttctgcctggtcatcctgagcccctcctggcctcagggccattccacagtgctcccctgcctcaccgcttcctcctcgctcttccagactcttcctgcagaggctcctttctgcctccatggctatccatccacccccacagaccccgttcctccagcctgcgtgcccctaacctggcttttcccatctccccagcataaccaaatcttactaaactcatcctaggctgggcatggtgactcacgcctgtaatcccccagcaatttgggaggcaaaggtgggagaatcgcgtgagcccaggagttccagaccaggctgggtcacatgacaaagccccatctctacaaaaaaaaaaaaaaaaaaaaaaaaa

SEQ ID NO: 180489 - DNA, 573 bp, Artificial Sequence
  derived and/or modified sequence
atgaacccccagatcagaaaccccatgaaggccatgtaccccggcaccttctacttccagttcaagaacctgtgggaggccaacgacagaaacgagacctggctgtgcttcaccgtggagggcatcaagagaagaagcgtggtgagctggaagaccggcgtgttcagaaaccaggtggacagcgagacccactgccacgccgagagatgcttcctgagctggttctgcgacgacatcctgagccccaacaccaagtaccaggtgacctggtacaccagctggagcccctgccccgactgcgccggcgaggtggccgagttcctggccagacacagcaacgtgaacctgaccatcttcaccgccagactgtactacttccagtacccctgctaccaggagggcctgagaagcctgagccaggagggcgtggccgtggagatcatggactacgaggacttcaagtactgctgggagaacttcgtgtacaacgacaacgagcccttcaagccctggaagggcctgaagaccaacttcagactgctgaagagaagactgagagagagcctgcagtag

SEQ ID NO: 180490 - protein, 79 aa, Artificial Sequence
  derived and/or modified sequence
AFPPPNVPGPRFPPPNVPGPRFPPPNFPGPRFPPPNFPGPRFPPPNFPGPPFPPPIFPGPWFPPPPPFRPPPFGPPRFP

SEQ ID NO: 180491 - protein, 99 aa, Artificial Sequence
  derived and/or modified sequence
RRFPWWWPFLRRPRLRRQAFPPPNVPGPRFPPPNVPGPRFPPPNFPGPRFPPPNFPGPRFPPPNFPPPFPPPIFPGPWFPPPPPFRPPPFGPPRFPGRR

SEQ ID NO: 180492 - protein, 79 aa, Artificial Sequence
  derived and/or modified sequence
AFPPPNVPGPRFPPPNFPGPRFPPPNFPGPRFPPPNFPGPRFPPPNFPGPPFPPPIFPGPWFPPPPPFRPPPFGPPRFP

SEQ ID NO: 180493 - protein, 422 aa, Artificial Sequence
  derived and/or modified sequence
TKVWNSNGLGIRIVGGKEIPGHSGEIGAYIAKILPGGSAEQTGKLMEGMQVLEWNGIPLTSKTYEEVQSIISQQSGEAEICVRLDLNMLSDSENSQHLELHEPPKAVDKAKSPGVDPKQLAAELQKVSLQQSPLVLSSVVEKGSHVHSGPTSAGSSSVPSPGQPGSPSVSKKKHGSSKPTDGTKVVSHPITGEIQLQINYDLGNLIIHILQARNLVPRDNNGYSDPFVKVYLLPGRGAEYKRRTKHVQKSLNPEWNQTVIYKSISMEQLKKKTLEVTVWDYDRFSSNDFLGEVLIDLSSTSHLDNTPRWYPLKEQTESIDHGKSHSSQSSQQSPKPSVIKSRSHGIFPDPSKDMQVPTIEKSHSSPGSSKSSSEGHLRSHGPSRSQSKTSVTQTHLEDAGAAIAAAEAAVQQLRIQPSKRRK

SEQ ID NO: 180494 - protein, 4935 aa, Artificial Sequence
  derived and/or modified sequence
MGNEASLEGEGLPEGLAAAAAAGGGASGAGSPSHTAIPAGMEADLSQLSEEERRQIAAVMSRAQGLPKGSVPPAAAESPSMHRKQELDSSHPPKQSGRPPDPGRPAQPGLSKSRTTDTFRSEQKLPGRSPSTISLKESKSRTDLKEEHKSSMMPGFLSEVNALSAVSSVVNKFNPFDLISDSEASQEETTKKQKVVQKEQGKPEGIIKPPLQQQPPKPIPKQQGPGRDPLQQDGTPKSISSQQPEKIKSQPPGTGKPIQGPTQTPQTDHAKLPLQRDASRPQTKQADIVRGESVKPSLPSPSKPPIQQPTPGKPPAQQPGHEKSQPGPAKPPAQPSGLTKPLAQQPGTVKPPVQPPGTTKPPAQPLGPAKPPAQQTGSEKPSSEQPGPKALAQPPGVGKTPAQQPGPAKPPTQQVGTPKPLAQQPGLQSPAKAPGPTKTPVQQPGPGKIPAQQAGPGKTSAQQTGPTKPPSQLPGPAKPPPQQPGPAKPPPQQPGSAKPPSQQPGSTKPPPQQPGPAKPSPQQPGSTKPPSQQPGSAKPSAQQPSPAKPSAQQSTKPVSQTGSGKPLQPPTVSPSAKQPPSQGLPKTICPLCNTTELLLHVPEKANFNTCTECQTTVCSLCGFNPNPHLTEVKEWLCLNCQMKRALGGDLAPVPSSPQPKLKTAPVTTTSAVSKSSPQPQQTSPKKDAAPKQDLSKAPEPKKPPPLVKQPTLHGSPSAKAKQPPEADSLSKPAPPKEPSVPSEQDKAPVADDKPKQPKMVKPTTDLVSSSSATTKPDIPSSKVQSQAEEKTTPPLKTDSAKPSQSFPPTGEKVSPFDSKAIPRPASDSKIISHPGPSSESKGQKQVDPVQKKEEPKKAQTKMSPKPDAKPMPKGSPTPPGPRPTAGQTVPTPQQSPKPQEQSRRFSLNLGSITDAPKSQPTTPQETVTGKLFGFGASIFSQASNLISTAGQPGPHSQSGPGAPMKQAPAPSQPPTSQGPPKSTGQAPPAPAKSIPVKKETKAPAAEKLEPKAEQAPTVKRTETEKKPPPIKDSKSLTAEPQKAVLPTKLEKSPKPESTCPLCKTELNIGSKDPPNFNTCTECKNQVCNLCGFNPTPHLTEIQEWLCLNCQTQRAISGQLGDIRKMPPAPSGPKASPMPVPTESSSQKTAVPPQVKLVKKQEQEVKTEAEKVILEKVKETLSMEKIPPMVTTDQKQEESKLEKDKASALQEKKPLPEEKKLIPEEEKIRSEEKKPLLEEKKPTPEDKKLLPEAKTSAPEEQKHDLLKSQVQIAEEKLEGRVAPKTVQEGKQPQTKMEGLPSGTPQSLPKEDDKTTKTIKEQPQPPCTAKPDQVEPGKEKTEKEDDKSDTSSSQQPKSPQGLSDTGYSSDGISSSLGEIPSLIPTDEKDILKGLKKDSFSQESSPSSPSDLAKLESTVLSILEAQASTLADEKSEKKTQPHEVSPEQPKDQEKTQSLSETLEITISEEEIKESQEERKDTFKKDSQQDIPSSKDHKEKSEFVDDITTRREPYDSVEESSESENSPVPQRKRRTSVGSSSSDEYKQEDSQGSGEEEDFIRKQIIEMSADEDASGSEDDEFIRNQLKEISSSTESQKKEETKGKGKITAGKHRRLTRKSSTSIDEDAGRRHSWHDEDDEAFDESPELKYRETKSQESEELVVTGGGGLRRFKTIELNSTIADKYSAESSQKKTSLYFDEEPELEMESLTDSPEDRSRGEGSSSLHASSFTPGTSPTSVSSLDEDSDSSPSHKKGESKQQRKARHRPHGPLLPTIEDSSEEEELREEEELLKEQEKQREIEQQQRKSSSKKSKKDKDELRAQRRRERPKTPPSNLSPIEDASPTEELRQAAEMEELHRSSCSEYSPSIESDPEGFEISPEKIIEVQKVYKLPTAVSLYSPTDEQSIMQKEGSQKALKSAEEMYEEMMHKTHKYKAFPAANERDEVFEKEPLYGGMLIEDYIYESLVEDTYNGSVDGSLLTRQEEENGFMQQKGREQKIRLSEQIYEDPMQKITDLQKEFYELESLHSVVPQEDIVSSSFIIPESHEIVDLGTMVTSTEEERKLLDADAAYEELMKRQQMQLTPGSSPTQAPIGEDMTESTMDFDRMPDASLTSSVLSGASLTDSTSSATLSIPDVKITQHFSTEEIEDEYVTDYTREIQEIIAHESLILTYSEPSESATSVPPSDTPSLTSSVSSVCTTDSSSPITTLDSITTVYTEPVDMITKFEDSEEISSSTYFPGSIIDYPEEISVSLDRTAPPDGRASADHIVISLSDMASSIIESVVPKPEGPVADTVSTDLLISEKDPVKKAKKETGNGIILEVLEAYRDKKELEAERTKSSLSETVFDHPPSSVIALPMKEQLSTTYFTSGETFGQEKPASQLPSGSPSVSSLPAKPRPFFRSSSLDISAQPPPPPPPPPPPPPPPPPPPPPPLPPPTSPKPTILPKKKLTVASPVTTATPLFDAVTTLETTAVLRSNGLPVTRICTTAPPPVPPKPSSIPSGLVFTHRPEPSKPPIAPKPVIPQLPTTTQKPTDIHPKPTGLSLTSSMTLNLVTSADYKLPSPTSPLSPHSNKSSPRFSKSLTETYVVITLPSEPGTPTDSSASQAITSWPLGSPSKDLVSVEPVFSVVPPVTAVEIPISSEQTFYISGALQTFSATPVTAPSSFQAAPTSVTQFLTTEVSKTEVSATRSTAPSVGLSSISITIPPEPLALDNIHLEKPQYKEDGKLQLVGDVIDLRTVPKVEVKTTDKCIDLSASTMDVKRQITANEVYGKQISAVQPSIINLSVTSSIVTPVSLATETVTFVTCTASASYTTGTESLVGAEHAMTTPLQLTTSKHAEPPYRIPSDQVFPIAREEAPINLSLGTPAHAVTLAITKPVTVPPVGVTNGWTDSTVSQGITDGEVVDLSTTKSHRTVVTMDESTSSVMTKIIEDEKPVDLTAGRRAVCCDVVYKLPFGRSCTAQQPATTLPEDRFGYRDDHYQYDRSGPYGYRGIGGMKPSMSDTNLAEAGHFFYKSKNAFDYSEGTDTAVDLTSGRVTTGEVMDYSSKTTGPYPETRQVISGAGISTPQYSTARMTPPPGPQYCVGSVLRSSNGVVYSSVATPTPSTFAITTQPGSIFSTTVRDLSGIHTADAVTSLPAMHHSQPMPRSYFITTGASETDIAVTGIDISASLQTITMESLTAETIDSVPTLTTASEVFPEVVGDESALLIVPEEDKQQQQLDLERELLELEKIKQQRFAEELEWERQEIQRFREQEKIMVQKKLEELQSMKQHLLFQQEEERQAQFMMRQETLAQQQLQLEQIQQLQQQLHQQLEEQKIRQIYQYNYDPSGTASPQTTTEQAILEGQYAALEGSQFWATEDATTTASAVVAIEIPQSQGWYTVQSDGVTQYIAPPGILSTVSEIPLTDVVVKEEKQPKKRSSGAKVRGQYDDMGENMTDDPRSFKKIVDSGVQTDDEDATDRSYVSRRRRTKKSVDTSVQTDDEDQDEWDMPTRSRRKARVGKYGDSMTEADKTKPLSKVSSIAVQTVAEISVQTEPVGTIRTPSIRARVDAKVEIIKHISAPEKTYKGGSLGCQTEADSDTQSPQYLSATSPPKDKKRPTPLEIGYSSHLRADSTVQLAPSPPKSPKVLYSPISPLSPGKALESAFVPYEKPLPDDISPQKVLHPDMAKVPPASPKTAKMMQRSMSDPKPLSPTADESSRAPFQYTEGYTTKGSQTMTSSGAQKKVKRTLPNPPPEEISTGTQSTFSTMGTVSRRRICRTNTMARAKILQDIDRELDLVERESAKLRKKQAELDEEEKEIDAKLRYLEMGINRRKEALLKEREKRERAYLQGVAEDRDYMSDSEVSSTRPTRIESQHGIERPRTAPQTEFSQFIPPQTQTESQLVPPTSPYTQYQYSSPALPTQAPTSYTQQSHFEQQTLYHQQVSPYQTQPTFQAVATMSFTPQVQPTPTPQPSYQLPSQMMVIQQKPRQTTLYLEPKITSNYEVIRNQPLMIAPVSTDNTFAVSHLGSKYNSLDLRIGLEERSSMASSPISSISADSFYADIDHHTPRNYVLIDDIGEITKGTAALSTAFSLHEKDLSKTDRLLRTTETRRSQEVTDFLAPLQSSSRLHSYVKAEEDPMEDPYELKLLKHQIKQEFRRGTESLDHLAGLSHYYHADTSYRHFPKSEKYSISRLTLEKQAAKQLPAAILYQKQSKHKKSLIDPKMSKFSPIQESRDLEPDYSSYMTSSTSSIGGISSRARLLQDDITFGLRKNITDQQKFMGSSLGTGLGTLGNTIRSALQDEADKPYSSGSRSRPSSRPSSVYGLDLSIKRDSSSSSLRLKAQEAEALDVSFSHASSSARTKPTSLPISQSRGRIPIVAQNSEEESPLSPVGQPMGMARAAAGPLPPISADTRDQFGSSHSLPEVQQHMREESRTRGYDRDIAFIMDDFQHAMSDSEAYHLRREETDWFDKPRESRLENGHGLDRKLPERLVHSRPLSQHQEQIIQMNGKTMHYIFPHARIKITRDSKDHTVSGNGLGIRIVGGKEIPGHSGEIGAYIAKILPGGSAEQTGKLMEGMQVLEWNGIPLTSKTYEEVQSIISQQSGEAEICVRLDLNMLSDSENSQHLELHEPPKAVDKAKSPGVDPKQLAAELQKVSLQQSPLVLSSVVEKGSHVHSGPTSAGSSSVPSPGQPGSPSVSKKKHGSSKPTDGTKVVSHPITGEIQLQINYDLGNLIIHILQARNLVPRDNNGYSDPFVKVYLLPGRGQVMVVQNASAEYKRRTKHVQKSLNPEWNQTVIYKSISMEQLKKKTLEVTVWDYDRFSSNDFLGEVLIDLSSTSHLDNTPRWYPLKEQTESIDHGKSHSSQSSQQSPKPSVIKSRSHGIFPDPSKDMQVPTIEKSHSSPGSSKSSSEGHLRSHGPSRSQSKTSVTQTHLEDAGAAIAAAEAAVQQLRIQPSKRRK

SEQ ID NO: 180495 - DNA, 381 bp, Artificial Sequence
  derived and/or modified sequence
atgatcagcttccacgtgatcttcctgagcctgggcagaggcaagctgttcctgcccgtgaacttctgcttcctgaagctgaagaacagccaggtgagaatccccaaggacttcacctgcaacctgcacgtgctgttcagaaccgtgcagggcgaggacagaaacaccatgttcagaggccactggagcatctacagcagaaacttccccctggccgtggtgcccgcctacgtgaccgaggacggcaagaacaccagccacagagccagcggccagttctgcaacgccctgagccagggcgagatccccagcagcctgcagctggtgaacagctacgccctggagcccagaaccgacatgccctgcaacttcctgacctag

SEQ ID NO: 180496 - DNA, 630 bp, Artificial Sequence
  derived and/or modified sequence
atgctgagcagccagctgtgctgcgtgcacagcctgcccccaacagccaacccagctgccctgtgcagcctggcccagcagatgttcaccaacatccgcagcccctgcagcggcccccagggcagccctggcctgcccaggaggacccacatccacctgtggccccacagcgcccacatgtacttcctggtgaccagcagcctgctgcccttccccctcatccagcccggctgcagcaggacccgcttcaagaccctgtgcagcctgcggcacaccagcgcccccacagaggagggccacggccctgtgcggcggccctgtggcatgcactgcctgagccacctgccccacccccggggccggccccagggccaccccacccacatgaggcctgccctgcagcaggccctgctgagccaccccagcctgctgctgccctggaggagcagcccagattctgctgtgcaggtgggccccagcatgatcctgcggcgcatccccatggccggccacctgtgcttcccccactggccccagctgctggacagccgggactgctgcacctacacctgcatcaacacccctgtgctgaacagccacatggtgcaggagggcgtgtgtggccagtag

SEQ ID NO: 180497 - DNA, 1269 bp, Artificial Sequence
  derived and/or modified sequence
actaaggtttggaactctaacggattgggaatccggattgtgggagggaaagaaattcctgggcactctggtgagatcggagcctatatcgcaaagatccttcccggcgggtctgccgagcagaccggtaaactcatggagggaatgcaggtgctggaatggaacggaatccctctcaccagtaaaacctacgaggaggtgcagtccattatcagccagcagtccggggaggcggagatctgcgtgcgcctggacctgaacatgctgagcgacagcgaaaattcccagcacctggaactccatgagcctccaaaggcagtggacaaggctaaatccccaggtgtagaccccaaacagcttgcggctgagcttcagaaagtcagccttcagcagtctcccctggtcttaagctccgtggtagagaaaggaagtcatgtgcacagcggtcctacatcggccggttcctcaagcgtgccaagccctggacagccagggagcccctccgtatcaaagaagaagcatggaagctcaaagccaactgatgggactaaggttgtgtcacatcccattacaggcgaaatacaactgcagatcaattatgatttaggtaacctcattatccacatcttgcaagcgagaaacctcgtgcccagagacaataatggatactctgacccattcgtcaaggtctatctgctgccaggacgcggcgctgaatataaaagacggaccaagcacgttcaaaagagtttaaatccagagtggaaccagacagtcatctataaaagtatctcaatggaacaactcaagaagaagaccctcgaagttactgtctgggactacgatagattcagttcaaacgattttctgggcgaggtccttattgatctgagttcaaccagccacctggacaacaccccccggtggtatcctctgaaggaacagacagaaagcatcgaccatggcaagagtcattccagccagtcgagtcagcaatccccaaaaccctccgtgatcaagagtagaagtcatgggatttttcctgatccctctaaggatatgcaggtccctaccatcgagaaatcccattcttcacccggctcaagcaagtccagttcggagggtcacctgaggtcacacggcccttccagatcacagagtaagacttcagtcactcagacccacctggaggatgctggggcagctatcgccgcagctgaggccgctgtgcagcagctacgcattcaaccaagcaaacgcagaaagtag

SEQ ID NO: 180498 - DNA, 14808 bp, Artificial Sequence
  derived and/or modified sequence
atggggaacgaagccagtctcgagggcgaaggcctcccggagggactggccgccgcagcagcagcagggggcggcgcatccggggctggcagccccagccacactgcgattccggccggtatggaggccgatctctcacagctgtccgaagaagaacgccggcagattgcggctgtcatgtccagggcccaaggactacccaaggggagtgtgcctccagccgctgctgagtccccttctatgcatcggaagcaggagcttgattcgtcccacccacctaaacaatcaggcagaccccccgaccccggcagaccggctcaaccgggactgtctaaatctagaactaccgataccttccgatctgaacaaaaactgccgggacgttcaccgagtacaatctctttaaaggaaagcaagagtaggaccgacctgaaggaggagcacaagtcgtctatgatgcccggcttcctatccgaggtcaatgctttgagcgctgtgtcatccgttgtgaataaattcaatccattcgacttgatcagcgattctgaggcatcacaggaagaaactacgaagaaacagaaagttgtacagaaggaacagggaaaacccgagggcataattaaaccacccttacaacaacagccacccaagccaatccccaagcaacagggccccgggagggaccctttacaacaggatggtacacctaagagcatttcgtctcagcagccagaaaaaatcaagtcccagcctcctggaacaggtaagcccattcaaggtcccacccagacgccacagaccgaccatgccaaattgccactgcagcgagatgcctcgagaccacagaccaagcaggccgatatagtgcggggtgagtctgtgaagccttcactcccaagccctagtaaaccccctattcaacagccgacccccggaaagcctccggcgcaacagcccggccacgagaaatctcaaccggggccagccaaaccacccgcccagccaagcgggttaacaaagcctctggctcagcagcccggcacggtgaagccccccgttcagcccccaggaacgactaaaccccctgcacaacccctcggccctgcaaagccacctgcccaacagacgggttctgagaaacctagtagcgagcagccggggcccaaagcgctggcccagccaccgggggtgggtaaaacacctgcccaacagcctggaccagctaaacctcccacacaacaggtggggactcccaaaccgcttgctcaacagcccgggctgcagtcacctgccaaagcacctggaccaaccaaaacacctgtacagcaaccggggcccggtaagatccccgcccagcaagccgggcctgggaaaacgagtgcccagcagactggaccaacaaagcctccaagccaactccccggcccagcgaaacctcctccgcaacaaccagggcctgccaaaccccctccccaacagccaggttcggcaaagccgccaagtcaacagccaggaagcaccaaacctcctccccaacagccaggtcctgctaagccaagtccccagcaacccggaagtacaaaacctcctagccagcagcccggatcagccaagcccagtgcccagcaacctagtcccgcaaagcctagcgcccaacagtccacaaaacctgtgtctcagacgggtagcgggaagccgctacagccgccgactgtctctccatccgccaaacagcctccatctcaggggctgcctaaaaccatttgccctctgtgtaataccactgagctgcttttgcatgtccctgagaaggcgaatttcaacacatgtactgaatgccagacaacggtttgctccctttgtggcttcaatcccaacccccatttaaccgaagtcaaggagtggctctgtctgaattgccagatgaagcgcgcactgggaggggatctcgccccagtgccgagttctccacagccaaaactcaagacagccccagtgacaacaactagtgccgtgtctaagtcttcaccgcaaccccagcagacctcaccaaagaaagatgccgctcccaaacaagacctctccaaggcccctgagccaaaaaagccccctccattagtcaaacagccaacattgcacggttcacctagtgcaaaagctaagcagccacccgaggcggatagcctcagcaaacccgcacctcccaaggagccatcggtaccctcagagcaggataaggctcccgtggcagatgataagccgaaacagcctaaaatggtgaagccgactactgacctggtttcttcgtctagtgccactaccaagccagacattcccagttctaaagtccagagccaggccgaggaaaagaccaccccgcccctgaaaacggactccgccaagccctcccagagctttcccccaaccggggaaaaggtttcaccctttgatagcaaggcaatcccgcgtcccgccagcgattcgaagataatcagccacccaggtccttcttccgagagcaaagggcagaaacaggtggatcccgtgcagaagaaagaggaaccaaaaaaggcgcaaactaaaatgagccctaagccagatgccaagcctatgccgaagggatcccctacacctcctggacctcgcccaaccgccggccagacggtgccaactccacaacagagcccaaagcctcaggagcagagcaggaggttctctctcaatttaggaagtatcacagacgcccctaaaagtcagccaaccacaccacaggagacggtaaccggcaagctcttcggatttggtgcctctatttttagccaggcttcaaatctaatctccaccgctggacaacccggaccacactctcagtcaggacctggggccccaatgaagcaggccccagctccttctcagccacccactagccaagggcccccaaagagcactggccaggccccacccgccccagccaagagtattcccgtcaagaaggagaccaaggcccccgcggctgagaagctcgaacctaaagctgaacaggctcctaccgttaaacgtaccgaaaccgaaaagaagcccccaccaattaaagacagcaagtcactcacagccgagcctcaaaaagctgtcctccccactaaacttgaaaagagccctaagccggagagcacttgccctttatgcaaaactgaactcaacatcggatccaaagatccgcctaatttcaatacatgcactgagtgcaaaaatcaagtctgcaatctctgtggctttaatcctacaccccatctcactgagattcaggaatggctctgcctgaattgtcagacgcagagggccatatcggggcagctgggcgacatccgaaagatgccccctgctccaagcgggcccaaagccagccccatgccagtacctactgagagctcctctcagaagacggcagtgccaccacaggtgaaactcgtgaaaaagcaggagcaggaggttaagacagaggctgaaaaggtcatactggagaaagtgaaggagaccctgtcaatggagaagatccctcctatggttacgaccgatcaaaaacaggaggagtccaaacttgaaaaagacaaagcctcagcgttgcaagaaaagaagccactcccagaagagaagaagctaatccctgaggaggagaagattagatctgaggaaaaaaagccccttctcgaggagaaaaagcccacccctgaagataaaaaactgctacctgaggctaagacttcagcccccgaagaacaaaaacatgacttacttaagtcacaggtgcagatcgccgaagagaaacttgaagggagagtggcccctaaaacagtgcaggaaggcaaacagccacagacaaaaatggaggggctgcccagtgggacccctcagagtctccccaaagaagacgataaaacgacaaagactatcaaagaacagccacaacccccatgcaccgccaaacccgaccaggtggagccagggaaagagaaaaccgagaaggaggatgataagtctgacacatcaagcagtcaacagcctaagagtcctcagggcttgagcgacacgggatattccagtgatggaatttcctcatcgttgggggagatccctagcctcatcccaactgacgaaaaggatatcctcaaagggctgaaaaaggattcgttctcccaggaatctagcccgtcttctccatctgaccttgccaaactcgaatcaacagtactgtccatcctggaggcccaagcttctactctagctgatgagaagtctgagaagaagacccagcctcacgaggtcagtcctgaacaaccaaaggatcaggaaaagacccaatctttgagcgagaccttggagattacaatttccgaggaggagatcaaagagtctcaggaagaaaggaaggatacgtttaaaaaagattcccaacaggatattccttccagcaaggatcacaaggaaaaatctgaattcgtggacgacatcactactagacgggagccctacgacagcgtcgaagagtcttccgaatccgaaaactcccctgttcctcagcgcaagcgccgcactagcgtcggtagttcaagcagcgatgagtacaagcaagaggactctcagggatccggggaggaggaggatttcatccggaaacagatcatcgagatgtcagcagatgaggacgccagcggttccgaggacgatgaattcatccgaaaccaactgaaggaaatatcgagctccacagagtcacagaagaaagaagagacaaagggtaagggcaagatcactgcaggtaagcatcgccggcttactagaaaaagtagcacctccattgacgaggacgccggtcgtcgccattcttggcatgatgaggacgatgaagcctttgacgagagcccagaacttaagtacagagagacaaagagccaggagagcgaggaactggttgtgacaggaggggggggactgcgtaggtttaaaaccatcgaacttaattcgactattgccgataaatatagcgctgagtctagccagaagaagacatcactgtacttcgatgaggaacctgagcttgagatggagagtctaacagattcgcccgaggaccgctccaggggagaaggatcctccagcctccatgctagtagctttacccccggcacatctcctaccagcgtttccagcctcgatgaggattctgatagctcccccagccataagaaaggggagagcaagcaacagcgcaaggccaggcacagaccccacgggccactgctccccaccatagaagattcctcagaagaagaggagctcagagaagaagaagagctgctgaaagagcaggaaaagcaacgcgagatcgaacagcagcagcggaagtcctctagtaagaaatccaaaaaggacaaagacgaactacgcgcgcaaaggaggcgcgaacgcccaaaaaccccaccctcgaatttaagccctatcgaggatgccagccccaccgaagagctgcgccaagcagccgaaatggaagaactgcatagatcctcctgctctgagtactcgccttccattgaaagtgatccagaaggctttgaaatctcgcccgagaaaattatagaggtccaaaaagtctacaagttacctactgctgtaagcctctacagccccaccgatgaacagagtattatgcaaaaagagggttctcagaaggctctcaaatccgccgaagaaatgtacgaggagatgatgcacaagacccataaatataaggcatttccagccgctaacgaacgcgatgaagtgttcgaaaaagaaccactctatggcggaatgttgattgaggactatatctacgaaagtctcgtggaggatacgtacaacggaagcgtggatggcagtctccttaccaggcaggaagaggagaatggtttcatgcagcagaaggggcgggaacagaagataagacttagcgaacagatctatgaggaccctatgcaaaaaatcactgacctgcagaaggagttttacgagctggagtccctgcactccgtcgtgccccaggaggatatcgtttctagtagttttatcattccagaatcccatgagatcgtggatctcggcaccatggtcacatccacggaggaggaaagaaaattactcgatgcagacgctgcatacgaagagctgatgaaacggcagcaaatgcaattgacacctggttcaagtcccacccaggcccccatcggagaggacatgacagaaagtactatggattttgatagaatgcctgatgcctccctcacctcatcagtcctgtcaggagcctccttgaccgattcaacttcctctgccaccctgagtatccccgatgtgaagatcacacagcacttcagcaccgaagagatcgaggacgaatatgttacagattacacccgggaaattcaagagataatcgcccatgagtctctgattctgacatactccgagcctagtgagtcagctacttcagttccacctagcgacactccatccctgacctcatccgtgagcagcgtgtgcacgaccgattcttcatcccctataaccacattagattctatcacaaccgtgtataccgaacccgtggatatgataacaaagttcgaggattcagaggagatttcatccagcacatactttcctgggtcaattatcgattatcctgaagaaatttccgtgtccttggacaggacggcacctccagacgggcgcgcctcagccgatcacatcgtgatatcgctgagcgacatggcctcaagtatcatagagtccgtcgtgcctaagccagagggtcctgtggccgataccgtctccactgatttactcatcagtgaaaaagatcccgtcaagaaggccaagaaggaaacaggaaacggaatcatcctggaagtactagaagcctatcgcgacaaaaaagaactggaggccgagcgcaccaaatctagtttgagcgaaaccgtcttcgaccatccaccaagtagcgttatcgcgttgcccatgaaagaacagctgagcaccacatactttacctcgggggagacatttggtcaggaaaaacccgccagtcagctgccaagcggttccccaagtgtgagcagtttaccggcgaagcctcgccctttctttaggtctagttccctggatatctcagcacagcctcctcctccccctccacctccgccccctcccccacctcccccaccgcccccacccccgcccccattgccccctcctacgtcaccaaagccaaccattctgcccaagaagaaactcactgtggccagtcctgtgactacagccacacccctttttgatgcagtgacaaccctcgagaccacagccgtacttaggagtaatggactcccagttacacgaatttgcacaactgcaccaccccccgtccctccgaagccctcaagcatcccatcaggcctcgttttcacacatcgaccggaaccatctaaaccaccaattgcccccaaacccgttatccctcaactgcctactacaactcagaagccgaccgacattcaccccaagccaactgggctgtccttgacgtcgtcaatgactctgaacctggttacaagcgctgactataaactccccagtccaacctctccattatccccccactctaataagtcctccccaagattctcaaagtcgctgaccgagacttacgttgttataacgctcccgagcgagcctggtacccccaccgatagctccgcatctcaggcgattacatcgtggcctctgggttccccatctaaggacttagtgagtgtcgagccagtgttcagtgtggtgcctcctgtgactgcagtggagattcctatttctagcgagcagaccttctacatcagcggggcccttcagacattcagcgccacacccgtgacggctcctagtagtttccaggctgctcccacatcagtcactcagttcctcacgactgaggtgagcaagactgaggtatcagctactcgcagtaccgccccctctgtcggcctcagctcaatctccatcacaattcccccagagccgttagccctcgacaacattcacctcgaaaagccccagtacaaggaagatggcaagctgcaactggttggcgatgttatcgatctgcgcaccgtccccaaggtcgaggtgaaaaccacagacaaatgcatagatctgtcagcgtctactatggatgtcaagagacagatcactgcaaatgaggtctatggcaaacagattagcgctgtccaaccgagtattattaacctttccgtcaccagctctattgtgacccctgttagtctcgctacggaaaccgtgacgtttgtgacctgcacagcctctgctagctacaccaccggaactgaatcactcgtgggagctgagcatgctatgacaactccactccagttgaccacctccaagcacgctgagcctccttatagaatccccagcgatcaggtgttcccaatcgcccgggaagaggctccaattaacttgtcgcttggcacgcctgcacacgctgtaaccctggcaattacgaagccagtgaccgtgcctcccgtgggcgttaccaacgggtggactgattcaaccgtctctcaggggattactgatggtgaagtggtagatcttagcactaccaagagccataggaccgtggtgacaatggacgagtccaccagtagtgtcatgactaagatcatcgaggacgagaaacccgtcgatctaacagcaggcaggcgcgcagtttgctgcgacgtcgtttacaaactccccttcggccgcagttgtaccgctcagcagcccgctaccaccttacccgaggatagatttggctaccgcgacgatcactaccaatacgatagaagtggcccttatggctatcgcggtatcggtgggatgaaaccgagtatgtccgacaccaacctggctgaagcaggccacttcttctataaaagtaaaaatgcttttgactacagcgagggcacggatacagccgtcgatctcaccagcggtcgtgtcacaaccggcgaagtgatggactactcatctaaaactacgggtccatacccagagacccggcaagttatttccggtgctggcatttccactccacagtacagcactgcacggatgactccacctcccggacctcagtactgtgtaggttctgtgttacggtcctcaaatggggtcgtctactccagcgtggcaacaccaaccccaagcacatttgccattacgacacagccggggtctatattcagtactacagttagggacctcagtgggatccataccgccgacgctgtcacctctctgcccgccatgcatcattcccagcctatgcctcggagctatttcattacaacaggcgcgtcagagaccgatattgcggtgacggggatagacatctccgccagcttgcagaccatcacaatggagtcactgacagcagaaaccattgattctgtgcccaccttgacaactgcgtctgaggtattcccagaggttgtgggggatgagtctgcactgctgatagtcccagaagaggataaacaacagcagcagctggatctggagagggagctgttggagttagagaaaattaagcaacaaagatttgcagaagagctggagtgggagaggcaagagatccaacgttttagagaacaagaaaagattatggtgcagaagaagttggaagagctgcagtccatgaagcagcatctcctgttccagcaagaggaggagagacaggcacagtttatgatgaggcaggagaccctggcccagcaacaactgcagcttgagcagatacagcagctgcagcagcaactgcatcagcagctggaggaacagaagataagacaaatttaccagtataattacgatccctcaggcaccgcttctccccaaacgactactgagcaggccatattagagggccagtacgcagccctggagggctcccagttctgggcgaccgaagacgcgacgaccaccgcttctgcagtggtggcaatagaaatcccccagtctcagggctggtacacggtgcagtcggatggtgtgacccaatacatcgccccccccggaatcctaagtacggtgagcgaaattccccttacagacgtggtagtcaaggaagagaagcaaccaaagaaacggtcatcaggagccaaggtgcggggccagtatgatgatatgggggagaatatgaccgacgatccacggagctttaagaaaatcgtggatagcggggtccagactgacgacgaagacgccaccgatagaagttacgtatctaggcgacgaaggaccaagaagtccgtcgatacctcagtccagaccgacgatgaagaccaggacgaatgggacatgcctacacggtcacgaaggaaggccagagtcggcaagtatggcgatagcatgacggaggccgataagaccaaaccgctctcaaaagtgtctagtattgcagtgcagaccgtcgcagagatctctgttcagaccgagcccgtgggcaccatccggacccctagcatccgtgccagggtggacgcaaaagtagagattattaagcacatatctgcaccggaaaagacctataaaggagggagcctcgggtgccagacagaggctgactctgatacgcagtcacctcaatacttatcagcgaccagtccaccgaaagacaagaagcggccaacacctttggagatcggatacagtagtcaccttcgagctgactccaccgtgcagctggctccgagcccccccaagagcccaaaggtcctctattcccccattagccccttgagtccgggtaaagcactggagtctgcattcgtgccttatgagaaaccactgcccgatgacataagcccccagaaggtcctgcaccctgacatggccaaggtcccccccgccagtcctaaaacagctaagatgatgcagcgcagcatgtccgaccccaagccattatcccctaccgctgacgaaagcagccgagccccttttcagtacaccgagggctatactactaagggcagtcaaaccatgacatcctctggggcacagaagaaagtgaagcggacgcttcccaatccccccccagaagaaatcagcactggcacccaaagtacattcagcacaatggggaccgtgtcacgcagacgaatatgcaggaccaacactatggctagggccaaaatcttacaggatatcgaccgggagctggatctagtggagcgcgagtccgccaagctgaggaagaaacaggcagagctggacgaggaggagaaagagatcgacgctaaacttcgctaccttgaaatgggaatcaaccggaggaaggaggccctccttaaggaacgagaaaaaagggagcgagcctaccttcagggcgtcgctgaggatagggactatatgtctgattctgaggtttcaagcaccagacccacaagaattgagagtcagcatggcatcgagaggcctcgaacagctccacaaactgagttttctcaattcattcctccccagacgcagaccgagagccaacttgtcccacccacaagcccctatacacaatatcagtactccagccccgctctccctacacaggcgcctacaagctacacgcagcagagccatttcgagcaacagactctttatcatcagcaggttagcccgtaccaaactcaacccacctttcaggcagttgccacaatgagcttcacgccccaggtgcagcccacaccaactccacagcccagctaccagcttcccagtcagatgatggtgatacaacaaaagccccgccagacaacactgtatctggagcctaaaattacatcaaactacgaggtcatccgaaatcagccactaatgattgcccctgtaagtacagacaatacatttgcggtgtctcacctgggctccaaatacaacagtcttgatttgagaatcggactggaggagcggtcgtctatggcatcatctcccatctccagtatatctgcagattcattttatgcggatattgaccatcacaccccaagaaattatgtgctcatcgacgatattggtgaaatcacaaaagggactgctgcgctgtcaaccgccttttctcttcatgagaaagacttatctaagaccgaccggttgctaaggacaacggaaaccaggaggagccaggaagttactgatttccttgccccccttcaatcatcttctcgactgcacagttacgtaaaggccgaagaggatcccatggaggatccctacgagctcaagctgctgaagcaccagatcaagcaggaattcagaaggggcaccgaaagcctggaccatctcgctggcctcagtcactattatcatgccgatacgtcttatagacattttccaaaaagcgaaaagtactccatctctaggttgacgctggagaagcaggcagccaagcaattgccggctgccatactgtaccagaaacagagcaagcataagaaatcgctcatcgacccgaagatgagtaagttcagcccgatacaagaaagtagagacctcgagccagactacagttcatatatgacctcctcgacatcctcgataggtgggatttctagccgggcccgccttctccaggacgatattacgttcggacttcggaagaatatcaccgaccaacagaaattcatggggagcagtttaggaaccggcctcggtaccctcgggaatacaattaggtcagctttacaagatgaagccgataagccctacagcagtggtagtcgctccagacctagctccagaccgtcttccgtgtatgggctcgacctgtctattaagcgtgattcaagttcatccagtctccggttgaaggctcaggaagccgaggcacttgacgtcagcttttcccacgcaagttcatctgccaggaccaagccaacatccttgcccatcagccagtcccgtggccgcattccaattgtagcccagaatagcgaggaagaatctcccctgtccccagttggccagccaatggggatggcccgcgccgccgccggcccactgcctccaatctccgccgacacaagagaccagttcggatcatctcattcgttgcctgaagtacagcagcatatgcgtgaggaaagtcgaactcgagggtacgatagagacattgcctttattatggatgatttccagcatgctatgtccgactccgaagcttaccacctgcgacgcgaagagacggactggttcgataagcctcgcgagtcacgtttggaaaacggacatggtctagaccgcaagttgcccgagcggcttgttcactcaagacctctgagccagcatcaggagcagatcatacaaatgaatggcaaaaccatgcattacatcttcccgcacgctaggatcaagattacccgagatagcaaagaccacactgtgtcggggaacggtctcgggatccgtattgtcggaggcaaagaaattcctggccactctggtgagatcggggcttacatcgccaaaattctacccggcggcagcgccgagcagactggcaaactcatggagggaatgcaggtccttgaatggaacgggatacctctcacgagtaaaacgtacgaagaggtccagagcatcattagccaacagtccggtgaggccgaaatctgtgtgaggctcgatctgaatatgctctccgattccgaaaattcacagcacttagaactccatgaaccccctaaggctgtcgataaggcaaagagtccgggagtagaccccaagcaacttgcggccgagttacagaaggtatctttgcagcagtcccctctggtgctcagcagcgttgtggagaaagggtcgcacgtccatagcggccccacttcagccggcagctcttctgtgcctagtcctggccagcccggctcaccgtccgtgagcaaaaagaagcatggaagctccaaaccgaccgatgggactaaggtggtgtctcacccaatcacaggagagattcaattacagatcaactatgatctgggcaaccttattatccatatcctccaggcccggaacctcgttcccagggataacaatgggtattctgatccatttgtgaaagtgtacctactgcctgggaggggccaggtgatggtagtgcagaacgccagcgccgaatataagcgcagaactaaacacgtgcagaagagtctgaatccagagtggaaccagacagtcatttacaagagcatttccatggagcagctgaaaaaaaagactctggaggtaaccgtgtgggactatgaccgctttagcagcaatgactttctgggtgaggtcctgattgacctctcaagcaccagtcatttagacaatactccacgatggtatccactgaaggagcagacagagtccatcgaccatgggaaatcacactccagccaatctagtcaacagtcacccaaacccagcgtgatcaagtctcgctcccacgggatatttcctgaccctagtaaagatatgcaggtgcccacaatcgagaagagtcatagctctccaggcagcagcaaaagtagttccgaagggcacctgaggagccacgggccgtcccgctctcagtccaagaccagcgtgacccagacacaccttgaagacgccggcgccgcaattgcggctgcagaagcggcagttcagcagctaaggatccagccaagtaagcggcgaaaatag

SEQ ID NO: 180499 - DNA, 10908 bp, Artificial Sequence
  derived and/or modified sequence
atggggaatgaagcctcccttgagggggaaggcctcccagaggggctggccgccgccgccgccgctggcggcggggcctcaggagccggctctccctcgcatacagccatcccagctggcatggaagctgatctttctcagctcagcgaggaggagagacgtcagatagctgctgttatgagccgcgcccagggattacctaaggggtcagtaccccctgcggctgccgagtctcccagcatgcataggaaacaggagctggattcctcccacccacccaaacaaagcggtaggccaccggaccccggacggcccgctcagcctggtcttagtaagtctcgcacaacggatacatttcggtccgaacagaaactgcccggtcggtctccttcaactatttctcttaaggagagtaaatcaagaactgatctcaaggaggagcacaagagctccatgatgccaggcttcttgtctgaggtaaacgctcttagcgccgtgagctcagtggtcaacaaatttaatccattcgacttaatctccgactccgaagctagtcaggaggaaacgacaaaaaaacagaaggtcgtccagaaagagcagggcaaaccggaaggtatcataaaaccacccctgcaacagcaaccacccaagcccattcctaaacagcagggtccaggaagggatcccctccagcaggacggaaccccaaaatccatttcgagtcagcagcccgagaaaatcaagtctcagcccccagggactggaaaaccaatccaggggcccacgcagacccctcagaccgaccacgcaaaattaccactgcagcgagatgcctcacggccacagaccaaacaggccgacattgtgaggggggagtccgtgaagccatctctgccatccccatctaagccgcctattcagcagcccactcccgggaagccccccgcccaacagccaggccacgaaaagtctcagcctggccccgccaagccgccggcccaaccctcagggctgaccaaacctctcgctcagcagccaggaacagtcaaacccccggtccagcccccaggcaccacgaagcctcctgcccaaccactcgggcctgccaagcctccagctcagcagacgggtagcgaaaagcctagcagtgagcagcccgggcctaaggcactggcgcaaccacctggcgttggaaaaaccccggcgcagcagcctggccccgccaagccccctactcagcaagtagggacgccaaaaccactcgcacagcagccagggctgcaaagtcctgcaaaggctccggggcccactaaaaccccagtgcagccaaaacctccttctcagcagccgggtagcacaaaacccccaccacaacagcccggaccggctaagccttccccacagcagcccggctccacgaaacccccatctcagcaaccgggaagcgctaagcctagcgcacaacagccctcacccgccaagccaagcgcacagcaatccactaagcccgtgtcacaaactggatccggtaagcccctgcagccccccacggtcagcccgagcgccaaacagcctccaagccagggactccccaaaaccatctgtccgttatgtaacacaactgaactacttcttcacgtgcctgaaaaggctaacttcaatacttgtaccgagtgccagactaccgtgtgttccctgtgcggatttaaccccaatccacacctcaccgaggtcaaggaatggctatgcctcaattgtcagatgaaaagagctctcggcggggacctggcaccagtgcctagtagcccgcagcccaaactgaaaacagcgccagttacaacgacatcggccgtgtcaaaaagcagcccgcagccacaacagacgagccctaagaaggacgcagccccaaagcaggatctatcaaaggctcccgagcccaaaaagccaccgcctctcgtgaaacagcctacactccatgggtctccctctgccaaagccaagcaacccccagaggccgattccctgagcaagccagccccccctaaggagccctcagtcccttctgagcaggacaaggccccagttgcagatgataaaccaaagcagccgaagatggttaaacccacaaccgatcttgtctctagttcttcagccacaacaaaacctgacatcccctcttctaaggtacagtctcaggcagaggagaagacgacaccccccctgaagaccgatagcgctaagcccagtcagtcgtttccccctacaggggagaaagtaagcccattcgactccaaggctatccctaggccagccagtgacagtaagattatcagccaccccggcccatcttcagagtctaaaggccagaaacaggtggacccagtacagaaaaaggaagaacctaagaaggcacagacaaaaatgagccctaagcccgatgccaaacccatgccaaagggcagccccactcccccaggtccgcgccctacagccggtcagaccgtacctactccacagcagagccctaagccacaagagcagtctaggaggtttagcctaaacctcgggagcatcacagacgccccaaagtcacagccaacgactccacaagagactgttactggcaagctttttggatttggggcttctatcttttcccaggcaagcaatctgatttcaaccgccgggcagcccgggccccactcacagagtggacctggcgcccccatgaaacaagctcctgctcctagccaacctcccaccagccaggggcctccaaagagtacaggtcaggccccccctgcgcctgctaagagcataccagtaaagaaagagactaaggcccccgctgctgaaaagctcgaacctaaagctgaacaagccccaacagtgaaacggactgaaaccgagaagaaaccccctcccattaaagactctaaaagtctgaccgccgaaccacagaaagctgtgctgcccacaaaactggagaagtctccaaagccagagtccacctgcccgctatgcaaaacagaattgaatattggatccaaagaccctcctaactttaacacctgcactgagtgtaagaatcaggtctgtaacctgtgtggatttaaccccacccctcatctaacagaaaactgtcagacccagagagcgatcagcggtcagctgggggacatcaggaagatgcctccggctcccagtgggcctaaagcgtccccaatgcccgtgccaaccgagtcaagctcacagaagaccgcggttccaccccaggtgaagctcgtgaagaaacaagagcaggaagtcaaaaccgaggctgaaaaggttattcttgaaaaggtgaaggagacgcttagtatggaaaagattcctccaatggttacgaccgatcagaagcaggaagagtcaaagctggaaaaggacaaagcatcagcactgcaggagaaaaaaccactccccgaggaaaaaaagctcatccccgaggaggaaaaaatccgctctgaagaaaaaaaaccactgctggaggagaagaagcctacaccagaagataagaaactactaccagaggcaaagacctcagccccggaggagcaaaaacatgaccttcttaaatctcaggtgcagatcgcagaggaaaagctcgagggaagggtcgcccccaagacagtgcaagagggtaagcagcctcagacaaagatggagggacttccgtccgggacacctcagtctctgcctaaggaggacgataaaaccacgaaaacgatcaaggaacagccccagcctccatgcacagccaaaccagatcaggagaaggaagatgataaaagcgataccagcagttcccaacagcctaagtctccacaggggctcagtgacacaggatacagcagcgatggaatctcctccagccttggcgagattccttcgctgatacccacagacgagaaggatatcctcaagggcctcaaaaaagacagctttagccaggaatctagcccatcttcacctagcgacctggcaaagcttgagagtacagtgctgagcattctggaggcccaggctagcactctagcggacgagaaatcagagaagaagacacagccgcatgaggtttcacccgaacaaccgaaggaccaagagaaaactcagtcattgtctgaaactctagaaattacaatcagtgaagaggagattaaggagtctcaagaagaacgaaaggacacattcaagaaagactctcagcaggacatcccttcatcaaaggaccataaggagaaatccgaattcgtggatgacatcacgacccggcgcgaaccatatgatagcgtggaagagagtagtgagagcgaaaatagtcctgttccacaaaggaagcggcgtacatcagttggatcttcctctagcgatgagtacaagcaggaggactcacaagggtcgggcgaggaggaagacttcatccgcaaacaaatcatcgaaatgtctgccgacgaggatgcaagcgggtccgaggatgacgagttcatcaggaaccagctaaaggagatcagctcgtctactgagtcgcagaagaaagaagaaaccaaaggcaaaggtaagatcaccgccggtaaacaccgccgcctgactcgcaagtcctcgacaagcatagatgaggatgccggacgccgacattcttggcacgacgaagacgacgaagcttttgacgagtccccggaattgaaataccgggagactaaaagccaagagtctgaagagctcgtagtgactggcggtgggggccttcgcagatttaagactattgagctgaactctaccatagctgacaagtacagtgcggagtcatcccaaaagaagacgagcctgtactttgatgaggagcctgagttggagatggagagtttgaccgacagccccgaggaccgaagtagaggggagggaagtagctcgctccacgcttcttctttcaccccggggacctcccctacatcggtgagtagtctggacgaggattcagattctagccccagtcataaaaaaggcgaaagtaagcagcaaaggaaagctcggcatcgccctcatgggcctttattacctactatagaggactcttcagaagaagaagaattacgggaggaagaggagttgttgaaagagcaggaaaaacagagagagatcgagcaacaacagagaaaatcctccagcaagaagtccaagaaagacaaagatgaactgcgtgcacagagacgcagagaaagacctaagaccccaccctcaaacctgagtccaatagaagacgcttccccaaccgaggagctgcgacaagcagctgagatggaagaactgcatcgttcttcatgtagtgaatatagcccttctatagagagtgacccagaggggttcgaaatatcaccagaaaagataatcgaggtgcagaaagtttacaagctccctaccgcagtgtcattatacagcccaactgacgagcaatcaattatgcagaaagaaggttcccagaaggcgctcaagagcgcagaggaaatgtacgaagagatgatgcataagacacacaagtataaggcattccctgcagccaatgagagagatgaagtgtttgagaaagaaccactctacgggggtatgctcatcgaagactacatttacgaatcactggtggaagacacctataatgggagcgtggacggatcactgctgacgcgtcaggaagaggagaacgggtttatgcagcagaagggacgcgaacagaagatacgcctctccgaacaaatctacgaggatccaatgcagaagatcacagatctgcagaaggaattctatgagttagagagtctccattccgtggtgccccaggaggacattgtatcttcttcttttatcattccagagtcacatgagattgttgacctcgggaccatggtgaccagcactgaggaggaacgcaagctattggatgcagatgccgcatatgaagagctcatgaagcggcagcagatgcagctgacccccggatcatcccccacccaggcccctataggagaggacatgactgagtccacgatggactttgaccggatgcccgatgccagtctcacatcatcagttctgagcggcgcgtctttaacagactcaacgtcatctgccacgctgtcaatacctgacgtcaaaattacacagcacttctccaccgaggaaattgaggacgaatacgtgactgattatacccgcgaaatccaggagatcatagcacatgagtccctcatactgacgtattcggaaccctctgaatcagcaacgtccgtgccccctagtgacacccccagcctgaccagctccgtctctagcgtgtgcactactgattcgtctagcccaattactaccttagacagcatcacaactgtgtacaccgagcctgtggatatgatcaccaagttcgaggacagtgaagagatcagctcctccacttatttcccagggtcaattatagactatcccgaagagatctctgtgtctctcgatagaactgcccccccggatggtagagccagtgctgaccatatagttatcagtctaagtgacatggccagtagtattattgagtctgtcgtacccaagcccgaaggtccagtggccgacactgtctcaaccgatctgcttatatctgagaaggaccctgtcaagaaggcaaagaaggaaacaggtaacggaatcatactagaggtgctggaggcttatagggataagaaggagttggaggccgaaaggacaaagtcaagcctctccgagacggtgttcgaccatcctcccagctcggtcattgcccttcccatgaaggagcaactctctacaacatatttcacttcaggcgagacatttggtcaggaaaaaccagcctcccaattaccctctgggtctccctccgtcagcagcctaccggccaaaccacgtcctttttttagaagttcttctttggatatatcggcacagccccctcccccaccgcctccccctccccctccccctccacccccccctccacctccaccacctcccctgcctccccccacatctcccaaacccacaatcctaccaaagaaaaagctgacagtggcaagccccgtcaccacagcgacccccctgttcgacgcggtgacaacccttgagacaactgctgttctgcggtcaaacggactcccagtgacacgaatctgtacaacggcccccccgcctgtgcccccaaaacctagtagcatcccctcgggtctcgttttcactcatagacccgagccttctaaaccacctattgctcctaaacccgtaatcccccagcttcccactacaacacaaaagcctacagacattcacccaaagcccaccgggcttagtctgacaagctctatgaccttgaacctggtgacatctgcagattataagttgccttctccaacgagcccgctcagcccccactcaaataaaagcagtccacgcttttctaagagcctgaccgagacttatgtggtcattaccttgccgtccgaacccggcacacctacagactcaagcgcgagccaggctattacctcatggcccttgggcagtcctagcaaggacttggtctcagtcgagcccgtgttttctgtggtgcccccggttacagccgtggagatccccataagctcagagcagacattttatattagtggtgctctccagactttttccgcaacgcctgtcacggctccatccagctttcaggctgctcctaccagtgttacacagttcttaacaacagaggtcagcaagactgaggtatccgcaacacgatcgaccgcaccctcagtgggcctcagctcaatctcaatcaccatccctcccgaaccactcgcactagacaatattcacttggagaaaccgcagtataaagaggacgggaaactacagctagtgggagatgtgattgatctgcgtactgtgccaaaagtggaggtgaagacaaccgacaagtgtatcgatctttctgccagcaccatggatgtgaaacggcagattaccgcgaacgaagtctacggaaagcagatcagtgcggtgcagccctccattatcaacctatccgtgacttcaagcatcgtcactccagtttcactcgcaacagagacagtcaccttcgtgacctgtacggctagtgcttcatatacgacgggtaccgagagcctggtcggcgcagaacacgccatgacaacccccctgcaactgaccaccagcaaacatgcagaacctccgtaccggatcccctcagaccaggtgttcccgattgcacgcgaagaggcacccatcaacttatccttgggcaccccagcccacgccgtcactcttgcgatcacgaaacctgtgaccgtgcctccggttggagtgacgaacggatggacggacagtaccgtttcacaggggatcactgacggggaggttgtggacctgtctaccaccaaaagccatagaactgtcgtcacaatggacgagagtaccagctcggtcatgactaaaatcatcgaagacgaaaagcctgttgacctcactgcgggcagacgtgccgtgtgttgtgacgtggtgtataaactgccttttggccggtcctgtaccgctcaacagccagccaccactctgcctgaggatcggtttggatatcgtgatgaccattaccagtatgaccggagtggtccgtatggatatcgggggataggtggaatgaaaccgtccatgagtgatacgaatctcgccgaggcaggccatttcttttacaagagcaagaatgcttttgactattccgaagggactgacaccgcggtcgacctgacatcaggtcgggtgactaccggggaggtaatggactactcttctaagacgactggaccgtatcccgaaacccggcaggtcatttccggtgcgggcattagtactcctcaatacagtaccgcccgcatgacaccacctcctggtccccagtactgtgtgggatctgtcctgagatctagcaatggagtggtatactcttccgttgcaacccccactcccagtacatttgcaatcacaacccagcctggctcaattttctccaccactgtaagggatctgtcagggatccatacagctgatgcagtgacttctctccccgccatgcaccactctcaacctatgcctagatcatactttattactactggggcatcggagacggatatcgctgttaccgggatcgacatttcagcctcactccagactattacaatggagtccctgacggccgaaactatcgattcagtgccaaccctgaccacagcttctgaggtcttcccagaggtggttggtgacgaatccgcattgttaatcgtacccgaagaagataagcagcaacagcagctggatctggagagggaactgcttgagttagaaaaaattaaacagcaacgctttgccgaggaactggagtgggagaggcaggagatccaacgatttcgtgagcaagagaaaattatggtgcagaagaaacttgaagaactgcaatcaatgaagcagcatctgctgtttcagcaagaggaggagcgccaggcccagtttatgatgagacaggagacccttgctcagcagcagcttcagctcgagcagattcaacagctacagcagcaattgcatcagcaactggaagaacagaaaatcagacagatttaccagtacaattatgatccttcaggaaccgcatctccacagacaaccacagaacaggcaatcctagagggacaatacgccgctctggaagggtctcagttctgggccactgaggacgccactacgacagcatctgccgttgtggcgatagaaatacctcagagccagggatggtacactgtgcagtctgacggggtaactcagtacatcgcgccccccggcatcttatccacggtctctgagatcccacttacagacgtcgtggtgaaggaagaaaagcaacctaagaagaggagctcaggggcaaaggtacggggacagtatgatgatatgggagagaacatgaccgacgaccccagaagtttcaagaaaatcgtggacagtggagtccagaccgacgacgaagacgcgactgaccgtagctacgtaagcaggcgaagacggactaagaagtccgtagatacttcagtgcagactgatgatgaagatcaggatgagtgggacatgcctaccaggtcaaggcgaaaggctcgggtcggcaaatacggtgattcaatgactgaagcggacaaaacgaagcccctgtccaaggtgtcttctattgccgttcagaccgtcgctgagatcagtgtgcagaccgagcccgtgggcaccatacgcaccccctctatcagagcgagagtggatgccaaggtcgaaattattaagcacatttctgcccccgaaaagacttacaagggcggaagtttagggtgccagacagaagctgattccgatacgcaaagcccgcagtacctgagtgcgacatctccacccaaggataagaagaggcccaccccccttgaaataggttatagcagtcacctgagggcagacagcacagtccagctggccccctcccctcctaagagtcctaaggtgctttattcccccatatcccctctgagtcctggcaaggctctggagtctgctttcgtaccctacgaaaaaccattacctgacgacattagtccgcaaaaagtgttgcaccctgacatggctaaagtcccccccgcctctcccaaaactgcgaagatgatgcagcggtccatgtctgatccaaagcccctgagccccacagccgatgagtcttccagggctccttttcaatacactgaaggctatacatag

SEQ ID NO: 180500 - DNA, 597 bp, Artificial Sequence
  derived and/or modified sequence
atgttattgatcctgctctctgtggccctccttgccctgtcatccgcccagaatctgaacgaggacgttagccaggaagagagtccctcccttatcgccggtaacccacagggccccagcccccaagggggaaataagccccagggtccccctccccccccaggaaaaccccagggtcctcctccccaaggaggcaacaaaccacagggcccaccgcctcccggaaaaccccagggtccaccgccacaaggcgacaagagccgctctcccagaagtcctccagggaaaccccagggacctcctccccaaggcggaaagccccaaggtccacctccccagggggggaataagcctcaggggcctccacctccagggaaaccacaaggaccgccagcacagggtgggtccaagagtcagagcgcaagatctccaccgggcaagccccaaggacctccccagcaggaaggcaataatccacaaggtcctcctcccccagccggggggaaccctcagcaacctcaagcgcctcctgccggtcagccacagggaccgccaagaccaccgcagggaggacggccctcccgcccaccacagtag

SEQ ID NO: 180501 - DNA, 1269 bp, Artificial Sequence
  derived and/or modified sequence
accaaggtgtggaacagcaatggcctgggcatcagaattgtgggcggcaaggagatccctggccacagcggggagatcggggcctacatcgccaagatcctgcccggcggcagcgctgagcagacaggcaagctgatggagggcatgcaggtgctggagtggaatggcatccccctgaccagcaagacctatgaggaggtgcagagcatcatcagccagcagagcggggaggccgagatctgtgtgcggctggacctgaacatgctgagtgacagcgagaacagccagcacctggagctgcacgagccccccaaggctgtggacaaggccaagagccctggggtggaccccaagcagctggccgctgagctgcagaaggtgtccctgcagcagagccccctggtgctgagctctgtggtggagaagggcagccacgtgcacagcggccccaccagcgctggcagcagctctgtgcccagccctggccagcccggcagccccagcgtgtccaagaagaagcacggcagcagcaagcccacagatggcaccaaggtggtgagccaccccatcactggagagatccagctgcagatcaactatgacctgggcaacctgatcatccacatcctgcaggccaggaacctggtgccccgggacaacaacggctacagcgacccctttgtgaaggtgtacctgctgcccggccgcggggctgagtacaagaggaggaccaagcacgtgcagaagagcctgaaccctgagtggaaccagaccgtcatctacaagagcatctccatggagcagctgaagaagaagaccctggaggtgacagtgtgggactatgaccgcttcagcagcaatgacttcctgggggaggtgctgattgacctgagcagcaccagccacctggacaacaccccccgctggtaccccctgaaggagcagacagagagcattgaccacggcaagagccacagcagccagagcagccagcagagccccaagcccagcgtcatcaagagccgcagccacggcatcttcccagaccccagcaaggacatgcaggtgcccaccatcgagaagagccacagcagccctggcagcagcaagagcagcagcgagggccacctgcggagccacggccccagccgcagccagagcaagacctctgtgacccagacccacctggaggatgctggagctgccatcgctgctgctgaggccgctgtgcagcagctgcgcatccagcccagcaagaggaggaagtag

SEQ ID NO: 180502 - DNA, 14808 bp, Artificial Sequence
  derived and/or modified sequence
atgggaaatgaggccagcctggagggggagggcctgcctgagggcctggccgctgctgctgctgctgggggcggggccagcggggccggcagccccagccacacagccatcccagctggcatggaggccgacctgagccagctgtctgaggaggagcggcggcagattgctgctgtgatgagccgggcccagggcctgcccaagggctctgtgcccccagctgctgctgagagccccagcatgcacaggaagcaggagctggacagcagccacccccccaagcagagcggccggcccccagaccccggccgcccagcccagcccggcctgagcaagagcaggaccacagacaccttccgctctgagcagaagctgcccggccgcagccccagcaccatcagcctgaaggagagcaagagcaggacagacctgaaggaggagcacaagagctccatgatgcctggcttcctgtctgaggtgaatgccctgtctgctgtgtcctctgtggtgaacaagttcaacccctttgacctgatcagtgacagcgaggccagccaggaggagaccaccaagaagcagaaggtggtgcagaaggagcagggcaagccagagggcatcatcaagccacccctgcagcagcagccccccaagcccatccccaagcagcagggccctggccgggaccccctgcagcaggacggcacccccaagagcatcagcagccagcagcctgagaagatcaagagccagcccccaggcaccgggaagcccatccagggccccacccagaccccccagacagaccacgccaagctgcccctgcagagagatgccagccggccccagaccaagcaggccgacatcgtgcggggggagagcgtgaagcccagcctgcccagccccagcaagccacccatccagcagcccaccccaggcaagcccccagcccagcagcccggccacgagaagagccagcccggccctgccaagcccccagcccagcccagcggcctgaccaagcccctggcccagcagcccggcaccgtgaagccccctgtgcagcccccaggcaccaccaagcccccagcccagcccctgggccctgccaagcccccagcccagcagacaggcagcgagaagcccagcagcgagcagcccggccccaaggccctggcccagcccccaggagtgggcaagaccccagcccagcagcccggccctgccaagccacccacccagcaggtgggcacccccaagcccctggcccagcagcccggcctgcagagccctgccaaggcccctggccccaccaagacccctgtgcagcagcccggccctgggaagatcccagcccagcaggccggccctgggaagaccagcgcccagcagacaggccccaccaagccacccagccagctgcccggccctgccaagcccccaccccagcagcccggccctgccaagcccccaccccagcagcccggcagcgccaagccacccagccagcagcccggcagcaccaagcccccaccccagcagcccggccctgccaagcccagcccccagcagcccggcagcaccaagccacccagccagcagcccggcagcgccaagcccagcgcccagcagcccagccctgccaagcccagcgcccagcagagcaccaagcctgtgtcccagacaggcagcggcaagcccctgcagcccccaacagtgagccccagcgccaagcagccccccagccagggcctgcccaagaccatctgccccctgtgcaacaccacagagctgctgctgcacgtgcctgagaaggccaacttcaacacctgcacagagtgccagaccaccgtgtgcagcctgtgtggcttcaaccccaacccccacctgacagaggtgaaggagtggctgtgcctgaactgccagatgaagagggccctgggcggggacctggcccctgtgcccagcagcccccagcccaagctgaagacagcccctgtgaccaccaccagcgctgtgtccaagagcagcccccagccccagcagaccagccccaagaaggatgctgcccccaagcaggacctgagcaaggcccctgagcccaagaagcccccacccctggtgaagcagcccaccctgcacggcagccccagcgccaaggccaagcagcccccagaggccgacagcctgagcaagccagccccacccaaggagcccagcgtgcccagcgagcaggacaaggcccctgtggctgatgacaagcccaagcagcccaagatggtgaagcccaccacagacctggtgagcagcagcagcgccaccaccaagccagacatccccagcagcaaggtgcagagccaggccgaggagaagaccaccccacccctgaagacagattctgccaagcccagccagagcttccccccaactggagagaaggtgagcccctttgacagcaaggccatccccaggcctgccagtgacagcaagatcatcagccaccctggccccagcagcgagagcaagggccagaagcaggtggaccctgtgcagaagaaggaggagcccaagaaggcccagaccaagatgagccccaagccagatgccaagcccatgcccaagggcagccccaccccacctggcccccggcccacagctggccagacagtgcccaccccccagcagagccccaagccccaggagcagagccgccgcttcagcctgaacctgggcagcatcacagatgcccccaagagccagcccaccaccccccaggagaccgtgacaggcaagctgtttggatttggagccagcatcttcagccaggccagcaacctgatcagcacagctggccagcccggcccccacagccagagcggccctggggcccccatgaagcaggccccagcccccagccagccccccaccagccagggcccccccaagagcacaggccaggcccccccagccccagccaagagcatccctgtgaagaaggagaccaaggccccagctgctgagaagctggagcccaaggccgagcaggcccccaccgtgaagaggacagaaacagagaagaagcccccacccatcaaggacagcaagagcctgacagctgagccccagaaggctgtgctgcccaccaagctggagaagagccccaagccagagagcacctgccccctgtgcaagacagagctgaacatcggcagcaaggacccccccaacttcaacacctgcacagagtgcaagaaccaggtgtgcaacctgtgtggcttcaaccccaccccccacctgacagagatccaggagtggctgtgcctgaactgccagacccagagggccatcagcggccagctgggggacatcaggaagatgcccccagcccccagcggccccaaggccagccccatgcctgtgcccacagagagcagcagccagaagacagctgtgcccccccaggtgaagctggtgaagaagcaggagcaggaggtgaagacagaggccgagaaggtgatcctggagaaggtgaaggagaccctgtccatggagaagatcccccccatggtgaccacagaccagaagcaggaggagagcaagctggagaaggacaaggccagcgccctgcaggagaagaagcccctgcctgaggagaagaagctgatccctgaggaggagaagatccgctctgaggagaagaagcccctgctggaggagaagaagcccaccccagaggacaagaagctgctgcctgaggccaagaccagcgcccctgaggagcagaagcatgacctgctgaagagccaggtgcagattgctgaggagaagctggagggccgggtggcccccaagacagtgcaggagggcaagcagccccagaccaagatggagggcctgcccagcggcaccccccagagcctgcccaaggaggatgacaagaccaccaagaccatcaaggagcagccccagcccccctgcacagccaagccagaccaggtggagcccgggaaggagaagacagagaaggaggatgacaagagtgacaccagcagcagccagcagcccaagagcccccagggcctgagtgacaccggctacagcagtgatggcatcagcagcagcctgggggagatccccagcctcatccccacagatgagaaggacatcctgaagggcctgaagaaggacagcttcagccaggagagcagccccagcagccccagcgacctggccaagctggagagcacagtgctgagcatcctggaggcccaggccagcaccctggctgatgagaagtctgagaagaagacccagccccatgaggtgtccccagagcagcccaaggaccaggagaagacccagagcctgtctgagaccctggagatcaccatcagcgaggaggagatcaaggagagccaggaggagaggaaggacaccttcaagaaggacagccagcaggacatccccagcagcaaggaccacaaggagaagtcagaatttgtggatgacatcaccacccggcgggagccctatgacagcgtggaggagagcagcgagagcgagaacagccctgtgccccagaggaagaggaggacctctgtgggcagcagcagcagtgatgagtacaagcaggaggacagccagggcagcggggaggaggaggacttcatcaggaagcagatcatcgagatgtctgcagatgaagatgccagcggctctgaagatgatgagttcatccggaaccagctgaaggagatcagcagcagcacagagagccagaagaaggaggagaccaagggcaagggcaagatcacagctgggaagcaccggcggctgaccaggaagagcagcaccagcattgatgaagatgctggaagaagacacagctggcatgatgaagatgatgaggcctttgatgagagccctgagctgaagtaccgggagaccaagagccaggagagcgaggagctggtggtgactggaggcggcggcctgcggcgcttcaagaccatcgagctgaacagcaccatcgctgacaagtacagcgctgagagcagccagaagaagaccagcctgtactttgatgaggagcctgagctggagatggagagcctgacagacagcccagaagatagaagcagaggagagggcagcagcagcctgcacgccagcagcttcaccccaggcaccagccccacctctgtgagcagcctggatgaagattctgacagcagccccagccacaagaagggggagagcaagcagcagaggaaggcccggcaccggccccacggccccctgctgcccaccatcgaggacagcagcgaggaggaggagctgcgggaggaggaggagctgctgaaggagcaggagaagcagcgggagattgagcagcagcagaggaagagcagcagcaagaagagcaagaaggacaaggatgagctgcgggcccagaggagaagagagcggcccaagaccccacccagcaacctgagccccattgaagatgccagccccacagaggagctgcggcaggccgctgagatggaggagctgcacaggagcagctgcagcgagtacagccccagcattgaaagtgaccctgagggctttgagatcagccctgagaagatcatcgaggtgcagaaggtgtacaagctgcccacagctgtgtccctgtacagccccacagatgagcagagcatcatgcagaaggagggcagccagaaggccctgaagtctgctgaggagatgtatgaggagatgatgcacaagacccacaagtacaaggccttccctgctgccaatgaaagagatgaggtgtttgagaaggagcccctgtatggaggcatgctgattgaggactacatctatgagagcctggtggaggacacctacaacggctctgtggatggcagcctgctgacccggcaggaggaggagaatggcttcatgcagcagaagggccgggagcagaagatccggctgtctgagcagatctatgaggaccccatgcagaagatcacagacctgcagaaggagttctatgagctggagagcctgcacagcgtggtgccccaggaggacatcgtgagcagcagcttcatcatccctgagagccatgagatcgtggacctgggcaccatggtgaccagcacagaggaggagaggaagctgctggatgctgatgctgcctatgaggagctgatgaagaggcagcagatgcagctgaccccaggcagcagccccacccaggcccccatcggggaggacatgacagagagcaccatggactttgacaggatgccagatgccagcctgaccagctctgtgctgagcggggccagcctgacagacagcaccagcagcgccaccctgagcatcccagatgtgaagatcacccagcacttcagcacagaggagattgaagatgaatatgtgacagactacacccgggagatccaggagatcatcgcccacgagagcctcatcctgacctacagcgagcccagcgagagcgccacctctgtgcccccaagtgacacccccagcctgaccagctctgtgtcctctgtgtgcaccacagacagcagcagccccatcaccaccctggacagcatcaccaccgtgtacacagagcctgtggacatgatcaccaagtttgaagattctgaggagatcagcagcagcacctacttccctggcagcatcatcgactacccagaggagatctctgtgtccctggacagaacagcccccccagatggccgggccagcgctgaccacatcgtcatcagcctgagtgacatggccagcagcatcatcgagagcgtggtgcccaagccagagggccctgtggccgacacagtgtccacagacctgctgatcagcgagaaggaccctgtgaagaaggccaagaaggagactggaaatggcatcatcctggaggtgctggaggcctacagagacaagaaggagctggaggccgagaggaccaagagcagcctgtctgagaccgtgtttgaccacccccccagcagcgtcatcgccctgcccatgaaggagcagctgagcaccacctacttcaccagcggggagaccttcggccaggagaagccagccagccagctgcccagcggcagccccagcgtgagcagcctgcctgccaagccccggcccttcttccgcagcagcagcctggacatcagcgcccagcccccacctcctcctcctcctcctcctcctcctcctcctcctcctcctcctcctcctcctccacccctgcccccacccaccagccccaagcccaccatcctgcccaagaagaagctgactgtggccagccctgtgaccacagccacccccctgtttgatgctgtgaccaccctggagaccacagctgtgctgcggagcaatggcctgcctgtgacccgcatctgcaccacagcccctcctcctgtgccccccaagcccagcagcatccccagcggcctggtgttcacccacaggcctgagcccagcaagccacccatcgcccccaagcctgtgatcccccagctgcccaccaccacccagaagcccacagacatccaccccaagcccaccggcctgagcctgaccagctccatgaccctgaacctggtgaccagcgctgactacaagctgcccagccccaccagccccctgagcccccacagcaacaagagcagcccccgcttcagcaagagcctgacagagacctacgtggtgatcaccctgcccagcgagcccggcacccccacagacagcagcgccagccaggccatcacctcctggcccctgggcagccccagcaaggacctggtgtctgtggagcccgtcttctctgtggtgccccctgtgacagctgtggagatccccatcagcagcgagcagaccttctacatcagcggggccctgcagaccttcagcgccacccctgtgacagcccccagcagcttccaggccgcccccacctctgtgacccagttcctgaccacagaggtgtccaagacagaggtgtctgccaccaggagcacagcccccagcgtgggcctgagcagcatcagcatcaccatccccccagagcccctggccctggacaacatccacctggagaagccccagtacaaggaggatggcaagctgcagctggtgggagatgtgattgacctgaggacagtgcccaaggtggaggtgaagaccacagacaagtgcatcgacctgagcgccagcaccatggatgtgaagaggcagatcacagccaatgaggtgtatggcaagcagatctctgctgtgcagcccagcatcatcaacctgtctgtgaccagcagcatcgtgacccctgtgtccctggccacagagaccgtgacctttgtgacctgcacagccagcgccagctacaccaccggcacagagagcctggtgggcgctgagcacgccatgaccacccccctgcagctgaccaccagcaagcacgccgagcccccctaccgcatccccagcgaccaggtgttccccatcgcccgggaggaggcccccatcaacctgagcctgggcaccccagcccatgctgtgaccctggccatcaccaagcctgtgacagtgccccctgtgggcgtgaccaacggctggacagacagcacagtgtcccagggcatcacagatggagaggtggtggacctgagcaccaccaagagccacaggacagtggtgaccatggatgagagcaccagctctgtgatgaccaagatcattgaagatgagaagcctgtggacctgacagctggccggcgggctgtgtgctgtgatgtggtgtacaagctgcccttcggccgcagctgcacagcccagcagcctgccaccaccctgcctgaggacagatttggctacagagatgaccactaccagtatgacagaagtggcccctacggctaccggggcattggaggcatgaagcccagcatgtctgacaccaacctggccgaggccggccacttcttctacaagagcaagaatgcctttgactacagcgagggcacagacacagctgtggacctgaccagcggccgggtgaccaccggggaggtgatggactacagcagcaagaccaccggcccctacccagagacccggcaggtgatcagcggggccggcatcagcaccccccagtacagcacagccaggatgaccccacctcctggcccccagtactgtgtgggctctgtgctgcggagcagcaatggagtggtgtacagctctgtggccacccccacccccagcacctttgccatcaccacccagcccggcagcatcttcagcaccaccgtgcgggacctgagcggcatccacacagcagatgctgtgaccagcctgcctgccatgcaccacagccagcccatgcccaggagctacttcatcaccactggagccagcgagacagacattgctgtgactggaattgacatcagcgccagcctgcagaccatcaccatggagagcctgacagctgagaccatcgacagcgtgcccaccctgaccacagccagcgaggtgtttcctgaggtggtgggagatgaaagtgccctgctgattgtgcctgaggaggacaagcagcagcagcagctggacctggagcgggagctgctggagctggagaagatcaagcagcagagatttgctgaggagctggagtgggagcggcaggagatccagcgcttccgggagcaggagaagatcatggtgcagaagaagctggaggagctgcagagcatgaagcagcacctgctcttccagcaggaggaggagcggcaggcccagttcatgatgaggcaggagaccctggcccagcagcagctgcagctggagcagatccagcagctgcagcagcagctgcaccagcagctggaggagcagaagatccggcagatctaccagtacaactatgaccccagcggcacagccagcccccagaccaccacagagcaggccatcctggagggccagtatgctgccctggagggcagccagttctgggccacagaagatgccaccaccacagccagcgctgtggtggccatcgagatcccccagagccagggctggtacacagtgcagagtgatggagtgacccagtacatcgcccctcctggcatcctgagcacagtgtctgagatccccctgacagatgtggtggtgaaggaggagaagcagcccaagaagaggagcagcggggccaaggtgcggggccagtatgatgacatgggagagaacatgacagatgaccccaggagcttcaagaagatcgtggacagcggcgtgcagacagatgatgaagatgccacagacaggagctatgtgtccagaagaagaaggaccaagaagtctgtggacacctctgtgcagacagatgatgaggaccaggatgagtgggacatgcccaccaggagcaggaggaaggcccgggtgggcaagtatggagacagcatgacagaggccgacaagaccaagcccctgagcaaggtgagcagcattgctgtgcagacagtggccgagatctctgtgcagacagagcctgtgggcaccatccgcacccccagcatccgggcccgggtggatgccaaggtggagatcatcaagcacatcagcgcccctgagaagacctacaagggcggcagcctgggctgccagacagaagctgacagcgacacccagagcccccagtacctgagcgccaccagcccccccaaggacaagaagaggcccacccccctggagatcggctacagcagccacctgcgggctgacagcacagtgcagctggcccccagcccccccaagagccccaaggtgctgtacagccccatcagccccctgagccctgggaaggccctggagagcgcctttgtgccctatgagaagcccctgcctgatgacatcagcccccagaaggtgctgcacccagacatggccaaggtgcccccagccagccccaagacagccaagatgatgcagaggtccatgtctgaccccaagcccctgagccccacagcagatgagagcagccgggcccccttccagtacacagagggctacaccaccaagggcagccagaccatgaccagcagcggggcccagaagaaggtgaagaggaccctgcccaaccccccacctgaggagatcagcacaggcacccagagcaccttcagcaccatgggcaccgtgtccagaagacgcatctgcaggaccaacaccatggcccgggccaagatcctgcaggacatcgaccgggagctggacctggtggagcgggagagcgccaagctgaggaagaagcaggccgagctggatgaggaggagaaggagattgatgccaagctgcgctacctggagatgggcatcaacagaaggaaggaggccctgctgaaggagcgggagaagcgggagcgggcctacctgcagggcgtggctgaagatcgggactacatgtctgattctgaggtgagcagcacccggcccaccagaattgagagccagcacggcatcgagcggcccaggacagccccccagacagagttcagccagttcatccccccccagacccagacagagagccagctggtgccccccaccagcccctacacccagtaccagtacagcagccctgccctgcccacccaggcccccaccagctacacccagcagagccactttgagcagcagaccctgtaccaccagcaggtgagcccctaccagacccagcccaccttccaggccgtggccaccatgtccttcaccccccaggtgcagcccacccccaccccccagcccagctaccagctgcccagccagatgatggtgatccagcagaagccccggcagaccaccctgtacctggagcccaagatcaccagcaactatgaggtgatccggaaccagcccctgatgattgcccctgtgtccacagacaacacctttgctgtgagccacctgggcagcaagtacaacagcctggacctgagaattggcctggaggagaggagctccatggccagcagccccatcagcagcatctctgctgacagcttctacgccgacatcgaccaccacacccccaggaactacgtgctgattgatgacatcggggagatcaccaagggcacagctgccctgagcacagccttcagcctgcacgagaaggacctgagcaagacagaccggctgctgcggaccacagagacccggcgcagccaggaggtgacagacttcctggcccccctgcagagcagcagccggctgcacagctatgtgaaggccgaggaggaccccatggaggacccctatgagctgaagctgctgaagcaccagatcaagcaggagttcagaagaggaacagagagcctggaccacctggccggcctgagccactactaccacgccgacaccagctaccgccacttccccaagtctgagaagtacagcatcagccggctgaccctggagaagcaggccgccaagcagctgcctgctgccatcctgtaccagaagcagagcaagcacaagaagagcctgattgaccccaagatgagcaagttcagccccatccaggagagccgggacctggagccagactacagcagctacatgaccagcagcaccagcagcattggaggcatcagcagccgggcccggctgctgcaggatgacatcaccttcggcctgaggaagaacatcacagaccagcagaagttcatgggcagcagcctgggcaccggcctgggcaccctgggcaacaccatccgcagcgccctgcaggatgaagctgacaagccctacagcagcggcagccgcagccggcccagcagccggcccagctctgtgtatggcctggacctgagcatcaagagggacagcagcagcagcagcctgcggctgaaggcccaggaggccgaggccctggatgtgtccttcagccacgccagcagcagcgcccggaccaagcccaccagcctgcccatcagccagagccggggccgcatccccatcgtggcccagaacagcgaggaggagagccccctgagccctgtgggccagcccatgggcatggcccgggctgctgctggccccctgccccccatctctgctgacacccgggaccagtttggcagcagccacagcctgcctgaggtgcagcagcacatgagggaggagagcaggacccggggctatgaccgggacatcgccttcatcatggatgacttccagcacgccatgtctgacagcgaggcctaccacctgcggcgggaggagacagactggtttgacaagccccgggagagccggctggagaatggacatggcctggacaggaagctgcctgagcggctggtgcacagccggcccctgagccagcaccaggagcagatcatccagatgaatggcaagaccatgcactacatcttcccccacgcccgcatcaagatcacccgggacagcaaggaccacacagtgtctggaaatggcctgggcatcagaattgtgggcggcaaggagatccctggccacagcggggagatcggggcctacatcgccaagatcctgcccggcggcagcgctgagcagacaggcaagctgatggagggcatgcaggtgctggagtggaatggcatccccctgaccagcaagacctatgaggaggtgcagagcatcatcagccagcagagcggggaggccgagatctgtgtgcggctggacctgaacatgctgagtgacagcgagaacagccagcacctggagctgcacgagccccccaaggctgtggacaaggccaagagccctggggtggaccccaagcagctggccgctgagctgcagaaggtgtccctgcagcagagccccctggtgctgagctctgtggtggagaagggcagccacgtgcacagcggccccaccagcgctggcagcagctctgtgcccagccctggccagcccggcagccccagcgtgtccaagaagaagcacggcagcagcaagcccacagatggcaccaaggtggtgagccaccccatcactggagagatccagctgcagatcaactatgacctgggcaacctgatcatccacatcctgcaggccaggaacctggtgccccgggacaacaacggctacagcgacccctttgtgaaggtgtacctgctgcccggccggggccaggtgatggtggtgcagaatgccagcgctgagtacaagaggaggaccaagcacgtgcagaagagcctgaaccctgagtggaaccagaccgtcatctacaagagcatctccatggagcagctgaagaagaagaccctggaggtgacagtgtgggactatgaccgcttcagcagcaatgacttcctgggggaggtgctgattgacctgagcagcaccagccacctggacaacaccccccgctggtaccccctgaaggagcagacagagagcattgaccacggcaagagccacagcagccagagcagccagcagagccccaagcccagcgtcatcaagagccgcagccacggcatcttcccagaccccagcaaggacatgcaggtgcccaccatcgagaagagccacagcagccctggcagcagcaagagcagcagcgagggccacctgcggagccacggccccagccgcagccagagcaagacctctgtgacccagacccacctggaggatgctggggccgccatcgctgctgctgaggccgctgtgcagcagctgcgcatccagcccagcaagaggaggaagtag

SEQ ID NO: 180503 - DNA, 10908 bp, Artificial Sequence
  derived and/or modified sequence
atgggaaatgaggccagcctggagggggagggcctgcctgagggcctggccgctgctgctgctgctgggggcggggccagcggggccggcagccccagccacacagccatcccagctggcatggaggccgacctgagccagctgtctgaggaggagcggcggcagattgctgctgtgatgagccgggcccagggcctgcccaagggctctgtgcccccagctgctgctgagagccccagcatgcacaggaagcaggagctggacagcagccacccccccaagcagagcggccggcccccagaccccggccgcccagcccagcccggcctgagcaagagcaggaccacagacaccttccgctctgagcagaagctgcccggccgcagccccagcaccatcagcctgaaggagagcaagagcaggacagacctgaaggaggagcacaagagctccatgatgcctggcttcctgtctgaggtgaatgccctgtctgctgtgtcctctgtggtgaacaagttcaacccctttgacctgatcagtgacagcgaggccagccaggaggagaccaccaagaagcagaaggtggtgcagaaggagcagggcaagccagagggcatcatcaagccacccctgcagcagcagccccccaagcccatccccaagcagcagggccctggccgggaccccctgcagcaggacggcacccccaagagcatcagcagccagcagcctgagaagatcaagagccagcccccaggcaccgggaagcccatccagggccccacccagaccccccagacagaccacgccaagctgcccctgcagagagatgccagccggccccagaccaagcaggccgacatcgtgcggggggagagcgtgaagcccagcctgcccagccccagcaagccacccatccagcagcccaccccaggcaagcccccagcccagcagcccggccacgagaagagccagcccggccctgccaagcccccagcccagcccagcggcctgaccaagcccctggcccagcagcccggcaccgtgaagccccctgtgcagcccccaggcaccaccaagcccccagcccagcccctgggccctgccaagcccccagcccagcagacaggcagcgagaagcccagcagcgagcagcccggccccaaggccctggcccagcccccaggagtgggcaagaccccagcccagcagcccggccctgccaagccacccacccagcaggtgggcacccccaagcccctggcccagcagcccggcctgcagagccctgccaaggcccctggccccaccaagacccctgtgcagcccaagccacccagccagcagcccggcagcaccaagcccccaccccagcagcccggccctgccaagcccagcccccagcagcccggcagcaccaagccacccagccagcagcccggcagcgccaagcccagcgcccagcagcccagccctgccaagcccagcgcccagcagagcaccaagcctgtgtcccagacaggcagcggcaagcccctgcagcccccaacagtgagccccagcgccaagcagccccccagccagggcctgcccaagaccatctgccccctgtgcaacaccacagagctgctgctgcacgtgcctgagaaggccaacttcaacacctgcacagagtgccagaccaccgtgtgcagcctgtgtggcttcaaccccaacccccacctgacagaggtgaaggagtggctgtgcctgaactgccagatgaagagggccctgggcggggacctggcccctgtgcccagcagcccccagcccaagctgaagacagcccctgtgaccaccaccagcgctgtgtccaagagcagcccccagccccagcagaccagccccaagaaggatgctgcccccaagcaggacctgagcaaggcccctgagcccaagaagcccccacccctggtgaagcagcccaccctgcacggcagccccagcgccaaggccaagcagcccccagaggccgacagcctgagcaagccagccccacccaaggagcccagcgtgcccagcgagcaggacaaggcccctgtggctgatgacaagcccaagcagcccaagatggtgaagcccaccacagacctggtgagcagcagcagcgccaccaccaagccagacatccccagcagcaaggtgcagagccaggccgaggagaagaccaccccacccctgaagacagattctgccaagcccagccagagcttccccccaactggagagaaggtgagcccctttgacagcaaggccatccccaggcctgccagtgacagcaagatcatcagccaccctggccccagcagcgagagcaagggccagaagcaggtggaccctgtgcagaagaaggaggagcccaagaaggcccagaccaagatgagccccaagccagatgccaagcccatgcccaagggcagccccaccccacctggcccccggcccacagctggccagacagtgcccaccccccagcagagccccaagccccaggagcagagccgccgcttcagcctgaacctgggcagcatcacagatgcccccaagagccagcccaccaccccccaggagaccgtgacaggcaagctgtttggatttggagccagcatcttcagccaggccagcaacctgatcagcacagctggccagcccggcccccacagccagagcggccctggggcccccatgaagcaggccccagcccccagccagccccccaccagccagggcccccccaagagcacaggccaggcccccccagccccagccaagagcatccctgtgaagaaggagaccaaggccccagctgctgagaagctggagcccaaggccgagcaggcccccaccgtgaagaggacagaaacagagaagaagcccccacccatcaaggacagcaagagcctgacagctgagccccagaaggctgtgctgcccaccaagctggagaagagccccaagccagagagcacctgccccctgtgcaagacagagctgaacatcggcagcaaggacccccccaacttcaacacctgcacagagtgcaagaaccaggtgtgcaacctgtgtggcttcaaccccaccccccacctgacagagaactgccagacccagagggccatcagcggccagctgggggacatcaggaagatgcccccagcccccagcggccccaaggccagccccatgcctgtgcccacagagagcagcagccagaagacagctgtgcccccccaggtgaagctggtgaagaagcaggagcaggaggtgaagacagaagctgagaaggtgatcctggagaaggtgaaggagaccctgtccatggagaagatcccccccatggtgaccacagaccagaagcaggaggagagcaagctggagaaggacaaggccagcgccctgcaggagaagaagcccctgcctgaggagaagaagctgatccctgaggaggagaagatccgctctgaggagaagaagcccctgctggaggagaagaagcccaccccagaggacaagaagctgctgcctgaggccaagaccagcgcccctgaggagcagaagcatgacctgctgaagagccaggtgcagattgctgaggagaagctggagggccgggtggcccccaagacagtgcaggagggcaagcagccccagaccaagatggagggcctgcccagcggcaccccccagagcctgcccaaggaggatgacaagaccaccaagaccatcaaggagcagccccagcccccctgcacagccaagccagaccaggagaaggaggatgacaagagtgacaccagcagcagccagcagcccaagagcccccagggcctgagtgacaccggctacagcagtgatggcatcagcagcagcctgggggagatccccagcctcatccccacagatgagaaggacatcctgaagggcctgaagaaggacagcttcagccaggagagcagccccagcagccccagcgacctggccaagctggagagcacagtgctgagcatcctggaggcccaggccagcaccctggctgatgagaagtctgagaagaagacccagccccatgaggtgtccccagagcagcccaaggaccaggagaagacccagagcctgtctgagaccctggagatcaccatcagcgaggaggagatcaaggagagccaggaggagaggaaggacaccttcaagaaggacagccagcaggacatccccagcagcaaggaccacaaggagaagtcagaatttgtggatgacatcaccacccggcgggagccctatgattctgtggaggagagcagcgagagcgagaacagccctgtgccccagaggaagaggaggacctctgtgggcagcagcagcagtgatgagtacaagcaggaggacagccagggcagcggggaggaggaggacttcatcaggaagcagatcatcgagatgtctgcagatgaagatgccagcggctctgaagatgatgagttcatccggaaccagctgaaggagatcagcagcagcacagagagccagaagaaggaggagaccaagggcaagggcaagatcacagctgggaagcaccggcggctgaccaggaagagcagcaccagcattgatgaagatgctggccgccgccacagctggcatgatgaagatgatgaggcctttgatgagagccctgagctgaagtaccgggagaccaagagccaggagagcgaggagctggtggtgactggaggcggcggcctgcggcgcttcaagaccatcgagctgaacagcaccatcgctgacaagtacagcgctgagagcagccagaagaagaccagcctgtactttgatgaggagcctgagctggagatggagagcctgacagacagccctgaggacaggagcagaggagagggcagcagcagcctgcacgccagcagcttcaccccaggcaccagccccacctctgtgagcagcctggatgaggacagcgacagcagccccagccacaagaagggggagagcaagcagcagaggaaggcccggcaccggccccacggccccctgctgcccaccatcgaggacagcagcgaggaggaggagctgcgggaggaggaggagctgctgaaggagcaggagaagcagcgggagattgagcagcagcagaggaagagcagcagcaagaagagcaagaaggacaaggatgagctgcgggcccagaggcggcgggagcggcccaagaccccacccagcaacctgagccccattgaagatgccagccccacagaggagctgcggcaggccgctgagatggaggagctgcacaggagcagctgcagcgagtacagccccagcattgaaagtgaccctgagggctttgagatcagccctgagaagatcatcgaggtgcagaaggtgtacaagctgcccacagctgtgtccctgtacagccccacagatgagcagagcatcatgcagaaggagggcagccagaaggccctgaagtctgctgaggagatgtatgaggagatgatgcacaagacccacaagtacaaggccttccctgctgccaatgaaagagatgaggtgtttgagaaggagcccctgtatggaggcatgctgattgaggactacatctatgagagcctggtggaggacacctacaatggatctgtggatggcagcctgctgacccggcaggaggaggagaatggcttcatgcagcagaagggccgggagcagaagatccggctgtctgagcagatctatgaggaccccatgcagaagatcacagacctgcagaaggagttctatgagctggagagcctgcacagcgtggtgccccaggaggacatcgtgagcagcagcttcatcatccctgagagccatgaaattgtggacctgggcaccatggtgaccagcacagaggaggagaggaagctgctggatgctgatgctgcctatgaggagctgatgaagaggcagcagatgcagctgaccccaggcagcagccccacccaggcccccatcggggaggacatgacagagagcaccatggactttgacaggatgccagatgccagcctgaccagctctgtgctgagcggggccagcctgacagacagcaccagcagcgccaccctgagcatcccagatgtgaagatcacccagcacttcagcacagaggagattgaagatgaatatgtgacagactacacccgggagatccaggagatcatcgcccacgagagcctcatcctgacctacagcgagcccagcgagagcgccacctctgtgccccccagcgacacccccagcctgaccagctctgtgtcctctgtgtgcaccacagacagcagcagccccatcaccaccctggacagcatcaccaccgtgtacacagagcctgtggacatgatcaccaagtttgaggacagcgaggagatcagcagcagcacctacttccctggcagcatcatcgactacccagaggagatctctgtgtccctggacagaacagcccccccagatggccgggccagcgctgaccacatcgtcatcagcctgagtgacatggccagcagcatcattgaatctgtggtgcccaagccagagggccctgtggccgacacagtgtccacagacctgctgatcagcgagaaggaccctgtgaagaaggccaagaaggagactggaaatggcatcatcctggaggtgctggaggcctacagagacaagaaggagctggaggccgagaggaccaagagcagcctgtctgaaacagtgtttgaccacccccccagctctgtgattgccctgcccatgaaggagcagctgagcaccacctacttcaccagcggggagaccttcggccaggagaagccagccagccagctgcccagcggcagccccagcgtgagcagcctgcctgccaagccccggcccttcttccgcagcagcagcctggacatcagcgcccagcccccacctcctcctcctcctcctcctcctcctcctcctcctcctcctcctcctcctcctccacccctgcccccacccaccagccccaagcccaccatcctgcccaagaagaagctgactgtggccagccctgtgaccacagccacccccctgtttgatgctgtgaccaccctggagaccacagctgtgctgcggagcaatggcctgcctgtgacccgcatctgcaccacagcccctcctcctgtgccccccaagcccagcagcatccccagcggcctggtgttcacccacaggcctgagcccagcaagccacccatcgcccccaagcctgtgatcccccagctgcccaccaccacccagaagcccacagacatccaccccaagcccaccggcctgagcctgaccagctccatgaccctgaacctggtgaccagcgctgactacaagctgcccagccccaccagccccctgagcccccacagcaacaagagcagcccccgcttcagcaagagcctgacagagacctacgtggtgatcaccctgcccagcgagcccggcacccccacagacagcagcgccagccaggccatcacctcctggcccctgggcagccccagcaaggacctggtgtctgtggagcctgtgttttctgtggtgccccctgtgacagctgtggagatccccatcagcagcgagcagaccttctacatcagcggggccctgcagaccttcagcgccacccctgtgacagcccccagcagcttccaggccgcccccacctctgtgacccagttcctgaccacagaggtgtccaagacagaggtgtctgccaccaggagcacagcccccagcgtgggcctgagcagcatcagcatcaccatccccccagagcccctggccctggacaacatccacctggagaagccccagtacaaggaggatggcaagctgcagctggtgggagatgtgattgacctgaggacagtgcccaaggtggaggtgaagaccacagacaagtgcatcgacctgagcgccagcaccatggatgtgaagaggcagatcacagccaatgaggtgtatggcaagcagatctctgctgtgcagcccagcatcatcaacctgtctgtgaccagcagcatcgtgacccctgtgtccctggccacagaaacagtgacctttgtgacctgcacagccagcgccagctacaccactggaacagagagcctggtgggcgctgagcacgccatgaccacccccctgcagctgaccaccagcaagcatgctgagcccccctaccgcatccccagcgaccaggtgttccccatcgcccgggaggaggcccccatcaacctgagcctgggcaccccagcccatgctgtgaccctggccatcaccaagcctgtgacagtgccccctgtgggcgtgaccaacggctggacagacagcacagtgtcccagggcatcacagatggagaggtggtggacctgagcaccaccaagagccacaggacagtggtgaccatggatgagagcaccagctctgtgatgaccaagatcattgaagatgagaagcctgtggacctgacagctggaagaagagctgtgtgctgtgatgtggtgtacaagctgcccttcggccgcagctgcacagcccagcagcctgccaccaccctgcctgaagatcgcttcggctacagagatgaccactaccagtatgacaggagcggcccctacggctaccggggcatcggcggcatgaagcccagcatgtctgacaccaacctggccgaggccggccacttcttctacaagagcaagaatgcctttgactacagcgagggcacagacacagctgtggacctgaccagcggccgggtgaccactggagaggtgatggactacagcagcaagaccaccggcccctacccagagacccggcaggtgatctctggagctggcatcagcaccccccagtacagcacagccaggatgaccccacctcctggcccccagtactgtgtgggctctgtgctgcggagcagcaatggagtggtgtacagctctgtggccacccccacccccagcacctttgccatcaccacccagcccggcagcatcttcagcaccaccgtgcgggacctgagcggcatccacacagcagatgctgtgaccagcctgcctgccatgcaccacagccagcccatgcccaggagctacttcatcaccaccggggccagcgagacagacattgctgtgacaggcatcgacatcagcgccagcctgcagaccatcaccatggagagcctgacagctgagaccattgattctgtgcccaccctgaccacagccagcgaggtgtttcctgaggtggtgggagatgagagcgccctgctgattgtgcctgaggaggacaagcagcagcagcagctggacctggagcgggagctgctggagctggagaagatcaagcagcagagatttgctgaggagctggagtgggagcggcaggagatccagcgcttccgggagcaggagaagatcatggtgcagaagaagctggaggagctgcagagcatgaagcagcacctgctcttccagcaggaggaggagcggcaggcccagttcatgatgaggcaggagaccctggcccagcagcagctgcagctggagcagatccagcagctgcagcagcagctgcaccagcagctggaggagcagaagatccggcagatctaccagtacaactatgaccccagcggcacagccagcccccagaccaccacagagcaggccatcctggagggccagtatgctgccctggagggcagccagttctgggccacagaagatgccaccaccacagccagcgctgtggtggccatcgagatcccccagagccagggctggtacacagtgcagagtgatggagtgacccagtacatcgcccctcctggcatcctgagcacagtgtctgagatccccctgacagatgtggtggtgaaggaggagaagcagcccaagaagaggagcagcggggccaaggtgcggggccagtatgatgacatgggagagaacatgacagatgaccccaggagcttcaagaagatcgtggacagcggcgtgcagacagatgatgaagatgccacagacaggagctatgtgtccagaagaagaaggaccaagaagtctgtggacacctctgtgcagacagatgatgaggaccaggatgagtgggacatgcccaccaggagcaggaggaaggcccgggtgggcaagtacggggacagcatgacagaagctgacaagaccaagcccctgagcaaggtgagcagcattgctgtgcagacagtggccgagatctctgtgcagacagagcctgtgggcaccatccgcacccccagcatccgggcccgggtggatgccaaggtggagatcatcaagcacatcagcgcccctgagaagacctacaagggcggcagcctgggctgccagacagaggccgacagcgacacccagagcccccagtacctgagcgccaccagcccccccaaggacaagaagaggcccacccccctggagatcggctacagcagccacctgcgggctgacagcacagtgcagctggcccccagcccccccaagagccccaaggtgctgtacagccccatcagccccctgagccctgggaaggccctggagagcgcctttgtgccctatgagaagcccctgcctgatgacatcagcccccagaaggtgctgcacccagacatggccaaggtgcccccagccagccccaagacagccaagatgatgcagaggtccatgtctgaccccaagcccctgagccccacagcagatgagagcagccgggcccccttccagtacacagagggctacacctag

SEQ ID NO: 180504 - DNA, 1269 bp, Artificial Sequence
  derived and/or modified sequence
accaaggtgtggaacagcaacggcctgggcatccggatcgtgggcgggaaagaaattccaggtcactccggcgaaatcggcgcctacattgcaaagatcttgcccggcggaagcgcggagcagacggggaagctcatggaaggtatgcaagtattggaatggaatgggatcccactaactagcaagacatatgaagaagtccagtcgatcatctctcagcaaagcggcgaagcagaaatatgtgtgcgcctcgaccttaacatgctgtcagactcagagaatagtcagcatctcgagttgcacgaaccaccaaaggccgtagataaggccaaaagccctggtgtggatccgaagcaactggctgctgagctgcagaaagtgagcctgcagcagagccccctcgtgctctcatccgtggtagagaaagggagccatgttcattcagggcccaccagcgcaggctcatccagtgtgcctagccccgggcagcctggctcaccctctgtctctaagaagaagcatggcagctcaaagccaacagacggtactaaggttgttagccaccctatcactggggagatccagctgcaaattaactatgatctcgggaacctaatcattcatatactacaagcgcggaacttagtgcccagggacaataacggatatagcgacccatttgtaaaggtataccttctccctggtcgaggcgctgaatataagagacgaaccaaacacgttcagaagtccctgaatcccgaatggaatcagaccgtaatttacaagtcaatttctatggaacaactgaagaagaagactctagaagtgaccgtatgggattacgacaggttcagctccaatgatttcctgggcgaggtgttaatagatctgtcgtcaacttcgcacctggacaacactccccgatggtacccactgaaagaacagaccgaaagcattgaccacgggaagtcccactccagtcagtcttcacagcaaagcccaaaaccctctgtcattaagtctaggtctcacggcattttccccgacccctctaaagatatgcaggtcccaaccatcgagaagtcccattcctccccgggctcatccaagagctcgtctgaaggccatctccgctctcatggcccaagtcgctcacagtccaaaacaagcgtcacacagacccatctcgaggacgcaggagcagccatcgctgctgccgaagctgcagtccagcaacttcgcattcaaccgtctaagcgccgaaagtag

SEQ ID NO: 180505 - DNA, 14808 bp, Artificial Sequence
  derived and/or modified sequence
atgggcaacgaggccagcctggagggcgagggcctgcccgagggcctagccgcggctgctgctgctggcggtggggcgtccggagctggctccccttcacatacagccatacccgctggcatggaggccgacctgtcacagttaagcgaagaagaacggcgacagatcgcggcagttatgtcacgcgcgcagggcctgcctaagggctccgtgcccccagcagccgccgagtccccctccatgcatcgcaagcaggaattggatagttcccatccccctaagcagtctgggcgcccccctgatcccggtaggcccgctcagccaggtctgagtaaatctcgtaccaccgacaccttccggagtgagcagaaattacctggccgcagcccaagcaccatctccttaaaagagtccaaaagtcgaacggatctgaaagaagagcacaagtccagtatgatgcccggtttcttgtctgaagtcaatgccttaagcgcagttagcagtgtcgtgaataagtttaatccatttgacctcatctctgactcagaggcatcccaagaggaaaccaccaaaaaacagaaggttgtacaaaaggaacagggcaagccagagggcattatcaaacctccgctgcagcagcagccacccaagcccatcccaaagcagcaagggcccggcagggatccactgcagcaggatggtactccaaagagcatcagctcacagcagcccgagaaaattaagtctcagccgcccggcacaggcaagcccattcaggggcccacacagactccacagactgaccacgccaagcttcccctccagagggacgcctcacgtccacagacgaagcaggctgacatcgtgcgcggagagtctgtgaagccttctcttccatccccgagcaagcctcccattcagcagcctacacccgggaaaccacccgcacagcagcctgggcacgagaaatcccaacccggccctgctaagcctccagctcagccaagcggactgaccaagccgctcgcccagcagccaggcacagtgaagcccccagtgcagccgcctgggacgacgaagcctcccgcccaacccctggggccggccaagccgcctgcacagcagaccggctctgagaagcccagctccgagcagcctggccctaaggcactggcccaaccccctggtgtgggtaaaactcccgcccagcagcctggaccagctaaacctcccactcagcaggtcggtacacccaagcccctagcccagcagcccggtctccagtccccggccaaagcaccaggacctaccaagactcccgtacagcagcctggcccagggaaaatccctgcccaacaggccggtcccggcaagacctccgcccagcaaactggcccaacaaaaccccctagccagctccctggccctgcaaaaccgcctccacaacaacccggccccgctaagcctccgcctcaacagccaggttccgcaaaacccccttcccagcagcccggaagtacaaaaccaccccctcagcagcccgggcccgccaaacccagtccgcagcagccggggtctaccaagccccccagtcagcagcccgggagtgccaagccatcagctcagcagccaagtcctgccaagccttcagcccagcagagcactaaacccgtgagccagacaggcagcggaaagcccctgcagccacccaccgtcagtcctagcgcaaaacagcccccctcacagggtctacccaagaccatctgtccactgtgtaacacaactgaactgcttctgcatgtccctgagaaggccaactttaacacttgcaccgagtgccagaccacagtatgttccttgtgcggctttaatccaaatccccacctaactgaggttaaagagtggctctgtctgaactgccagatgaaacgggccctgggtggggatctggcgccagttccatcatcaccccaacccaagttaaagacagcgcccgtgacaacaacatctgcggtgtccaaatccagtccccagcctcagcagaccagtccaaagaaagacgcggcgcctaaacaggatctgagcaaggcacctgagccaaaaaaaccaccccccctggtcaagcagccaactctccatggctctccaagcgcgaaagcaaagcagccccccgaggctgattcactgagcaaaccagcaccccctaaggagccctcggtgccctcagaacaagacaaggcgccggtcgccgacgacaaacctaaacagccgaagatggtgaagcccacaacggacctggtgagtagttcctctgccacaacaaagccagacataccctcctctaaagtgcaatctcaggccgaggaaaagactacccctcccctaaaaacggactccgcgaagcctagccagagctttcctcccaccggagaaaaagtttcacctttcgacagtaaggcgatcccaagaccagccagcgattccaagattatatctcacccggggcccagcagtgagtctaagggccagaagcaagtggaccctgttcagaaaaaagaagagccgaagaaggctcagacaaagatgagtcctaaacccgacgcaaaaccaatgccaaaagggtctcctacaccacctggaccccgaccaaccgccggacagaccgtgcctaccccccaacaaagtcctaagcctcaagagcagtcacgccgtttcagtctgaatctgggcagcattaccgacgcccctaagtctcagccaaccactcctcaagagaccgtgacaggcaagttgtttggcttcggcgcctcgatttttagccaggctagcaatttaatcagtaccgccggccaaccgggccctcacagtcagagcgggcccggtgcccctatgaagcaggcgcccgccccttcccaaccccccacgagccaagggcctcctaaatctacagggcaggcaccccctgctccagctaagtcaataccagtgaagaaagagaccaaggctccggcagcagagaaactggaaccaaaggctgagcaagccccgacagtcaagaggaccgaaactgagaagaaaccaccccccatcaaggacagcaaaagccttactgctgaacctcagaaagcggttctgccaacaaaactggagaagtctcccaaaccagagtcaacttgtcccctgtgcaagaccgaattaaatattgggagtaaggatcctccaaactttaatacttgcactgaatgcaagaatcaagtctgtaacctgtgcgggtttaatccaactccacatctgaccgagatccaggaatggctctgcctcaattgccagactcagcgggccataagcggccaattgggggacatccgtaagatgccgcccgctccatccggtcccaaagcctctcccatgcctgtacccaccgaatcctccagccaaaagactgctgtgccaccacaggttaagctggtaaaaaagcaggagcaggaagtaaagaccgaggcagaaaaggttatactggagaaggtgaaggaaactctgagcatggagaaaatacctcccatggtcacgacagatcagaagcaagaggagagcaagctcgagaaagacaaagccagtgccctccaggagaagaagccactcccagaggaaaagaagctgattccggaagaagagaaaattcgcagcgaggaaaagaagccacttctggaggagaagaaaccgaccccagaagacaaaaagctgcttcccgaagcgaagacatccgcacccgaggaacagaaacacgacctgcttaagtcacaggttcagatcgcagaagagaaactagagggcagagtcgcaccaaagaccgtccaggaaggaaaacaacctcaaacaaagatggaagggctcccatccgggacccctcagagccttcctaaagaggatgacaaaaccacaaagacaattaaggaacagcctcagcccccatgcacagctaagcccgaccaggtcgagcctggtaaagaaaagaccgaaaaagaagatgacaaatctgacacctctagttcacagcagccaaaatcacctcagggcctgtctgataccggatattccagtgatggcatctccagtagtctcggtgaaattccaagcctcatcccgacggatgagaaagatatactgaaggggctgaagaaggatagcttcagccaagaaagctcgccaagttccccatctgacctggctaagctagagagcaccgtgctttcaattctcgaggctcaggccagcacccttgcggatgaaaaatccgagaagaagactcaaccccatgaagtgagccctgagcagcctaaagaccaagagaagactcagagcttgagcgagaccctagagatcacgatcagcgaggaggaaattaaggagagtcaagaggaacgtaaggacacatttaaaaaggatagtcaacaagacattcccagcagcaaggatcataaggaaaagtctgaattcgtggatgatatcactactagacgcgaaccatacgattcagtggaggagagtagtgagtcagaaaactcacctgtgccacagaggaaaaggagaacgtcagtagggagctcaagctcagacgaatataagcaggaagatagtcaagggagtggcgaagaggaggactttattagaaaacagatcatcgagatgtcagccgacgaagatgcgtctggctctgaggatgatgaattcattcgtaaccagctgaaagagatcagtagctctacagagtctcaaaagaaggaggagactaaagggaagggaaaaatcactgctgggaagcaccgccgcctcacccggaagtcgtctacgagcatcgacgaggatgctgggagacggcacagttggcacgatgaggacgacgaggcgtttgacgaatccccagagctcaagtacagagaaactaagtcccaggaatcggaggagctggtggtcactggtgggggaggtttacgacgctttaaaaccatcgaattaaactccaccattgccgataaatactcggcggagagttctcagaagaaaacaagcctctacttcgatgaagaacctgaactcgaaatggagtctctgacagactctccagaggaccggagtagaggagaagggtccagctctctccacgctagctcctttaccccaggaacttcacctaccagcgtgagctctctcgacgaagacagtgattcgtctccgtcccacaaaaagggagaatctaagcaacagcggaaagcccggcaccgtccccacggtcccttattgcccaccatcgaggacagtagcgaagaagaggaactgcgggaggaagaagagcttctgaaggaacaggagaagcagagagagattgaacaacaacagcgaaagtccagcagtaagaaatccaagaaagacaaggacgaactgagagcgcagcgtagacgcgaaaggcctaaaactccccctagcaatttaagccccatcgaagacgctagcccaactgaagagttgcgccaggctgcggaaatggaagagctccaccgctccagctgcagtgagtattcgccgtctatcgaatctgacccggaaggattcgaaatctccccagagaagatcatcgaggtgcagaaggtgtataagcttcctactgcggtgtctctgtactcccccacagacgagcagagtatcatgcaaaaagaaggctctcagaaggctttaaagagcgccgaagaaatgtacgaagaaatgatgcacaagactcacaagtataaggctttccctgctgccaatgaaagagacgaagtgttcgagaaagagcctctgtacggcgggatgttaatcgaagactacatctacgaatcactcgtcgaggatacctataatggatcagtggacggtagcctactaaccagacaggaggaagagaacggcttcatgcaacagaaaggaagggaacagaagataagactttctgaacagatatacgaagaccccatgcagaaaatcacagacctgcagaaggaattttatgaactcgagagcttgcactccgtagtgccccaggaagacattgtgtcatccagcttcataatacctgagtcacacgaaatcgtggatttgggaactatggtcaccagtaccgaggaagaaagaaagctgctggatgctgacgccgcatacgaggaactgatgaagcgtcagcagatgcaactgacaccgggttctagtccaactcaagcgccgattggagaagacatgaccgaatccacaatggattttgataggatgccagacgcatccctcaccagcagtgtgttgtctggggcgagcttgactgacagtaccagttctgcgactctgagcatcccagacgtcaaaataacccaacacttttccaccgaggaaattgaggacgagtatgttacagactatacccgcgaaatccaagagatcatcgcacatgagtctctcatcctgacttatagcgaaccctccgagagcgctacctccgtcccaccaagcgatactccctctctcacctccagtgtgtcttccgtttgtacaacggattcttcttcccccattacaacactagacagcattaccaccgtgtacacagaacctgttgacatgattactaaattcgaggatagcgaggagatttccagctcaacctactttccgggctcgattattgactatcccgaagaaattagtgtgtcccttgatcggacagcccccccggatgggcgtgccagcgcggaccatatagtgataagcttaagtgatatggctagcagtataatagagagtgttgtgcccaagcctgaggggcccgtggctgatacagtatccaccgatcttctgatttccgagaaggatccagtgaagaaagcgaagaaggaaacaggcaacggtatcatcctggaggtccttgaggcctatcgggataaaaaggaactcgaggccgagcgaaccaaatcatctctgtctgagaccgtgtttgaccatcctccttcctccgtgattgctttgccgatgaaggagcaattgtccaccacctacttcacttccggcgaaacattcggacaggagaagcctgcaagccaactaccaagtggatctccaagcgtgagtagtctccccgccaagcctaggcctttctttaggagctcctctctcgatatctctgctcagcctcctccccctcctcctccgccgccgccaccaccgccaccaccacctccacccccgccgccccccctacctccaccaacgagccccaaacccaccatactgccaaagaaaaagttaacagttgcatcacccgtcacgactgcaacgcctttgtttgacgccgtcaccaccttggagaccacagccgtgctgagatcgaacggcttgccagttaccaggatctgtacgaccgcaccacccccggttccaccaaagccgagtagtatcccatcgggactcgtcttcacacatcgccctgaaccctcaaagcccccaatagccccaaagccagtgattccccagttacccactaccactcaaaagccaacagacatacatcctaaacctactggactgtctctcacctcatcgatgactcttaacctcgtcacctcggccgattacaaactcccatccccaacctctccactgtcccctcattcaaataaatctagtccccgattttcaaagtctctgactgagacctacgtggtaatcacccttccaagtgaaccaggtacaccaaccgattcctcagctagccaggcgataacgagctggccattaggatccccaagcaaggatctagtatccgttgagcctgtgttcagtgttgtgccgcccgttacagcggtggaaatccccattagtagcgaacagactttttatatctcaggagcactgcagacgttctcggctacacctgtgactgcccctagcagctttcaggctgctccaaccagtgtgacgcagtttttgacaacggaagtcagtaagacggaagtatctgctacacggagcaccgctccctctgtgggcctgagctccatcagcatcaccataccaccggaacctctcgcccttgacaatattcacttggaaaaaccacagtacaaggaggacggaaagcttcagctcgttggcgacgtaatcgacctgaggactgtgcccaaggtggaagtgaagacaactgacaaatgtatcgatctgtccgcgtcaactatggacgttaagcgtcagattactgcaaatgaagtgtacggaaagcagattagcgccgtgcaaccaagcatcattaatctctccgtgacgtcttccatcgtcacgcctgtaagtctggcgacggagaccgtgacatttgtgacgtgtacagctagcgcaagttacaccacaggcactgaatctctggttggggcagaacacgccatgactactcccctacaactgacaacctctaagcacgccgagcctccatatcggatcccttccgatcaggtgttcccaatagctagggaagaggcgcccatcaaccttagccttggtactccagcccacgcagtgacccttgccatcaccaaacccgtgaccgtgccaccagtcggcgtgactaacggctggaccgactccaccgtaagccagggaatcacagatggcgaagtggtagacctttccaccacaaagtctcatcgaacggttgttactatggatgaaagcacctccagtgtcatgaccaagataatcgaggacgaaaagccggtggatttgactgccgggaggagggcagtgtgctgtgacgtcgtatataagcttccctttggcagatcctgcacggcacagcaacccgccacaactctgccggaagaccgattcggttatagagatgaccattaccagtacgaccggagcgggccatatggatacagaggcatcggcgggatgaagccatcgatgtccgacaccaatttagcagaggcaggccatttcttctacaagtctaagaacgctttcgactactccgagggcaccgataccgctgttgatctgacctctggacgcgtcactacaggcgaggttatggattactcttcgaagaccaccgggccttatcccgaaacccgccaagtcatttcgggtgccggtatcagtactccgcagtactcaactgcccggatgacccctccacctggccctcaatattgcgttgggtctgtgctgcgctcttctaacggtgtggtgtactcctctgttgcaacccctacgccatcaaccttcgcaataaccacccaacctggcagcatcttcagcaccaccgtgcgggatttgagcggcattcacactgcagacgctgtgacatcactgcccgcgatgcaccactcacagcccatgccccggagttactttatcacaaccggggccagcgaaacagacattgcggtgaccgggatcgacatcagcgcatccctgcagaccattaccatggaaagcctaaccgcagagactatcgattctgtcccaacactgacgactgccagcgaggtgttccccgaggtagttggagacgagtccgcattgcttattgtacctgaggaggacaagcagcaacaacagctcgatctcgaacgcgagctcttggagctcgagaagatcaagcaacagaggttcgcggaagagttggagtgggaaagacaggagatccagcgtttcagagagcaggaaaaaattatggtccagaagaaactggaggagctgcaatcaatgaaacagcatttactctttcagcaagaagaagaacgccaggcccagttcatgatgaggcaagagacgcttgcccagcagcagctgcagctcgagcagatccagcagctccagcagcagctccaccagcagctcgaggagcagaagataaggcaaatataccagtacaactacgacccctctgggaccgcctcaccacagaccacaacagagcaagctatcctcgagggacaatacgctgccttagagggtagccagttctgggccaccgaggatgccaccactaccgcttctgccgttgtggccattgaaattccgcagtcccagggttggtacactgtgcagtctgacggagtcactcaatacatcgccccacccggcattctgagtaccgttagcgaaataccactgacggatgtggttgtcaaagaggaaaaacagccgaaaaaacgttcttctggcgctaaagtgcggggacagtatgacgacatgggcgagaatatgacggatgatcctcgctcttttaaaaagattgtcgactcaggcgtgcagactgatgatgaagacgccaccgaccgtagctatgttagccgccggagacggacaaagaagagtgtggatacttctgtacagaccgacgatgaagaccaggacgaatgggatatgcctaccagatcaagacgtaaggccagagtgggtaaatacggtgatagcatgacagaagcagataaaaccaaaccgctctcaaaagtgtcttccatcgccgtgcagaccgtggccgagatttccgtccagaccgagcctgtgggtacaatccgaaccccatcaatccgggcaagagtggatgctaaggtcgaaataatcaagcacattagcgcaccggaaaagacctacaaaggtggctcattaggctgccagaccgaagcagattccgacacgcagtctccacagtacctcagtgcaacttccccccccaaggataaaaagagaccaacccctctggaaattggttatagctcacatctacgggctgatagtaccgtgcagctagccccatcccctcccaagtccccgaaggtcttatatagccccatctcccccttatcccccgggaaggcacttgagtcagcattcgttccgtacgagaagcctctgccagatgacattagtcctcagaaagtgctgcatccagacatggctaaggttcctccagccagtcccaagaccgctaaaatgatgcagcggagcatgtcagatccaaagcccctttcgcccaccgctgacgaatcatcccgggctcccttccagtatactgagggttacaccaccaaagggtctcaaacaatgacgtcctcgggggctcagaaaaaagtcaagcgcacactccccaatcccccccctgaagaaatctccactggaactcagtctaccttttcaacaatggggaccgtgagccgccgacgcatttgtcgcaccaacacaatggcccgggcgaagatcttgcaggacattgacagggagctagatttagtggagagagagtccgccaaattgcgcaagaagcaggcagaactggacgaggaggaaaaagaaatcgacgccaagcttcggtatttggagatgggcattaatcgccggaaagaggccctgctgaaggaacgggaaaaacgagagcgcgcgtatctgcagggtgtggcggaggacagagattacatgtctgactcagaggtaagctcaacacgtcccaccaggatagagtcccagcacggcattgagagaccccgcactgctccacagaccgagtttagccaatttatcccaccccagactcagactgagtctcagttggtgccacccacttcgccttatacccagtatcaatactcatccccggccctccccacacaggcgcccacttcctacactcagcagtcacacttcgagcagcagacactgtaccatcagcaggttagcccataccagacccagccaacgttccaggcggtggccaccatgagttttactcctcaagtgcagcccacgcctacacctcagcccagctatcagctccccagccagatgatggtcatacagcaaaaaccgcgccaaactaccttgtacctagaacctaagattacctccaactatgaggttatacggaaccagcccttaatgattgcaccagttagcactgacaataccttcgccgtatcccacctcggcagcaagtataattcgctggatttacgcatagggctggaagaacgctcgagcatggcctcgtctcccatatccagcatttcggctgattcgttttacgccgatatagatcatcacacaccccgtaactatgtactcattgacgacatcggtgagataaccaaagggactgccgccctctctactgcctttagtctccatgaaaaggatttatctaagacagaccgcctgctgcgtacaaccgaaactaggagatctcaggaagttaccgatttcttagcccccttgcaatccagctctcggctgcattcctatgttaaagcggaagaagatcccatggaagatccatacgaacttaagctgttaaaacaccagattaagcaggagtttcgtagaggaacagagagtctggaccaccttgcgggcctctcacactactaccatgccgatacaagttatcgccacttcccaaagagcgaaaagtatagcatttctcgactcaccctggagaaacaggcagctaaacagttgcccgccgctattctttaccaaaagcaatcaaagcataagaagtccctgatagatccgaagatgtcaaagttcagtcccatccaggagtcacgggacctggagcctgattacagctcgtatatgacatcgtcaacttcgtccataggcggaattagctcccgagctcgcctcttgcaggacgatatcacatttggtctccggaaaaacataaccgaccagcagaaatttatgggaagctcgcttgggacaggattaggcacactcgggaatactatcaggtcggctcttcaggacgaagcagacaagccatactcctccggaagtaggagtcgcccttcaagtagaccctcatctgtctacggcctggatctgtcaattaaacgtgacagctctagctccagtcttcgcctgaaggcccaagaggctgaagcccttgacgtgtctttcagtcacgccagcagcagtgcgcggacaaagccaacttccctgcccatatcacagtcccgagggcggattccaatcgtagctcagaactctgaggaggaatcgcccctttccccggtgggccagcctatgggcatggcaagggccgcggccggacctctgccacctattagcgcagacactagggatcagttcggatctagccacagtctgccagaggtgcaacagcacatgcgtgaagaatcacgtactcgcggttatgaccgtgatattgcctttatcatggatgacttccaacacgctatgtctgattctgaggcctaccaccttcgcagggaggaaacagactggttcgataaaccccgagaatcccgcttagagaacggacacggcttggatagaaagctgcctgagcgcttggtccattctagacccttatcccaacatcaggaacagatcattcagatgaatggcaagacgatgcactacatattcccacacgcacgcattaagattaccagagactctaaggaccacacagtgtctgggaatggtttggggatccggatagttgggggaaaagagataccggggcattccggcgaaatcggcgcctatatagcaaagatcttaccaggaggatctgctgaacagactggaaagctgatggaagggatgcaagtgctcgaatggaatggcatccctctgacaagcaaaacatacgaggaggtccaatctatcatctcccaacagtctggcgaggcggaaatatgcgtccgtctagacctcaatatgctctccgacagtgagaacagccagcacttggagttacacgaacccccaaaggccgtagataaagccaaaagcccaggagtcgatcctaagcagcttgccgccgagctccaaaaggtgtccctccagcaaagccctctcgttctgagctctgttgtggagaaaggtagccacgtgcactctggaccaactagcgccggatcttcttccgtgcccagcccgggccagcccggcagccctagtgtgagtaagaaaaagcacggaagctcaaaaccgactgacggaactaaggttgtgtcgcaccctattacgggagagattcagttacagatcaattatgatctgggaaatctgattatccacatcctgcaggcaagaaatctggtgcctcgcgataacaacggctattctgacccattcgtgaaagtgtacctcttacccggacgggggcaagtcatggtcgtgcagaacgcctccgcagaatataaaagacgcaccaagcatgtgcagaaatctctaaaccccgaatggaaccagactgtgatctacaaatcgatcagtatggagcagctcaaaaaaaaaacacttgaggtgaccgtatgggactacgatcggttcagctctaacgacttccttggcgaggtactcattgacctgtcttccacttctcacctggataacacgcctcggtggtacccactaaaagaacagactgagagcattgatcacggtaagtcccactcaagccaatcaagccagcagtcccccaagccctctgtgatcaagtctcgtagtcacggtatattccccgaccccagcaaagacatgcaggtgccaaccatcgaaaaatcccattcctccccggggtcctccaagagcagcagcgagggtcacttgcggagtcacgggccctcacggagtcagtccaaaaccagcgtcacacagacccatctcgaagatgccggagcagcgatagccgctgccgaggctgctgtgcagcagttaagaattcagccaagcaaaaggcgaaagtag

SEQ ID NO: 180506 - DNA, 10908 bp, Artificial Sequence
  derived and/or modified sequence
atgggcaacgaggccagcctggagggcgagggcctgcccgagggcctcgcggcagccgctgccgcgggaggcggagcttctggcgcaggttctccttcacacacagcgatccctgccggtatggaagcggacctctcacagctatctgaggaagaacgacgtcagattgcagccgtgatgagtcgggcccagggcctgcccaagggctcagtgccaccagcggccgccgaaagtcccagtatgcatcggaaacaggaactggattcttctcaccctcctaaacagagcggacgcccgcctgaccccggcagacccgcacagcctgggttgagcaagtcacgcacaacagatactttcaggagtgagcaaaagttgccagggagatccccctctactatctcactgaaggaatctaaatctcgaaccgatctgaaggaggaacacaagtcttctatgatgccgggcttcctgagcgaggtgaatgccctgagtgccgtgtcttccgtggtgaataagtttaacccattcgacctgatcagtgattctgaagcttcccaggaggaaacaaccaaaaagcagaaggtggtccagaaagagcagggaaaaccagagggcatcattaaaccacctttgcaacagcaacctccaaagccaattcctaaacagcaaggacctgggcgcgacccactccaacaggatgggacaccaaagtcaataagctcacagcagccagaaaaaatcaagtcacagcctcccgggaccgggaagccgatccagggccccactcagaccccccagacagaccatgccaaattacccttacaacgggacgcttctcgaccccagactaagcaagccgatatagtcaggggcgagagtgtcaaaccaagtctaccttcgccctccaagccaccgatccagcagccaactccaggtaaaccacctgcccagcagccagggcacgagaaatctcagccagggcctgccaagcccccagcccaaccttctgggcttacaaagccgctcgctcaacagccgggaacggtgaaaccccccgtccaaccccctgggaccaccaaaccccccgcccagccgctggggcccgccaagcccccggcccagcagaccggcagcgagaagcccagctctgaacaacctggcccgaaagctctggcacagcctcccggagtcgggaagacacctgcccaacagcccggtcccgccaagcccccgacccagcaggtgggcacacccaaacccctggcacagcagccgggtctccagagcccagctaaggcaccagggcctacgaagaccccggtgcagccaaagccaccatctcagcagccaggatcaacaaagcccccccctcaacaacccggacctgccaagccctcccctcagcagccagggtcaacaaagccgccatcccaacaacctggcagcgccaagccatccgcgcagcagccctcacccgcgaagcctagtgctcagcagagtacaaaacccgtctcccaaacgggctcaggcaaacctctgcagccccctaccgtgtctccatcggcaaaacaaccaccgagtcaggggctgcctaaaacaatctgcccactatgtaacactactgagctgttgctgcacgtgccggagaaagcaaattttaatacttgtactgaatgtcagacaactgtatgttctctctgcgggttcaacccaaacccccatctaacagaggtgaaagagtggctttgcttaaattgccagatgaagcgagctctgggcggagatctcgcccccgttccctcaagcccccagccaaagctaaagaccgctcctgtgaccaccacatcagcagtgtctaagagcagcccccagccgcaacagaccagcccaaaaaaagacgccgcacctaagcaagacctgagtaaagcaccagagcccaagaagccccctcccctggtcaagcagccgactctccatgggtccccaagtgctaaagccaagcagccccctgaggcagattccctgtcaaagcctgctcctcctaaggagcctagcgtgcccagcgagcaggacaaggccccggtggccgacgataagcccaaacagccgaagatggttaaacccactaccgatctagtgagctcgtcaagcgctaccactaagcccgacataccatccagcaaggtgcagtctcaggccgaggagaagaccaccccccccttaaagactgattctgctaaaccgagtcagagcttcccccccacgggggaaaaggtatccccgttcgactccaaggcaataccgcgacccgctagcgacagtaagatcatcagccatcctggaccaagttcggaatcgaagggacagaagcaagttgacccggtgcagaaaaaggaagaaccaaaaaaagctcaaaccaaaatgtcaccgaagccggacgccaaaccaatgccgaagggtagcccaacgcccccagggcctagaccaacggcaggccagacagtccctacaccgcagcagagtcccaaaccacaggaacaatcaagaaggttctccctgaatctgggttcaattacagacgctccaaaaagccagccgactacccctcaggagactgtgactggtaagctcttcggcttcggagcctcaatcttcagtcaagcctctaatttaatctctactgccgggcagcccggtccccacagccagagcggcccaggcgcgcccatgaaacaagcccccgctcctagccagccgccaactagtcaggggcctcctaagagcaccggccaggccccaccagcgcctgctaagtccattcccgtcaagaaggaaaccaaggcccctgctgctgagaagcttgaacctaaagccgaacaggcccctactgtgaagcgtaccgaaaccgagaagaaaccaccacccattaaagatagtaaatcattgaccgctgagcctcagaaagcggtcctgccaaccaagctcgaaaagtcacctaaacccgagtcaacttgtcccctgtgtaagactgaactgaatattggaagcaaggacccccccaatttcaacacttgtactgagtgcaaaaaccaagtttgcaatctgtgcggatttaaccctaccccgcatctgactgagaactgccagactcagagggcgatttctgggcaactgggtgatatacggaaaatgccaccagcccccagtgggcccaaggccagtcccatgcctgtgccaacggagagcagctctcagaagacagcagtacctcctcaggtgaagttagtcaagaagcaggagcaagaagtgaagactgaggcagagaaagtgatcctggagaaagttaaggagaccctttctatggagaaaattcctccaatggtcactacggatcagaagcaggaggagtcaaagctggagaaggataaggcaagcgccctgcaggaaaaaaagcccctgccagaagaaaagaagctgatcccagaggaggagaaaatcaggtcagaagaaaagaagccccttctggaagaaaaaaagcccactcctgaagataaaaagcttctacctgaggccaaaacatcggcccctgaggaacagaagcacgacctcttgaagtcgcaggttcagatcgccgaggagaaactggagggcagagtcgcaccgaaaaccgtccaagaaggaaagcaaccgcaaactaagatggaaggtctgccatcagggacgccacagtcattacccaaggaggacgataagaccacaaagaccatcaaagaacagccgcagccaccatgcactgccaaacctgatcaggaaaaagaggatgacaaatccgacacaagcagtagccagcagccaaaatctccccagggcctgagcgataccggctactctagtgacggcatttcttccagcctgggagagatccctagcctgattcccaccgatgagaaggacatccttaaaggcctaaaaaaggactcgttttctcaggaatctagtccgagttctccgagtgacctggccaaactagagtccaccgttctgtccatactggaagcccaggcgagtacactcgcagacgagaagtctgagaaaaaaacgcagccgcatgaagtgtcacctgaacaacctaaggatcaggaaaagactcaaagcttgtccgagaccctggagataaccatctcagaagaagagattaaggaaagccaggaagagcggaaggacacatttaagaaggactctcagcaggatattccctcctcaaaggaccacaaggagaagagtgagttcgtagacgatatcacaaccagaagggaaccctatgacagtgtcgaagaatctagtgagtcagagaactctccagttccccagcgcaagagacgcaccagcgtgggcagtagttcgtcagacgagtataagcaagaggacagtcagggatccggtgaggaggaagatttcattcgtaagcagatcattgagatgtctgccgacgaagacgccagtggcagcgaggatgatgaatttatccggaatcaacttaaagagataagctcgtcaaccgaatcccagaagaaggaggaaacgaaagggaagggaaagattaccgcggggaagcatcgccgcctgaccagaaagtcctcaaccagtattgacgaagatgcagggcgccgtcactcctggcacgatgaggatgacgaggcctttgatgagtcccctgaattgaagtaccgcgagactaaaagccaggagagcgaggaactcgtggtgacaggaggcggcgggttacggaggttcaaaactatagagctgaattcaaccatagcggataaatattcagccgagtcctcccagaaaaagacttctttatattttgatgaggaacccgaactggaaatggagtcgctcaccgattctccagaggatagatccagaggcgagggcagctcatctctgcacgcctcgtctttcacacctggcacctcacctacctccgtctcgtcactggatgaggacagcgatagttcgccaagccataaaaagggggagagtaaacaacagcgcaaagcccggcacaggccccatggcccactactgccgacgatcgaagacagctccgaggaggaagagctccgggaggaagaggaattgttgaaagaacaggagaagcagagagaaatagagcagcagcagaggaagtctagtagtaagaagtccaaaaaagacaaagacgaactccgggcgcagaggcgtcgggagcgacccaaaaccccaccttcaaacttatccccgatcgaggacgccagccctacagaagagctccggcaagctgcagagatggaggaactccacaggtcttcttgcagtgaatacagtccttccatcgaatccgatcctgagggcttcgagattagcccggaaaaaatcatcgaggtccaaaaggtctataagctgcccactgccgtgtccctgtattcaccaaccgatgaacaatccattatgcagaaagaaggatcccagaaggcactgaagtctgccgaagagatgtatgaagagatgatgcacaagacacacaaatataaggctttcccagcagcgaatgagcgggacgaggtctttgagaaggagcctctgtacggggggatgttgattgaagactacatctacgagagcctggtagaggacacctataatggtagcgtcgacggaagcctgctcacacgccaggaggaggagaacggcttcatgcaacagaagggacgtgagcagaagatccgactgtccgaacagatttacgaggatcctatgcagaagataaccgaccttcaaaaggaattttatgaacttgagtcactacacagcgtggtcccgcaggaagacatcgtgtcaagtagcttcatcataccggaatcgcatgaaattgtcgatttggggaccatggttaccagcaccgaggaagaacggaagctgctcgatgccgacgcggcctacgaagagcttatgaagcggcagcagatgcagcttactcctggtagtagccccacccaagccccaataggagaggacatgacagaaagtacgatggattttgatcgcatgccagatgctagcctgacgtcaagtgtgctgtcaggtgcatctctgactgacagcacatcttctgcaaccctctccattcccgacgtgaagattactcagcatttctccacagaagagatcgaagatgagtatgtgactgattatacccgcgagattcaggaaataatcgcccacgagagcttgattctgacctacagcgaaccatccgagagtgcaacctctgtaccaccgtccgacacaccatctctgaccagtagcgtgtcaagcgtttgcacaactgattcatctagtcctataaccactcttgatagcattactaccgtgtacaccgaacccgtagacatgattaccaagttcgaggatagtgaggaaatttctagtagcacctactttccaggctccatcattgactatcccgaagaaatctcagtctctttggaccggacagctccccccgatggcagggcatccgcagatcatatcgtgatctctttaagcgatatggctagctcgattattgaaagtgttgtccctaaacccgagggccccgtggctgacacggtctccacggacctccttatctctgagaaggatccagtgaaaaaggcaaagaaggagaccgggaatggcataatcctggaagtcctggaggcctatcgggataagaaggaactggaggccgagagaaccaaaagcagcctcagcgagacagtcttcgatcatccaccatctagtgtgattgccctccccatgaaggagcaattatctactacctactttacaagtggtgaaactttcggacaggagaaaccagcatcacagttgcctagcggctccccctcagtcagcagtctccccgcaaagccgcgccctttcttcagaagctcctccctggatatttccgcacaacctcctccacccccaccgcctcccccccctccacctcccccccctcctccacctccacccccaccacttcccccccctacgtctccgaagcctaccattctgcccaaaaagaaactaactgtagcaagcccagtcaccactgctacaccactattcgacgccgttaccaccctggaaactaccgctgttctccgcagcaacggcctgccagtgaccagaatctgtaccaccgcccccccaccggttcctcctaagccctcttccatcccctcaggacttgtctttacgcaccgaccagagccaagcaagcctcctatcgcgcccaagcctgtgataccgcaactgcccacaaccacacaaaagccaactgacattcacccaaaaccgaccggattgtctctgaccagctcaatgacactgaacctggttactagtgctgattataaattgcccagcccaacatcacccttatcccctcactccaacaagtcaagccctaggttttctaagagcctcactgagacttacgtagtcatcacgctcccgtccgaacctggaacacccacagattcaagtgcaagtcaagctatcaccagctggcccctcggttccccctccaaagatctggtgtcagtggagccagtcttttccgtcgtaccgcctgttaccgccgtggagatccctatctctagcgagcagaccttttatatctccggcgccctccagacattctcagccactcccgtaaccgctcctagcagttttcaggccgctcccacgagcgttacccagtttctgacaaccgaggtctccaagacagaggtttccgcaacccgcagcaccgccccctcagtagggttgagcagtatcagtattactatccctcctgagcccctggcattggataacatacacttagaaaaaccacaatataaggaagacggtaaattgcagttagtcggagacgtaattgacttgcggaccgtccccaaggtagaggtgaagacaaccgataagtgcatagacctttctgcaagtacaatggacgtcaagcgccagataacggctaatgaagtttacggcaaacagatatccgccgtgcaaccgtctataatcaaccttagcgtcacaagctccatcgttactcccgtatccctggccactgaaaccgtcacattcgtgacttgtactgcttctgcatcctacactacaggcacagaaagcctcgtgggagccgaacatgctatgaccacaccattgcagctgaccacgtctaagcacgccgaaccaccataccgcattccctccgatcaggtgtttcctatcgctcgtgaggaagcacctattaacctgagtttgggcacccccgctcatgccgtcacccttgcaattacaaagccagttacagtgccgcccgtgggggtcactaatggctggaccgattcgacagtgagccaggggatcaccgatggagaagttgtcgatttgtctactacaaaaagtcaccgcacagtggtgacaatggatgaaagcaccagtagtgttatgacaaaaattatagaagacgaaaaacctgttgacctgacggctggtagacgcgctgtctgctgtgacgtcgtctacaagctcccatttgggaggagctgcacagcccagcaacccgccactacattgcccgaggatcgttttggctaccgcgacgaccattatcagtacgatcggagcggcccttatgggtatcggggtatcggaggcatgaagcccagtatgagcgatactaatctagctgaggctggtcattttttttataagtctaaaaatgctttcgattactccgagggcactgatacagccgtcgacctcacgagcggtagggtgacaacaggagaggtgatggattatagcagcaaaacaactgggccataccctgagactaggcaggtgatttcaggcgccggcatcagtactccccagtatagcacagcaagaatgactcccccacccgggccccagtactgcgtgggctcagtgcttcgcagctctaatggagtggtgtacagttcagtggctacccctaccccatccactttcgcaatcaccactcaacctggaagcatatttagtactactgtgagagatctcagcggaatccacacagccgatgcagtcaccagtcttccggcaatgcaccatagtcagcccatgcctcggtcctattttatcactaccggggcgtcagagacagatatcgcagtgactgggattgatatcagtgccagtcttcaaacaattacgatggagtctctgactgcagaaaccattgattccgtgcctaccttaaccactgcaagcgaggtgttcccagaggtggtgggggatgaaagtgccctgctcatcgtgccagaggaggacaaacagcagcagcagctggatctggagcgcgagttgctggagttggagaaaatcaagcagcaaagattcgccgaggaacttgagtgggagaggcaggaaattcaaagatttagggaacaggagaaaattatggtgcagaagaagctcgaagagctgcagagcatgaaacaacatcttctctttcagcaggaggaagaacgccaggcgcagtttatgatgaggcaagagacactcgctcaacagcaactgcagctcgagcaaattcaacaactgcaacagcagctacaccagcagctggaagaacagaagatcaggcaaatctatcagtataactacgatccttcaggaactgcctcacctcagaccacgactgaacaggccatcctggagggtcaatacgctgcacttgagggcagtcagttctgggcaactgaagacgcgacaacaacggcatccgcggtggtcgcaatcgagatcccccagtcacaggggtggtatactgtacagtcagatggcgtaacccagtatattgcccctcccggtatcttatctacggtgtccgagataccactcacggatgtggttgtgaaggaagaaaagcagccgaaaaaacgatcgtcaggcgctaaagtacggggtcagtacgacgacatgggggagaatatgaccgacgaccccagatcgtttaagaagattgtggattcaggcgtgcagacagacgatgaggacgcgactgacagatcttacgtatcgaggcgtaggagaactaagaagtcagtcgatacgtctgtacagaccgacgatgaggaccaggacgagtgggacatgccgactcggtctcggcgtaaggcccgagtcggcaagtatggagattccatgactgaggctgacaaaacgaaaccgttgtcaaaggtgtccagcatcgccgttcagaccgtcgcggaaatctctgtgcagacagaacctgtcggcacaatccgaacaccgtccattagggctcgcgtcgatgccaaggttgagatcataaagcacatcagtgcccccgaaaaaacctacaagggcggatcccttggctgccagactgaagcagactccgacacccagtctccccagtatctgagcgcaacttctccgcctaaggacaagaaacgacccactccactagagattggatacagcagccacctacgggccgatagcacggtccaactggccccctctcctcctaagagccctaaggtactctactccccaataagcccactgagccctggtaaggccctggagtcagcctttgtaccctatgagaagcccctgccagacgacatcagccctcagaaggtgctgcatcccgatatggccaaggtccctcccgcttcacctaaaaccgctaagatgatgcagcggtcaatgagcgatcctaaaccactttcccctacggccgacgagtccagccgcgccccatttcagtacacagagggctatacgtag

SEQ ID NO: 180507 - DNA, 3267 bp, Artificial Sequence
  derived and/or modified sequence
acaaaagtttggaatagtaatggattaggaattagaattgtgggtggtaaagaaatcccgggacatagtggagaaattggagcctatattgccaagattcttcctgggggaagtgcggaacagacggggaagcttatggaagggatgcaagtattggaatggaatggaattcccttgacttctaaaacatatgaagaagttcagagtatcattagtcagcaaagtggggaagcagaaatatgtgtaagactggacctcaatatgctatcagattctgaaaattcccagcatctggaacttcatgagccaccaaaagctgtggataaggcgaaatccccaggggttgatcctaagcagttggcagcagaactccagaaggtttcactacagcagtcaccgctggttctgtcatcagttgttgaaaaaggatctcatgttcattcaggtcctacatcagcaggatccagttccgttcccagccctgggcaaccagggtccccctcagtgagcaaaaagaagcacggcagcagcaagcctaccgatggaacaaaggttgtctctcatccaattacaggagaaattcagcttcaaattaactatgatcttggaaatctcataatacatattctccaagcaagaaatcttgttcctcgagacaacaatggttattctgacccttttgtgaaagtgtaccttcttccagggagaggtgctgagtacaagagaaggactaaacatgtccagaaaagtcttaatcctgagtggaatcaaacagtaatttataaaagtatttccatggaacagctcaagaagaaaacactggaggtgacagtttgggattatgatagattttcatccaacgacttccttggggaggtattgattgatttatctagcacatctcacctcgataacactccaaggtggtatcctctcaaagaacagactgaaagcattgatcatggcaagtctcattccagtcagagcagccagcagtccccaaagccatctgttatcaaaagcagaagccatggtatcttccctgacccatcaaaggacatgcaggttcccaccattgagaaatcccatagtagtcctggtagctcaaaatcatcatcagaaggccatctccgttctcatggaccatctcgcagtcaaagcaaaaccagcgtcactcagacccacctggaagatgcaggggctgccatagctgctgccgaagctgccgtgcaacaactccgcattcaaccaagtaaaagacgcaaataaattcctcagcatggcagcttaatgttcatctgttgcctttctttcctgctgtcctttcctgtttgctttcagttttcaacatcctctgctcaccctgttctctgtccctttgtctgtgtaagaacgatataaatacattaatatgctctttcttatttagattttttttatttacatagactgaaataaaactggctgtttctcctttgtttccaccatccatccaacctggctcatagcatttgatacagtgtctgtgatgtttggaagcaaagcaatgttgtgtgtcctttttgtttgcgcttaaatatcttttagaatacagaaattataagcacaagtggctgccagttttccaggacttataccaaaaaaaaaaaagtgcacacatataagtatttagagcagatttgcaattagattcttgtatctgaaaacactcaaaaagtctaggcagaagataatgcaaccaacagtcaacttctagaaccttggaggaaaagccatttcaagacagtgctttaaaacactaacaaattttgcttctgaaatatggtagctttccatgtgcaaaaaattgtagtcttctgaaaaatctgtgaagaaaatcttatttcttacattctcaaaaaactacattaaattaatatatgtataagcatatgtgataaggcaatgcaacctcactgaggagcacaattgggtccattctgttggatcacactttgtatgtgatgacagattttacagatattttttctaaccattggaaatcaagatatactatgtctggtagctataagtcaatcaaagtataacaattgacctatcttaactgctgtattttcatttcatttgtgaaaatttagtcgattgatataattatataaaaacttaatatgtgcaaatatttcacaaatgtaggtaccctgttacttctaaaaggcattagccaggcaatggagatagatcattgttctctccatctccctagtcatcattttcaaagaaacagccagttttaaacccctttagtgctgtgcatgtggtgtcattttggcatttgaaaacacaacctatttaaatagagcaaaagagcacttctgtttgcatgaataacatttaagctggttccatctgaggatacatactctgggtttccatttcacccacactgccacagcagcacataaaagcggtcagtctaatcatgccaggaagcagcacagacacagcatagcaggagtcctccccattcaaagaactcagtctgataatctgcctccaccagccaatggcaaccaagaccaaagccagctagccctcaggaaggtgatgtctgatggaccagtcaagccagaaggaggtgagcagaaaggccctgttcaaagcacacagcaagaacatccccaaatttaaagctctcatctttaatttttagagattgtctgataaaatatgtttatccactttttaatgtgcttttgtgggcatggcatttcaggacttcatcatcaccatgtaagtcccaagatcagtcccgtaatatattgactacagtgatttgtatttttctatgcactgggcatcttttgacttttgttgggaaatagattaacaatattcatattgcagaatggaatgcatgctactaacctaatctgttcaagcatgactataaatatgtttcattgtgataaaagtttaaattgctcacagttcaagttagcctaccagttggaatgtggatcagtgttttttgcctattatttcaagtgtaacttttaaaaatttagtggattttgaaaattcttagaggaaagtaaaggaaaaattgttaatgcactcatttacctttacatggtgaaagttctctcttgatcctacaaacagacattttccactcgtgtttccatagttgttaagtgtatcagatgtgttgggcatgtgaatctccaagtgcctgtgtaataaataaagtatctttatttcattcat

SEQ ID NO: 180508 - DNA, 17144 bp, Artificial Sequence
  derived and/or modified sequence
gcggtgcgcggtgggaggggcggacggcgcccggctggcaccgctcagatctgcttctccccggctcggggcgccgaggcggcgtccgggaggtgtcttctgcaaaggttgcctggcgctgtccaacatggaggaggcaccggcagcgggcgttacctgcgagcgggactaacccctgcctggcgttccgggcggcagtgcctggtccagagtccagggactcggctgcctgcacgccccgaggcggaccccggctctgactgctcccctggccgcgggcttctcgactgggacgcggcgcgaggagggagcgcggcggccccgagtctccctgagccatgggcaacgaggcgagcttggaaggggaagggctccccgaagggctggcggcggccgcagcggctggaggaggagctagcggggcggggagcccctctcacaccgcgatcccggccggcatggaggcggatttgagccagctgagcgaagaggagaggagacagatcgccgctgtcatgtcaagggcgcaggggctgcccaagggaagcgtccccccggccgctgcggagtcgccttccatgcacaggaaacaagagttggatagtagtcatcctccaaagcaatcaggaagacccccggaccctgggcgtccagctcaacctggtctcagtaaaagtagaactacagacactttcaggtcagagcagaaattgcctgggaggagtccttccactattagcttgaaagaatcaaagtccagaactgatttaaaggaagagcacaagtctagtatgatgcctggcttcctctcagaggttaacgctttaagtgctgtttcctctgttgtaaataaattcaacccttttgatttgatatcagactctgaggcatcccaggaagaaaccaccaagaaacaaaaagtggttcagaaggagcaaggaaaacctgaaggaatcataaaacctcctttacaacaacagccacccaagccgattcctaagcagcaaggacctggtagggatccgcttcagcaggatggcactcccaaatcaatatcttctcaacaaccagaaaaaattaaatcacaacctccaggtacaggaaagccaattcagggtcctacccagactcctcagacagaccatgcaaaattgccacttcaacgagatgcatccaggcctcagactaaacaggcagacatagtaaggggagaatcagttaaaccctcactgccaagcccatccaaaccacctattcagcaaccaactcctggaaaacctccagcacagcagcctggacatgaaaaatcacagcctgggcctgcaaagcccccagctcagccctcagggctaacaaagccattggctcaacaaccagggacagtgaaacccccagtccagccaccagggacaacaaagcctccagctcagcctcttggtcctgctaagcctccagctcagcagactgggtcagagaagccttcatcggagcagcctgggccaaaggctttagctcagcctcctggagttggaaagactccagctcaacagccagggccagcaaagcctccaacccagcaggtggggacaccaaaacccctagctcaacaacctgggctacagtctccagctaaggcacctgggcctacaaagactccagttcagcagcctgggccaggaaagattccagctcaacaggcaggacccggaaagacttctgcccagcagactggcccaacaaagcctccttcacaactgcctggcccagcaaagcccccacctcaacagcctggcccagcaaagcccccacctcaacagcctggctcagcaaagcccccatctcaacagcctggctcaacaaaacccccacctcaacagcctggcccagcaaagccctcacctcaacagcctggctcaacaaaacccccatctcaacagcctggctcagcaaaaccctcagctcaacagcctagcccagcaaagccctcggctcagcaatctacaaaaccagtaagccaaacaggatctggaaaacctctgcagccaccaacagtgtctccatctgcaaaacagcctccttcacaaggcctccctaaaaccatctgtcctctttgcaataccactgaacttctgttgcatgttccagaaaaggccaattttaacacatgcactgagtgtcaaaccactgtctgtagtctctgtggttttaatcccaatcctcatttaacggaggtaaaagagtggctctgtttgaactgtcaaatgaaaagagctctaggcggggatctggctccagttccgtcatcaccccagcccaaactgaagactgcacctgttaccactacatcagcagtgagcaaatcatccccacagccacagcagacttccccaaagaaggatgctgcaccaaaacaggatctctccaaggcacctgagcctaaaaagccaccaccactagtgaaacaaccaacccttcatggctctccttcagccaaggccaagcagccccctgaggcagattctttgtccaagccagcccctcccaaagaaccttctgtcccatctgagcaggacaaggcccctgttgctgatgataaaccaaagcagcccaagatggtaaagccaaccactgaccttgtatcttcatcatcagcaacaacaaaacctgatattccaagctccaaagtacagtcacaagctgaagagaaaacaacccctcctctaaaaacagactctgccaaaccctcacagagttttccaccaacaggggaaaaagtcagcccatttgattctaaagccatacctcgacctgcatcagattcaaaaattatttcacatcctggtcccagttcagagagcaaaggtcaaaaacaagttgaccccgtacaaaagaaggaagaacccaagaaagcacaaaccaaaatgagtcctaaaccagatgccaagccaatgccaaaagggtcaccaacaccccctggcccacgacctaccgctggccaaactgtccccacacctcaacagtccccaaagcctcaggagcagtcaaggcgtttcagtctgaatctgggaagtattactgatgcccccaaatcacagcctacaactcctcaagagaccgtgactgggaaactctttgggtttggagcatcaatcttcagccaggcatcaaatttaatttccactgcaggccaacctggacctcattcacaaagtggaccaggggccccaatgaaacaagcccctgccccttcacagccacctacttcacaagggccacccaaatccacaggtcaagcaccaccagcacctgcaaaaagtatacctgtgaaaaaggaaacaaaagccccagcagctgaaaaattagagcccaaagctgaacaagctccaacagtaaaaagaacagaaacagaaaaaaagccaccacctattaaggatagcaaatctttaacagctgagcctcaaaaggctgtccttcccacaaaactggagaaatcgcccaaaccagaatcaacctgtcctctctgcaaaactgaactcaacataggttctaaggatcctcctaacttcaatacttgcactgaatgcaagaatcaagtgtgtaatctctgtggatttaaccctacaccacatttgactgagattcaagaatggctttgtttaaattgccaaacccagagagcaatatcaggacagcttggagacatacgcaaaatgccacctgcaccatcaggacccaaagcatctcctatgcctgttcctacagaatcatcatctcagaaaacagcagtgcctccccaagtaaaattagtgaaaaagcaagaacaagaagtaaaaacggaagctgaaaaagtcattctggaaaaagtaaaggaaacactatcaatggaaaaaattcctcctatggtaaccacagatcaaaaacaagaagagagtaaactagagaaagacaaagcttcagctcttcaagaaaaaaagccactccctgaagaaaaaaaactaatccctgaagaagaaaagatacgttctgaagaaaaaaagccactcctagaagaaaaaaagccaacccctgaagacaaaaagctactcccagaggcaaaaacatcagccccagaagaacagaaacatgacttacttaaatctcaagtacaaattgctgaagaaaagcttgaaggcagagtggctccaaagacagtgcaagaagggaaacaaccacagaccaagatggaaggtttaccatctggcacacctcagagtttacctaaagaagatgataagacaaccaaaacaataaaagaacagccacagccaccatgcacagcaaaacctgatcaggtggaacctgggaaagaaaaaacagaaaaggaagatgacaaatcagacacctcaagttctcagcagcctaaaagcccccaaggtctgagcgacacgggatattcttccgatggaatatcaagctcacttggtgaaattccaagtcttattccaactgatgaaaaggatattctcaagggactcaaaaaggactctttttcacaagaaagcagcccttccagcccctcagatttggctaagttagaaagtacagtcctatctattttggaagctcaagcaagtacacttgctgatgaaaagtcagaaaagaaaacacaaccccatgaagtttctcctgaacagcctaaagaccaagagaaaactcagagtttatctgaaaccttggaaattactatttcagaagaggagatcaaagagagtcaagaagaaaggaaagacacttttaaaaaagatagccaacaagatattccttccagcaaggaccataaagagaagtctgagtttgttgatgacataactactagaagagagccttatgattcagttgaagagagtagtgaaagtgaaaactcacctgttccacaaagaaaacgaagaactagtgttggctcatcaagcagtgatgagtataaacaggaagacagccaaggatcaggggaagaggaggacttcattcgaaaacaaatcatagaaatgagtgctgatgaagatgcttcaggttctgaagatgatgagttcatcagaaaccagctcaaagagattagtagcagtactgagagccagaagaaggaagaaacaaagggaaaaggcaaaataacagcagggaaacacagacgactgactcgaaaaagtagcacaagcattgatgaagatgcaggaagacgtcactcatggcatgatgaagacgatgaagcatttgatgaaagtcctgaacttaaatacagagaaactaaaagtcaggaaagtgaagaacttgtagttactggaggaggagggctacgccgatttaaaacaattgagctcaacagtacaatagcagataaatattctgcagagtcatcacagaaaaaaacaagtttgtattttgacgaagagccagaattggaaatggaaagcctgacagactcacctgaagataggtcaaggggagagggatcttcgagtctgcatgcttccagcttcactcctggtacatcccctacatcagtatcatcacttgatgaggacagtgacagtagcccgagtcacaaaaaaggagagagcaaacagcaacgcaaagctcggcacagaccacatggccctcttttgcctactattgaagattcttcagaggaagaagaattgagagaggaagaagaattattaaaggagcaagaaaagcagagggaaatagaacagcaacaaagaaagagttctagtaaaaaatcaaagaaagacaaagatgaacttcgagctcagagaagaagggaaaggccaaagacaccacctagtaatctctctcccattgaagatgcatctccgacagaagagttacgtcaggctgcagaaatggaggagctccatagatcttcttgttctgaatattcacctagcatagagtcagacccagaaggttttgaaataagcccggaaaaaataatagaagtacaaaaagtttataaattgcccacagctgtttcattatactcaccaacagatgagcaatctattatgcagaaagaaggtagccaaaaggcgttaaaaagtgctgaggagatgtatgaagaaatgatgcataaaacacacaaatacaaagcttttccagctgcaaatgaacgagatgaagtgtttgaaaaagagcctttgtatggtgggatgctaatagaggattatatttatgaatctttagtagaagacacgtacaatggatcggtagatggcagtctgctaacaaggcaagaagaagaaaatggatttatgcagcagaaaggaagagagcaaaagataagactttcagaacagatttatgaagatcctatgcagaaaattacagacctccagaaagagttttatgagttagaaagcttacattctgttgtgcctcaggaagatattgtttcaagctcttttatcatcccagaaagccatgagatagtggacctgggtactatggtaacttctacagaagaagaaaggaaactactagatgctgatgctgcctatgaagaacttatgaagaggcaacagatgcaattaacacctggatctagcccaacccaggcccccattggtgaggatatgacagagtccaccatggactttgacagaatgccagatgcctctttgacatcaagtgttctctcaggagcgtctcttacagattcgaccagcagtgcaacactctctatcccagatgttaaaataacccaacatttttcaacagaagaaattgaggatgaatatgtaaccgattatacaagagaaattcaagagataattgcccatgaatcgctgattttgacctactcggagccttcagaaagtgctacatctgtcccaccctctgacacaccttctctcacatcatctgtttcttcggtctgtaccacagatagctcttcacccattactaccctggatagcataaccacagtttatacagagccagtggacatgataactaaatttgaagattctgaggaaatttcttcatcaacttattttccaggcagcattatagactatccagaagaaataagtgtatctttagatcggactgccccaccagatggtagagctagtgctgatcatattgttatttccttatctgatatggcatcttctatcatagaatctgtagtacctaaacctgaagggccagttgctgacactgtttctactgacttacttatatctgaaaaggacccagtgaagaaagccaagaaggaaactgggaatggaatcattctggaagttttggaagcttacagagataaaaaggagttggaggccgaacgaacaaaaagtagcttatccgaaaccgtgtttgatcacccaccttcttctgtaatagcccttccaatgaaagagcagctttcaactacatactttacatctggagagacctttggtcaggaaaaacctgcatctcagttaccatctggcagtccttctgtttcctctcttccagctaaacctcgcccattctttagaagttcttctttggatatatcagctcaacctcctccccctcctccccctccccctcctcctcctcctccaccaccaccccctcctcccccaccacttcctccaccaacttcacctaaaccaactattcttcctaaaaaaaagttaacagttgcatctccagtgactacagctacacctctgtttgatgctgttactactctagagaccacagctgttctgagaagtaatggattacctgttacaagaatatgtactactgcacctcctcctgttcctcctaagccatcttcaattccatctggacttgtatttacccacaggcctgagccaagcaaacctccaatcgcccccaaaccagtgattcctcagcttccaacaactacacaaaaaccaacagatatacaccccaaaccaacaggcctatctttaacttcaagtatgaccttaaatttagtgacttcagcagattataaattgccttcccctacctccccactttccccacactccaacaagtcttcaccaagattttccaaatccctcacagaaacttatgtagttattacattgccatctgaaccagggactccaacagattcttctgctagtcaagcaattaccagttggcccttgggatcaccctccaaagatctggtttctgttgaacctgtgttttctgtagttcctcctgtgacagctgtagaaattccaatttcttcagaacagaccttctacatctctggagctttacagacattttctgctacccctgtcacagcaccctcttcatttcaagcagctcccacatcagttacacagtttctcactactgaagtttccaagactgaggtttcagcaaccagaagtacagctcctagtgttggtctcagcagcatttccataacaattcctccagagcctcttgctctagataacatacatttagagaagcctcagtataaagaagatggaaaattgcaacttgttggtgatgtaattgatttgcgtacagtaccaaaggtagaagttaaaacaactgataaatgtattgatctttctgcttctacaatggatgtgaaaaggcagatcacagcaaatgaagtttatgggaaacaaattagtgctgtccaaccctctattataaatcttagtgtgacatcatcaatagtgactcctgtatctctggccactgagacagtgacctttgtcacatgcacagctagtgcaagttacactacaggcacagaaagcctagtgggtgcagaacatgcaatgacaacaccactccaacttacaacatcaaagcatgctgagcccccatacaggataccaagtgaccaggtctttcctatagctagggaagaagcaccaataaacttatctctaggtactccagcacatgcagtgacattggctattacaaaacctgtcactgtgcctcctgttggtgtcacaaatggatggactgatagcaccgtatcccagggaatcactgatggggaagtagtggatctcagtacaaccaagtctcacagaacagtcgtaacaatggatgagtctacttcaagtgtgatgaccaaaataatagaagatgaaaaacccgttgatttaaccgcagggagaagagctgtgtgctgtgatgtggtttataaattaccatttggaaggagctgcacagcacagcagcctgcaactactcttcctgaggatcgttttggttatagggatgaccactatcagtatgatcgatcagggccatatggttatagagggattgggggaatgaagccttccatgtctgacacaaatttagcagaagctggacattttttctataaaagtaagaatgcttttgattattctgaaggaactgacacagcagtagatctgacttcagggagagttactacaggtgaggtaatggattattcaagcaagactacaggtccatatccagaaacacgacaagtcatttcaggagctgggattagtaccccacagtattccacagcaagaatgacaccaccaccaggaccccagtattgtgtggggagtgttttgaggtcatctaatggtgttgtctattcttcagtagcaactccaacaccctctacatttgctatcaccacacaacctggctccattttcagcaccacagtgagggatttgtctggtattcatacggctgatgcagtgacttcattacctgccatgcaccatagccagccaatgcctagatcatattttataacaacaggtgcatctgaaacggacattgcagtaactggtattgatatcagtgccagtttgcaaactattactatggagtctcttactgctgagacgatagactctgttcccactttaaccacagcatccgaagtgtttcctgaagtggtgggagatgaaagtgctcttttaattgtccctgaagaagataaacaacagcagcagctagacttggagcgtgagctcctggaactggagaaaattaagcaacagcgctttgctgaggaattggagtgggaacgtcaggaaattcaaaggttccgagaacaagaaaagatcatggttcagaaaaagttggaggagctgcagtctatgaagcaacaccttctctttcagcaagaagaagagcggcaagcccagttcatgatgaggcaggagacgttagctcagcaacagttacagcttgagcagatccaacagctgcaacaacagcttcaccagcagctggaggagcaaaagattcggcagatctaccagtataactatgacccttctggaactgcttctccacaaaccactacagagcaggcaattttggaaggtcagtatgctgctctggaaggcagtcaattttgggcaactgaagatgcaaccaccacagcttcagctgttgtggcaattgaaataccacaaagccaaggatggtacaccgttcagtctgatggtgttactcagtacattgccccacctggtatcctgagcactgtttcagaaatacctctaacagatgttgttgtgaaagaggaaaaacaacccaaaaagagaagttctggagctaaagtccgaggacagtatgatgacatgggagaaaatatgacagatgatccccgaagttttaaaaagatagtggacagtggtgtacaaacggatgacgaagatgccacagatcggagctatgtgagtaggagaaggagaactaaaaagagtgtggatacaagcgtccaaactgatgatgaagatcaggatgagtgggatatgcctactagatcaaggaggaaagctcgtgtagggaaatatggtgacagcatgacagaggctgacaagaccaaacccctttccaaagtctccagcatagcagttcaaacggtagcagagatatctgtgcaaactgaaccagttggaaccataagaacaccctccatacgggcacgagtggatgccaaggtagaaataattaaacacatttcagcacctgaaaagacttacaaagggggcagtttaggatgtcaaacagaagcagattcagacacacaaagtcctcaatatctgagtgccacatctccacccaaagacaagaaacgcccaacacctttagagattggttattcatctcacctccgggcagattccacagtacagctggctccttccccacccaaatcccccaaagtcctttactcacccatctcaccactttcaccaggcaaagccttagaatcagcctttgtaccttatgaaaaacccctccctgatgatataagtccacagaaagtactgcatccagatatggctaaagttcccccagcaagtcctaagacagccaagatgatgcagcgttctatgtctgaccccaagcctctgagtccaacagcagacgaaagttccagggctccttttcagtataccgagggctatacgactaaaggttctcaaaccatgacatcctctggagcccagaaaaaagttaaaagaactctgccaaatccacctcctgaggagatttccacaggaactcaatccacattcagcacaatgggcacagtttccaggagaaggatctgcagaaccaacacaatggcacgagccaagattctccaggacatagacagagagcttgatcttgtggaaagggagtctgcaaaacttcgaaagaaacaagcagagcttgatgaagaagaaaaggagattgatgctaagctacgatacctggaaatgggaattaacaggaggaaagaggccctattaaaggagagagaaaagagagaacgagcctacctccagggagtagctgaggatcgtgattacatgtctgacagtgaagtgagtagcacaagaccaacccgaatagaaagtcagcatggcattgagcgaccaagaactgctccccaaactgaattcagccagtttataccaccacaaacccaaacagaatctcaactagttcctccgacaagtccttacacacaataccagtactcttcccctgctcttcctacccaagcacccacctcatacactcaacagtctcattttgagcaacaaactttgtaccatcagcaagtttcaccttatcagactcagccaacattccaagctgtggcaacaatgtccttcacacctcaagttcaacctacaccaaccccacagccttcttatcagttaccttcacagatgatggtgatacaacagaagccacggcaaactacattatatttggagcccaagataacctcaaactatgaagtgattcgcaaccaaccccttatgatagcacctgtttctacggataacacatttgctgtttcccatcttggtagtaagtacaatagtttagacttgagaataggtttggaggaaagaagtagcatggcaagcagtccaatatcaagcatatctgcagattctttctatgcagatattgatcaccatactccacgaaattatgtcctaattgacgacattggagagatcaccaaaggaacagcggcattaagcaccgcatttagccttcatgaaaaggatctgtcaaaaacagaccgtctccttcgaaccactgagacacgccggtctcaagaagtgacagatttcctagcacctttacagtcttcctctagattgcatagttatgtgaaggcggaggaagacccaatggaggatccttacgagttaaagcttctgaaacatcagattaaacaggaatttcgtagagggacagagagcttagatcaccttgctggtctttctcattattaccatgctgatactagctacagacattttccaaaatctgagaagtatagcatcagtagactcacacttgaaaaacaagcagcaaaacaactgccagcagccatactttatcaaaagcagtcaaagcataagaaatcactaattgaccctaaaatgtcaaaattttcacctattcaagaaagtagagaccttgaacctgattattcaagctatatgacttctagcacttcatctattggtggcatttcctccagggcaaggctccttcaagatgacatcacttttggcctcagaaaaaatattacagaccaacaaaaatttatgggatcttctcttggcacaggactgggcacattaggaaataccatacgctcagctctgcaggatgaagcggataagccatacagtagtggcagcaggtccagaccttcctccagaccttcctctgtctatgggcttgatttatcaattaaaagggattcttctagctcttccctaagactgaaagctcaagaggctgaagctctagatgtttcctttagtcatgcatcatcctctgccagaactaagccgaccagtttgccaattagtcaaagtagaggaagaataccaattgtggcccagaattctgaagaagaaagcccactcagtcctgttggccagccaatgggaatggccagggctgcagctggacccctgccaccaatatctgcagacaccagggatcagtttggatcaagccactcattgcctgaagttcagcaacacatgagggaagaatcacggactcgaggctatgaccgtgacatagcattcatcatggatgacttccaacatgccatgtcagacagtgaagcctatcatctgcgtcgtgaggaaacagattggtttgataaacccagggagtctcgtttggaaaatggacatggtctggaccgaaaactgccggaaagattggtccactctagaccactcagtcaacatcaagagcaaattatacagatgaacgggaaaactatgcactacatctttcctcacgcaaggataaaaataacaagagactcaaaggatcacacagtttcaggtaatggattaggaattagaattgtgggtggtaaagaaatcccgggacatagtggagaaattggagcctatattgccaagattcttcctgggggaagtgcggaacagacggggaagcttatggaagggatgcaagtattggaatggaatggaattcccttgacttctaaaacatatgaagaagttcagagtatcattagtcagcaaagtggggaagcagaaatatgtgtaagactggacctcaatatgctatcagattctgaaaattcccagcatctggaacttcatgagccaccaaaagctgtggataaggcgaaatccccaggggttgatcctaagcagttggcagcagaactccagaaggtttcactacagcagtcaccgctggttctgtcatcagttgttgaaaaaggatctcatgttcattcaggtcctacatcagcaggatccagttccgttcccagccctgggcaaccagggtccccctcagtgagcaaaaagaagcacggcagcagcaagcctaccgatggaacaaaggttgtctctcatccaattacaggagaaattcagcttcaaattaactatgatcttggaaatctcataatacatattctccaagcaagaaatcttgttcctcgagacaacaatggttattctgacccttttgtgaaagtgtaccttcttccagggagaggtcaagtcatggttgtccagaatgcaagtgctgagtacaagagaaggactaaacatgtccagaaaagtcttaatcctgagtggaatcaaacagtaatttataaaagtatttccatggaacagctcaagaagaaaacactggaggtgacagtttgggattatgatagattttcatccaacgacttccttggggaggtattgattgatttatctagcacatctcacctcgataacactccaaggtggtatcctctcaaagaacagactgaaagcattgatcatggcaagtctcattccagtcagagcagccagcagtccccaaagccatctgttatcaaaagcagaagccatggtatcttccctgacccatcaaaggacatgcaggttcccaccattgagaaatcccatagtagtcctggtagctcaaaatcatcatcagaaggccatctccgttctcatggaccatctcgcagtcaaagcaaaaccagcgtcactcagacccacctggaagatgcaggggctgccatagctgctgccgaagctgccgtgcaacaactccgcattcaaccaagtaaaagacgcaaataaattcctcagcatggcagcttaatgttcatctgttgcctttctttcctgctgtcctttcctgtttgctttcagttttcaacatcctctgctcaccctgttctctgtccctttgtctgtgtaagaacgatataaatacattaatatgctctttcttatttagattttttttatttacatagactgaaataaaactggctgtttctcctttgtttccaccatccatccaacctggctcatagcatttgatacagtgtctgtgatgtttggaagcaaagcaatgttgtgtgtcctttttgtttgcgcttaaatatcttttagaatacagaaattataagcacaagtggctgccagttttccaggacttataccaaaaaaaaaaaagtgcacacatataagtatttagagcagatttgcaattagattcttgtatctgaaaacactcaaaaagtctaggcagaagataatgcaaccaacagtcaacttctagaaccttggaggaaaagccatttcaagacagtgctttaaaacactaacaaattttgcttctgaaatatggtagctttccatgtgcaaaaaattgtagtcttctgaaaaatctgtgaagaaaatcttatttcttacattctcaaaaaactacattaaattaatatatgtataagcatatgtgataaggcaatgcaacctcactgaggagcacaattgggtccattctgttggatcacactttgtatgtgatgacagattttacagatattttttctaaccattggaaatcaagatatactatgtctggtagctataagtcaatcaaagtataacaattgacctatcttaactgctgtattttcatttcatttgtgaaaatttagtcgattgatataattatataaaaacttaatatgtgcaaatatttcacaaatgtaggtaccctgttacttctaaaaggcattagccaggcaatggagatagatcattgttctctccatctccctagtcatcattttcaaagaaacagccagttttaaacccctttagtgctgtgcatgtggtgtcattttggcatttgaaaacacaacctatttaaatagagcaaaagagcacttctgtttgcatgaataacatttaagctggttccatctgaggatacatactctgggtttccatttcacccacactgccacagcagcacataaaagcggtcagtctaatcatgccaggaagcagcacagacacagcatagcaggagtcctccccattcaaagaactcagtctgataatctgcctccaccagccaatggcaaccaagaccaaagccagctagccctcaggaaggtgatgtctgatggaccagtcaagccagaaggaggtgagcagaaaggccctgttcaaagcacacagcaagaacatccccaaatttaaagctctcatctttaatttttagagattgtctgataaaatatgtttatccactttttaatgtgcttttgtgggcatggcatttcaggacttcatcatcaccatgtaagtcccaagatcagtcccgtaatatattgactacagtgatttgtatttttctatgcactgggcatcttttgacttttgttgggaaatagattaacaatattcatattgcagaatggaatgcatgctactaacctaatctgttcaagcatgactataaatatgtttcattgtgataaaagtttaaattgctcacagttcaagttagcctaccagttggaatgtggatcagtgttttttgcctattatttcaagtgtaacttttaaaaatttagtggattttgaaaattcttagaggaaagtaaaggaaaaattgttaatgcactcatttacctttacatggtgaaagttctctcttgatcctacaaacagacattttccactcgtgtttccatagttgttaagtgtatcagatgtgttgggcatgtgaatctccaagtgcctgtgtaataaataaagtatctttatttcattcat

SEQ ID NO: 180509 - DNA, 1269 bp, Artificial Sequence
  derived and/or modified sequence
acgaaagtttggaattctaatgggctgggaatacgaatcgtgggcggaaaagagattcccggacattcgggggagatcggggcatatatcgccaagattcttccagggggatccgctgaacagaccggtaagctcatggaagggatgcaagtgttagagtggaatggtattcccctgacctctaagacctatgaggaagtgcaatcaatcatcagccagcagtctggcgaggcagaaatctgtgttcgcctggatctgaatatgctctctgatagtgagaattcacaacacctggagctacatgagcctcccaaagctgtagataaagccaaaagcccaggtgtcgaccccaagcaattagcagccgaattgcagaaagtcagtctccagcagtcaccactcgtgctgtcttccgttgttgagaaggggtctcacgtccattctgggccaactagcgctggttcttcgagtgtaccatcccccggacagcctggcagccctagtgtgtccaaaaaaaagcacggctccagcaagcccacagacgggacaaaagtcgtcagccatcccatcaccggcgaaattcagttacaaatcaactacgatctggggaacctaattatccatatcctgcaagcaaggaacttggttcctcgtgataataatggctacagcgacccgtttgttaaagtctacctcctgcccggacgaggtgctgaatacaagcggagaactaagcacgttcaaaagagcctgaatccggaatggaaccagaccgtcatctacaaaagtatttctatggagcagctcaaaaagaaaactctagaagtgactgtgtgggattacgaccggttcagctccaacgattttttgggggaggtgctcatcgaccttagcagcacatcccacctcgacaatactcctagatggtaccctctgaaagaacagacagagagcatcgatcatggtaaatcccactcctctcagtcaagtcagcagagccccaaaccttccgtgatcaagtctcgctcccatggcattttccctgacccatcaaaggacatgcaggtacctactattgagaaaagccactcctcccccggtagcagcaagagctcctccgagggccatctccgttctcatggcccatcaagaagtcaaagcaagacaagcgtgacccaaacacaccttgaagatgcaggcgctgccattgccgctgcagaagcagcagtacagcagctccgaattcagcctagcaagaggaggaaatag

SEQ ID NO: 180510 - DNA, 14808 bp, Artificial Sequence
  derived and/or modified sequence
atgggcaacgaggcatctctggagggtgaagggctgcctgagggtctcgctgccgctgctgcagcaggcggtggagcctccggcgcagggagcccatcccacaccgctattccagcgggtatggaggcagatctttcacaactcagtgaagaggaacgtcggcaaatagctgcagtgatgagtagagcccagggcctgccaaaaggaagcgtgccgcctgccgctgcagaatctcctagcatgcatagaaaacaggaactcgactcctcccacccaccaaagcagagcgggaggccgccagacccagggaggccggctcagcctggtctgagcaagagtcgtacaactgacaccttccgctcagagcagaagttgcctggccgaagtccaagtactattagcttgaaagaatcaaagtcacggacagatctgaaggaggagcataagagctctatgatgcccggatttctgagcgaagtgaacgcgttgtcagccgttagctccgtagtaaataaatttaaccctttcgacctgatctctgactctgaggcctctcaggaagagacaacaaaaaagcagaaagttgtccagaaggaacaaggaaaacctgaaggtataatcaaacctcccttgcagcagcagcccccaaaacccattccgaaacaacagggacccggtagagatcctcttcaacaagatgggacccctaagtcgatcagtagccagcagcctgaaaaaatcaaaagccaacccccaggaactgggaagccaatccagggcccaacccaaactccccagaccgaccacgctaaattgccactccaacgtgacgcctctagacctcagaccaagcaggcagacattgtccgaggggaatcagtcaagcctagcttgccaagcccctccaaaccgcctattcagcagccgacccccggaaagccacccgctcaacagcctggacatgagaaatctcagcctggccctgccaagcctcctgcgcagccttccggtttgactaagcctttggcccagcaaccaggcactgtcaaaccacctgtgcagccgcctgggaccacaaagcctccagcccagccgctcggaccagctaaaccaccagcgcagcagaccggtagcgagaagccttcttcagaacagccaggtcccaaggcgttagctcagcccccaggcgtgggcaagactcccgctcagcagccaggcccagccaaacccccaacacagcaggtcggaactcctaagcccctggctcagcagccagggctccagtcacccgctaaagctcccggacccacaaaaaccccggtccagcagccgggacccggtaagattcccgctcagcaagcgggaccagggaagaccagtgctcagcagacaggcccaaccaaaccgccaagccagttgccaggtccagcgaaaccaccgccacagcagccgggtccagcaaaaccgccaccacagcagccgggatcagcaaagccgcctagccaacagccaggcagtaccaagcctccaccgcagcaacctgggccagcaaaacccagcccccaacagcctggaagcactaaaccacccagccagcagcccggttcggctaaacctagtgcccaacagccaagcccagccaagccatctgcacaacagagtacgaagcctgttagtcaaactggatctggtaaaccactacagccacctactgtctccccttctgccaagcaaccgcctagtcagggattacctaagactatctgtccgttatgcaacactactgagctgttgctacacgtccctgagaaagcaaactttaatacatgcaccgagtgccagactaccgtgtgttcactgtgcggatttaacccaaatcctcatttaactgaggtaaaagaatggttgtgccttaattgccaaatgaaacgggctttggggggagacctggccccagtccctagcagccctcagcctaagttgaagaccgcacccgtgacaaccacgtctgcagtgtccaaaagttctccccaacctcagcaaacaagccccaagaaagacgcagccccaaaacaggatctcagcaaagcacccgaaccaaaaaagccccctcctctagtaaagcaacctaccctgcacgggtcgccatctgcaaaggcgaagcagccaccggaagctgatagcctgagcaaacctgcccctccgaaggaaccttccgtcccatcagagcaggataaagcacctgtcgcagatgacaagccaaagcagccaaagatggtcaagcctaccactgacctcgtgtcatcctctagtgccactactaagcctgatattcctagttcaaaggttcaaagtcaggcggaggaaaagactactcccccactgaagacggattctgcaaaaccctctcagtcatttccaccaaccggagagaaggtgtcgccattcgatagcaaagccattccaaggcccgcttctgatagcaagataatatcccatcctgggcctagcagcgaatccaaagggcagaagcaggtcgacccggtgcagaagaaggaagaacccaaaaaagcacagactaagatgtctcccaaacccgatgccaagccaatgccaaagggaagcccaacacctccgggtcctaggcccacagccggacaaaccgtaccgacaccgcaacaatcccccaagccccaggagcaaagcaggaggttttcgctgaatctcggcagtatcactgacgccccaaagtctcaaccaaccacaccccaagagacggtgactggaaagttgttcggctttggggcttccatcttctcccaagcctctaacctgatcagtactgctgggcagccagggccacattcccagtctggtcctggagctccaatgaagcaagccccagctccatcccagccacccacttctcagggtccaccaaagtccacaggacaggcaccccctgcaccagccaagtccatcccagtaaagaaggagaccaaggcccctgcagccgagaagctggaaccaaaggcagagcaagccccaactgtcaaaaggactgaaaccgagaaaaagcctccccctattaaggactctaaaagcctgacagccgagccacaaaaggccgtgttaccaaccaaactcgaaaaaagtcccaaaccagaaagcacctgtccgctgtgtaaaactgaattaaatattggctctaaggaccctcccaattttaacacctgcactgagtgtaaaaaccaagtttgcaacctgtgcggatttaaccccaccccccacctgactgagattcaggaatggttgtgtctcaattgtcagacacaacgtgccatctctggacagctgggtgacattcggaagatgcccccagctccttcagggccaaaagccagtccaatgcctgtccccaccgaaagctcctcccagaagaccgctgtcccaccacaggtgaaactggtgaagaagcaggagcaggaagtaaaaaccgaagcggaaaaggttatcttagagaaggtgaaagagaccctgagcatggagaaaattcctcccatggtgaccaccgatcagaaacaggaagaaagcaagctggagaaggacaaggcgtccgcattacaggaaaaaaagccactccccgaggagaaaaaactgattcctgaagaagagaagatccgcagcgaggaaaagaagccactgttagaggagaagaaacccactcccgaggataagaaactgttgcctgaagccaagacaagcgctcccgaggaacagaaacatgacttgcttaagagccaggtgcaaattgctgaggaaaaactagaaggtcgcgtggctcccaaaaccgtccaggagggcaaacaacctcaaactaagatggagggcctgccgagcggaacacctcaaagcctgcccaaggaggacgacaagaccactaagaccatcaaagaacaacctcagccaccctgtactgctaaaccagaccaggtggagccaggtaaggaaaagacggagaaagaagatgataaatcagacactagctcgagccagcagcccaagtcaccccaagggctctcagatacaggatattcctctgatggcattagctcatcgctcggtgaaatccccagtttaatcccgactgacgagaaggacatcctgaaaggcctgaagaaggactctttttctcaagaatcaagcccctccagcccttcggatctggccaagctcgagagcaccgtactgtccattctggaggcacaggcctcaactctggctgacgagaagtcggaaaagaaaactcagccgcacgaggtgtccccagagcagcccaaagatcaagaaaagacccagtccttgagcgaaactctggaaatcactatcagcgaggaggaaattaaagagtcccaggaggagagaaaagacacattcaagaaagatagccaacaggatatcccctcttccaaggaccataaggagaaatctgaatttgtcgatgatatcacaacccgtagagagccatacgattcagttgaggaaagctccgaatcagaaaactcacccgtgccacagcggaaacgccgaactagcgtcggttcctctagcagcgatgagtacaagcaagaggactcacaaggctctggtgaagaagaagatttcattcgaaaacagatcatcgaaatgtccgctgacgaagacgcctctggatctgaggacgatgagtttataaggaatcagctgaaagaaatctcaagctcaacagagagccaaaagaaggaagagactaaaggcaagggaaagatcacggcgggaaagcacaggaggctgacccgaaagagtagtactagcatcgacgaggatgcaggcaggcgacattcttggcacgacgaagacgacgaggcctttgatgagtctcctgagctcaagtaccgcgagacaaaaagccaggagagcgaggagctggtggttacaggaggagggggtctgcgtcggtttaaaaccatcgagctgaacagtacgatagccgacaaatactcagcagagagctctcagaagaagacatctctttactttgacgaggaaccggaattagaaatggaatccctcaccgacagtcccgaagatcgcagtcggggagagggtagctccagtcttcacgcttctagctttacaccgggtacaagccccaccagtgtgtcatccctggacgaagactccgattcatccccgagccacaaaaagggggaatcaaagcagcaaaggaaagcaagacatcggccacatggacccctgcttccgacaatcgaagatagcagcgaggaagaggaattgagggaagaagaagagctgctgaaggagcaagagaagcagcgggaaatcgagcaacagcagaggaagtcctctagcaagaagtccaaaaaggataaagatgagctgcgcgcacaaagaaggcgggagagaccgaaaacgcccccatcaaacctctcccccatcgaggatgccagtccgacagaggagctgagacaggcagctgagatggaagagctgcaccgcagtagttgttcagaatacagcccaagtatagagtccgacccagaagggttcgagatttctccagagaagatcattgaggtgcagaaagtgtacaaacttccgactgcggtgagtctgtacagtcccacagatgagcagagcattatgcagaaagagggaagccagaaggctctgaagagcgctgaagaaatgtacgaagagatgatgcacaagacccacaagtacaaggccttccctgctgccaatgagcgggacgaagtgttcgagaaagagcccctgtatggtggaatgctgattgaggactacatttatgagagcttggttgaagatacgtacaacgggagcgtagatgggagcctgctgacacggcaggaagaggaaaatggatttatgcagcaaaagggtagggagcagaagattaggctaagtgaacagatctatgaagaccccatgcagaagattaccgacctccagaaggagttctacgaactggagtctcttcactctgtcgtgccacaggaggacatcgtgagttcaagttttataatccctgagtctcatgagatcgtggaccttggtacaatggttacaagcactgaggaggagcggaagctcctggatgcagacgccgcatacgaagagctgatgaagcgtcagcaaatgcagctgactcctggatcatcccctacccaggcgccaatcggcgaagatatgaccgagtcaacgatggactttgatagaatgcccgatgccagcttgacctcgtcagtgctgtccggggcttctcttaccgattctacttcttcagctaccttatctatcccagatgttaaaatcactcagcacttctcaacggaagagattgaggacgagtacgtcacagattatacgcgggagatccaagaaattattgcccacgagagccttatactgacttatagcgagccatccgaaagtgcaaccagcgttccaccttcagatacccccagcctgaccagttcagtgagtagcgtgtgtactaccgattctagttctccaattacaaccttggattcgattaccacagtgtacaccgagcctgttgacatgattacaaagttcgaagattccgaagaaatcagctctagtacctatttccctggcagcattatagactatccagaagagatttccgtcagtttggaccgtacagcgcctcctgacggcagggccagcgctgatcatatcgtcattagcctgagtgatatggcatccagcataattgaatcagtggtgcccaagccagaggggccagtggccgacactgtttcaactgacctgctaataagcgaaaaggatcccgttaaaaaggctaaaaaggagactggaaatggtattattctcgaagtacttgaggcctatcgggacaagaaggaactggaggccgagagaacaaaaagcagcctgagcgagacagttttcgaccatcctccaagttccgtgattgcgctgcctatgaaagaacagctgagcaccacctactttacgagcggcgaaacatttggccaggaaaagccagcctcacagttaccttcaggaagcccctctgttagtagcctgccagctaaaccgaggccattttttcgctcctcaagtctggacatctccgctcagcccccaccacccccaccgcctccaccccctcctccaccacctccacccccacctcctccacctccacttccccctccaaccagcccgaagcctacaatcttacccaagaagaagttaacggtcgccagtcctgtgactacagctaccccattatttgacgccgtcacgacactggaaacgacggcagttctgaggagcaatggcttaccagtaaccaggatatgcacaaccgcccctccaccagtgccacccaagccatcctctattccctctggcttggttttcacacatcgccctgagccctcaaaaccaccaatcgcccctaaacctgtgatcccccagctaccaacaaccacccaaaagcctaccgacatccaccccaaacctacgggccttagcctgacgtcgagcatgaccctcaacctggtgacgtccgccgactataagctgcccagccccacttctccactttccccccattccaacaagtcctccccaagattcagtaagtcactaaccgagacatacgtggttatcaccctgcccagtgagccaggcactccaaccgatagttcagcatctcaggcaataacatcatggcctttgggaagcccttccaaggacctggtttctgtggagccggtgttcagcgtggtacctcctgtgaccgccgtcgaaattccaatctcctctgagcagacgttttacatctccggagccttacagaccttctcagcaacgccggtgactgcgccaagctcctttcaagctgcccctacatcagtgacccagtttttaactaccgaagtgtccaaaaccgaggtgtccgccactcgaagcaccgcgccatccgtcggcctgagctctattagtataaccattccgcctgagcccctagctctcgacaacattcatttggagaagccacaatacaaggaggacgggaagttgcagctcgtgggcgatgtaatcgatctgaggacagtgcccaaagtggaagttaaaaccaccgacaagtgtatcgacttgtccgcatcaaccatggatgtcaaaaggcagatcaccgccaatgaggtgtatgggaagcagatctcggctgtgcagccctccatcattaacctgtccgtgaccagctccatagtgacacctgtgagcctggctaccgaaacagttacattcgtaacctgtactgctagtgccagctatacgactggtacagagagccttgttggagctgagcatgccatgaccacccccctgcagttgactacttcaaagcatgctgagcctccctaccgcatcccatcggatcaggtgttcccaattgctagggaggaggctcccataaatctgtcactaggcacccccgcacatgctgttaccctggccatcaccaaacctgtcaccgtgccgccagtgggggtaacgaatggctggactgactccacggtgtcccaaggcattacagacggcgaggtggtagacctcagcaccaccaaatctcacagaaccgtagtcacaatggatgagtccactagttccgtcatgacaaaaatcattgaggacgagaaaccagtggatctgaccgccggaaggagagccgtgtgctgtgacgttgtgtacaagctgccatttggtaggtcttgcacagcacagcaaccagctacaaccttgcctgaggacaggttcggatacagggatgatcattaccagtacgatcgatctgggccatacggctatcgtggaatcgggggtatgaaaccctccatgtccgacacgaatctcgccgaggctggtcattttttttataagtccaagaatgcttttgactactcagagggaacggatacagccgtcgacctcacctccgggagggtgactaccggggaagtgatggattactcgtcaaagaccaccggtccctaccccgagacacggcaggtcatctccggagccggaatcagcacaccacagtacagtactgcgcgaatgaccccccctcccggtcctcagtactgtgttgggtccgtgttgcgctcaagcaacggcgtggtgtactcttctgttgcaaccccaactccatctactttcgcaattaccacccagccgggatcgattttcagtacaactgtgagggatctcagcggaatccacacggctgatgccgtcactagtcttccagcgatgcaccactcacagcctatgccaagaagctactttatcactactggggctagcgagaccgacatcgctgtgaccggcattgatatttctgccagcctgcagacaataacgatggagagcttgaccgccgagacgatcgattccgtccctaccctaactactgccagcgaggtgttccctgaggtcgtgggagacgaatccgcactgctgatcgtgcccgaggaagataagcagcagcagcagttagatttagaacgcgagttgctggaactcgaaaaaattaaacaacagcgatttgcagaggaattggagtgggagcgccaggagattcaacgctttagggagcaggagaaaattatggtgcaaaagaagttggaggagctgcaatcaatgaagcagcatttactcttccagcaggaggaggagagacaggcacagttcatgatgcggcaagagactctcgcgcaacaacagctacagctggagcagattcagcaactgcagcagcagctgcatcagcaattggaggagcaaaaaatccggcagatttatcaatacaattacgaccctagtggaacggcttctccccagacgactacagaacaggctatcctggaagggcaatacgccgctttggaagggagccagttctgggccacagaggatgccacaacaaccgcttcagccgtagtcgcaatcgaaatcccacagtcccaggggtggtataccgtgcagagcgacggggttacacaatacattgcgccacctggtattcttagtacagtttccgagattcctctcacagacgtggtggtgaaggaagaaaagcaacctaagaagcgctcctccggcgctaaagtccgaggacagtatgacgatatgggagagaacatgactgatgacccgcgttcctttaaaaaaatcgtggatagcggagtccagaccgacgatgaagatgctacagaccgtagctatgtatccagacggaggcgaaccaagaagtccgtggatacatccgtccaaacagacgacgaggaccaagatgagtgggacatgcctactagaagccggaggaaggctcgggtcgggaagtatggcgattctatgactgaagcggacaaaacaaagccactgagtaaggtgtccagtatcgccgtccagaccgtggccgagatctcggtgcaaactgagccagttggcaccatccgcacgcccagcattcgggcacgggtggatgccaaggtagaaatcatcaagcacattagcgcgccagagaagacttacaagggaggctctctgggatgccagacagaggcagactcagacacgcaatccccacagtatctatcagccacttcaccacctaaggataaaaagaggcccactcccctggagatcgggtatagctcccatcttagggccgactccactgtccaactggcaccatccccacccaagtcacctaaagtgctttattcaccaattagcccacttagccccggaaaagcactagaatctgcatttgtgccatacgagaagccgcttcccgacgacatctccccccagaaagtgctgcatcctgatatggccaaggtgccccctgccagcccgaaaaccgccaagatgatgcagcgcagtatgagtgaccccaagccactgtcacccactgccgacgagagtagccgggcaccattccagtacactgagggttacaccaccaaagggagtcaaacaatgaccagtagtggcgcacagaaaaaagtcaaaaggaccctgcccaatcctccacccgaagagatctcgacagggacccagagcacgttctctacgatgggaaccgtgtccaggaggcgcatttgcaggactaacacaatggccagggcgaagatcctgcaggacatcgatcgggaactggacctggtggagcgagaatcagctaaactccgaaagaagcaagccgaattggatgaagaggaaaaggagatcgacgcaaaacttaggtatttagagatgggtatcaaccgacggaaggaggcgctgctaaaggagagagagaagcgggagcgcgcatatttgcagggagtcgcggaggacagggattatatgtctgactctgaggtgtctagcactcgccctactcgcattgagtcacaacacggaattgagcgcccacgcactgccccacagactgagttctctcagttcatcccaccccagacccagacagagagtcaattggtccctcccacatcaccatacactcaatatcagtactcttcacccgctctgcctacacaggctcccactagttatacacagcaatcccactttgagcagcagaccctatatcaccaacaagtctcaccatatcagacccaaccaacattccaggccgtcgccaccatgtctttcacaccccaagtgcagcctacccccacaccacagccctcctaccagcttccttcgcagatgatggttatccagcagaagccgcgtcaaacaacgctctacttagagccgaagattacatcaaattatgaagtgatccgtaatcagccactaatgatcgctccggtgagtaccgacaatacctttgcagtgtcacatctgggatctaagtataactccctggatttacgcatcggccttgaggagcgaagttcaatggccagcagtcctatttcatccatttctgctgactctttctatgccgatatcgatcatcacactccgagaaactatgtactgatagacgatatcggtgagattacaaaggggacagcagctttgtctaccgcctttagcttacacgaaaaggatctgtccaaaacagaccggcttcttcgcacaactgagacaagacggtctcaggaggtgacagactttctcgccccactccaaagctcttcacggttgcactcatatgtgaaagcagaggaggaccccatggaggacccttatgaacttaagctactgaaacaccagatcaagcaggaatttagacgaggcaccgagtccctggaccacttagccggtttgtcgcactactaccacgccgataccagttatagacatttccccaagtctgagaaatattcgatcagtcgcctcacacttgagaagcaggcagctaagcagctgccagctgcgatcttgtaccaaaaacagagcaaacataaaaagtctctcatcgacccaaaaatgtccaaatttagcccgattcaagaatcaagagaccttgaacctgattacagcagctatatgacaagcagcacgagtagcattggcggaattagctctcgcgctagacttctgcaagacgatatcacctttggcctgaggaaaaacataaccgatcagcagaaattcatgggctcgagcctggggacagggctgggaacgctcggaaatactatcagatccgccttacaggatgaggccgacaaaccatattcttctgggtcccgctctagacccagcagcagaccttcatcggtttacggcttggacctaagtattaaaagggactcttcctctagttcgctgaggctgaaggcccaggaagccgaggccctggacgtttcattcagccatgcctcttctagcgcccgaactaaacctacgtcgctgcccatctcccagagtagaggcagaatccctattgttgcacagaactctgaggaagaatccccactgtctccagtaggccagcccatgggcatggccagggccgcagctggaccattgcctccgatctctgcagatacccgcgaccagttcggctcttcccactctcttcccgaggtgcagcagcatatgcgggaggagagccgaacccgcggatatgaccgcgacattgcttttattatggatgacttccagcatgctatgagtgactctgaggcctaccatctgagacgcgaggaaaccgattggttcgacaagccacgggagagcagattagagaacggacacggactggaccggaaactgcctgagaggttggtgcattccaggcccttatcacagcatcaagagcagatcatccagatgaacggcaaaactatgcactatattttcccacacgcacgtattaaaattaccagagactctaaagaccatacagtttccgggaacgggttaggcatccgtattgtcgggggaaaggaaatccccggtcactccggagagattggggcatatatcgccaagatactgccaggtggttctgccgaacagaccggtaaactgatggaaggcatgcaggtgctcgaatggaatgggatccccctcacatccaagacgtatgaagaggtccagtctattatctcccagcagtccggcgaggctgagatctgtgtgagactggacctcaatatgttgagcgactccgaaaattctcaacacctggagctgcatgaaccgcctaaggctgtcgacaaggcgaagtcacctggggtggatccaaagcagctcgccgcagagctccagaaagtatccttgcagcagtcgcccttggtccttagcagtgtcgtggaaaaaggaagtcacgtgcactctggacctacctcagctggaagttccagcgttccgagtcccggtcagcctggctcacctagcgttagcaaaaaaaagcatgggtcttccaaacctaccgacggcaccaaggtggtgagccaccccatcacgggtgaaattcagctgcagatcaactatgaccttggaaatttgattatccacatcctccaggcaaggaacttagtgcctagggataacaacggctattcagacccatttgtcaaagtgtacctcctgccaggtcggggacaggttatggtggtccagaacgcctccgcagagtacaaacgtcgaaccaagcacgttcaaaagtctctgaaccctgaatggaaccagactgttatctacaagagtataagtatggagcagctcaagaaaaaaactctggaggtgacagtctgggattatgatcggttttcctctaatgactttctaggagaggtgctcatagatctgagcagcaccagccacctggataatacaccaagatggtatcccctcaaagagcagacagagtctatcgaccacggaaagagccattcctctcagagtagccaacagtctcctaaaccaagcgtgatcaaatcaaggtcacacggcattttcccggatccatcaaaagacatgcaggtccccactatcgagaaatctcacagcagccctggtagtagcaaatccagctccgaggggcatctgaggtctcatggaccctccagaagccagagtaaaacctccgtgacccaaacacatctcgaggatgcgggagccgcaattgcagctgcagaagcagccgtgcaacaactgcggattcaaccaagtaagagaagaaagtag

SEQ ID NO: 180511 - DNA, 10908 bp, Artificial Sequence
  derived and/or modified sequence
atggggaatgaggcctccctcgaaggggaaggactgcccgagggactggctgccgctgctgccgctgggggaggcgcttccggtgcaggaagcccatcccataccgcaataccggcaggcatggaagctgatctgagtcaactctcagaggaagagagaagacagatagcggcagtgatgagtagagcccagggtttgcccaagggcagtgtccccccagctgcggcagagagcccctcaatgcacaggaaacaggagctggattcttcccacccaccaaagcagtccggcagaccccctgatcctgggaggcccgcacagccgggactgagcaagtcaaggacgactgacacattccgcagtgaacagaaattgccaggacgaagccctagtacaatcagcctcaaggagagcaagtctcgcactgatctgaaagaagaacacaaatcctccatgatgcccggatttctatcagaagtaaacgccctcagcgctgtgtccagcgtggtcaacaaatttaatcccttcgatctcattagcgactctgaggcatcccaggaagagaccaccaagaagcagaaggtggtgcagaaggaacagggcaagcccgagggcatcataaaaccgcctcttcaacagcagcctcccaaaccaatccctaagcagcaaggtcctgggagggatccactgcaacaggatgggacaccaaagtcaattagttcccagcagccagagaagatcaaaagtcagcctcctgggaccgggaaaccaatccaagggccaacacagacaccacaaactgaccacgcaaaattaccacttcagcgggacgccagtcgtccgcagactaaacaagccgacatcgtgcgaggggagagcgtgaagccaagtttgcccagtcctagcaaaccaccgattcagcagccgaccccagggaagccccctgcccagcaaccaggccacgaaaagtctcagccaggcccagcaaagccccctgcccagccttcaggcctcactaaacccttagcacaacagcccggtaccgttaagccgcctgtccagcctcctgggacaacaaaaccacctgctcagccccttggccctgccaaaccacccgcacagcagaccgggtctgaaaagccctcttcggagcagccaggcccaaaggcactggcgcagccaccgggtgtcggtaagacacctgcgcagcaacctggacccgcaaagcctccaactcaacaggttggcacccccaaaccactcgcccagcagcctggccttcagagcccagccaaagcccctggaccgacgaaaacccctgtgcagcctaagcccccaagccaacaaccaggatccaccaaaccccctccacaacagccaggtccagcaaaaccaagccctcaacagccgggatccactaagcctccgagtcagcagccaggctctgctaaaccttctgcgcaacagccctcacccgctaagcccagtgcacagcagagcaccaaacctgtgtctcagaccgggtccggtaagcccttgcaacccccaacagtgagccccagtgccaaacagccccctagccagggcctgcccaagactatctgccccctgtgcaacacgaccgagttgctgctgcatgtgcccgagaaagccaatttcaacacttgcaccgagtgccagacgactgtgtgcagcctgtgcggcttcaatcctaaccctcacctgaccgaagtcaaagaatggctgtgtctcaattgccagatgaaacgagcacttggtggcgatctcgcgcctgtgccctctagcccccagccaaagctgaaaacggccccagtcactacaaccagcgcagtcagcaaatcatcccctcagccacagcagacctcgccaaagaaagatgcggcacccaagcaggacttgtctaaggccccagagcccaaaaagccacctcctctggtgaagcagcctaccctgcatggatcgccaagcgctaaagcgaaacagccccctgaggccgattctctgagcaaaccggctcctcccaaggaaccctccgttccctctgagcaagacaaggccccagtggccgacgataaacccaagcagccgaagatggttaaaccaactacagacctcgtctcttcctctagcgccaccaccaaacccgacatcccctctagcaaagtgcagagccaggccgaagaaaagacaaccccaccattaaagacagacagcgcaaagccaagccaaagtttccctcccaccggagagaaagttagcccgttcgatagcaaggccatcccaaggccggcttctgattccaaaatcatttctcatcctggcccttcctctgaatccaagggccagaagcaagtggaccccgtccaaaaaaaggaggagcccaaaaaagcacagactaaaatgagccctaaaccagacgccaaacctatgccaaagggttcgcctaccccccctggccctcgtccaaccgctgggcaaacagtgcccacaccacagcagagcccaaaaccacaggaacaatcccgaaggttttcactgaatctggggagcataacggatgcaccgaagtcacagcccaccactccccaggaaaccgtgacaggtaagctgtttggattcggtgcatcaatctttagccaggcaagtaatttgatctccactgccggtcagcctggtcctcactcccaatcgggcccaggggctcctatgaaacaagccccagcccctagtcagcccccaaccagtcaaggaccacccaaatcaacgggccaggctccccctgcacccgctaagagcattcctgtgaagaaggagacaaaggcgccagctgctgaaaaacttgaacccaaggctgagcaggcacccacagtcaaaaggactgaaactgagaaaaagcctccaccaataaaggattctaagtctctgacagcggagccgcagaaagctgtgctccccacaaaactggaaaaatccccgaagcccgaaagtacctgccctctttgtaaaaccgagttgaatatagggtctaaagacccccctaactttaatacttgtacagaatgtaagaatcaggtatgcaacctttgcgggttcaaccctacacctcatttaaccgaaaattgtcagactcagagggccatctcggggcaattgggtgatattagaaagatgccacccgctccttccggtccgaaggctagtcctatgccggtgccaaccgagtcatcaagccagaaaaccgccgttccaccccaggtcaagctggtgaaaaagcaagagcaggaggtgaagaccgaagcagaaaaagtaattttagaaaaggttaaggaaactctctctatggagaaaatccctccgatggtaacgacagaccagaagcaggaggagtctaaactggaaaaggataaagctagcgccctacaagaaaaaaagccgctccccgaagagaagaagcttatccctgaggaggagaagatcagatctgaggaaaagaagccactcctagaagaaaagaaaccaacgcctgaggataaaaagcttctgcccgaagcaaagacctctgcacctgaagaacagaagcacgaccttctcaagagccaagtgcagatcgctgaggaaaaactggaaggccgtgtggctccaaaaacagttcaagagggaaagcaaccacagactaaaatggaaggcctgccttccggaaccccacagtccttgccaaaggaagatgataagaccaccaaaaccatcaaggaacagcctcaaccgccatgcactgcgaagccggatcaggagaaggaggatgataaatccgataccagttccagccaacagcccaagtccccacaggggttatctgataccggctatagctccgacgggataagctcatctttaggagagattcctagtctcatccctacggacgaaaaagacatcctgaagggacttaagaaggattccttcagccaggaatcaagcccaagctcacctagcgacctggcgaaacttgagagcacggtcctcagtatcctggaagcccaggctagcactctagccgacgagaaaagtgagaagaagacacaacctcacgaagttagtcctgagcagcccaaggaccaggaaaagacgcaatccctttccgaaactctggagatcaccatcagcgaggaggaaatcaaggaaagtcaagaagaacgcaaagacacgtttaaaaaggatagccagcaggatattcctagcagcaaagaccataaggagaagagcgagttcgtagacgatataactacccgacgcgagccatacgattcagtagaggaatccagtgaaagtgagaattcccccgtgccccaacgcaagagacggacaagcgtgggctctagttcttccgacgagtataagcaggaggacagtcaggggagtggggaagaagaggacttcatccgcaagcagatcattgaaatgtccgcagatgaggatgcatcggggtctgaggacgacgagttcattcgtaatcagctcaaggagatctcctcctctactgagagccaaaagaaggaggaaacaaaagggaagggcaaaattaccgccggaaagcaccgaaggctgacaaggaaatctagcacttccatagatgaggatgccggacgcaggcacagttggcatgacgaggacgacgaagccttcgacgagtcgcctgagctgaagtaccgggagactaagtctcaggagtcggaggagctggttgtgacaggcggtggcggattacggagattcaagactattgaactcaactcgacaatcgccgacaaatatagtgcagagagcagccagaaaaagacttcactttattttgatgaagaacctgagctggaaatggaatccctgacagactctcccgaggacaggagtagaggagaaggatcatcttccctgcacgccagttctttcaccccaggtacatctccaacgtccgtctctagcctggatgaggattcagattcaagcccaagccataagaaaggcgagagtaagcagcagcgcaaggcccgacatcggcctcacggtcccctgctgccaacaatcgaggattcatcggaagaagaggaactgcgagaggaagaagagctgctgaaggaacaggagaagcaacgagagatagaacaacagcaacgcaaatctagctccaaaaagtcgaagaaagacaaggacgagctccgtgcacaaagacgtcgagaacggccaaagacacccccttctaatctctccccaatcgaagacgccagtcccacagaagagcttcgccaagcagcagaaatggaggagctgcatcgatcctcctgctcagaatattcaccatctatcgagtctgatcccgaaggattcgagatatcacctgagaaaattatagaggttcagaaggtctacaaattaccaacagctgtgagcctgtatagccctactgacgagcagtcgattatgcaaaaggagggatcccagaaggccctgaagtcggctgaggaaatgtacgaggagatgatgcacaagactcataaatataaagctttccctgccgctaatgagagggatgaggtgtttgaaaaagagccactctacggagggatgcttatcgaagactatatatatgagagccttgtggaggatacctacaatggaagcgtggacggctccctgctgacccggcaggaagaggagaacggctttatgcagcagaaaggaagggagcagaaaatcagactctcagagcaaatttatgaagaccctatgcagaagatcactgatttacagaaagagttctacgagctggagtctctgcacagcgtggtgccccaagaggatatagtcagctcctcatttatcattcctgaatcacatgaaattgtggacttaggcactatggtcacctccacagaagaagagcgaaagcttctcgacgcggatgctgcgtatgaggaattgatgaaaagacagcagatgcagttgacacccggatcctccccgacccaggcccctatcggggaagatatgaccgagtcgaccatggacttcgaccgtatgcctgatgcctccctcacctccagcgtcctgtctggagccagcctgacagatagcactagctccgcaacattgtctattccggacgtgaaaatcacacagcactttagcacagaagagatagaagatgagtacgtcacagactataccagagagatacaggaaattattgctcatgaatctctgatcctcacctatagcgagccctccgaaagtgcaaccagcgtgcccccaagcgacacccctagcctgacatcctctgtgtcaagcgtgtgtacaaccgattcatcaagtcccatcaccacactggacagcatcacaacagtgtacacggagcctgtggacatgattaccaagttcgaggattctgaagaaatctcctcttcgacgtatttcccaggaagcataatcgattacccggaggagatatctgtgtctctcgacagaacggccccaccagatggcagggcttctgccgaccacatcgttatttccttatccgacatggcttcttctatcattgagtctgtggtcccgaaacccgagggtcctgtcgccgatactgtgagtacagacctcctcatctccgagaaggaccctgtcaaaaaagccaagaaggagactggcaacgggattatcttagaggttctggaggcctatagagacaagaaagagttagaagccgagagaaccaagagctcactcagcgagacagtattcgaccacccccctagttctgtgattgctttgcctatgaaggagcagctgagcacaacatatttcaccagtggagagacctttgggcaggaaaaacccgctagccaactcccttcagggagtccctcggtgtcgtccctgccggctaagccgcgaccgttttttcgaagctctagccttgatatctctgcccagcctccgccacctccaccgcctcctccgcctccccctccgcctccaccaccccctccacctccaccattaccacccccaacctccccaaagcctacaatcctccctaagaagaagttaacagtggcctctcctgttactactgcaacaccactttttgacgcagtcaccacacttgagacaacagctgtgcttcgaagcaatggactccccgtgacacgaatttgtacaactgccccaccccctgtcccacctaagccaagttctataccctccggcctggttttcacgcaccggccagaaccctcaaagcccccaattgcccctaagccggtgatcccccagctgccaaccactactcagaaaccaacagacatccatcctaaacccaccggcttgagtctaacctctagtatgacactgaacctagtcacctcagctgactacaagctgccatcgccaacctcacctttgagcccccatagtaataagagttccccacgcttcagcaaaagtcttactgagacatatgtggtcatcactctaccctctgagcccggtacacctaccgactctagcgcgtcacaggcaattacgtcttggccactgggatcgccctccaaggatctggtcagcgtggagcccgtgttctctgtggtgccacctgtgaccgcagtggagatccccatctcctcagaacaaaccttttacatttctggagccctgcagaccttctccgcaaccccagtcacagctccctcctccttccaagctgcccctacaagtgtgacccagttcctgactactgaggtgtctaaaacagaggtctccgcaacaaggtctacggcaccttctgtcggcctgagcagtattagcatcactatcccgccagagcccctcgccctcgataacatccacctcgagaaaccccagtacaaagaggacggaaaactccaactggtcggagacgtcatcgacctgagaacagtcccaaaagttgaggtcaaaacgacagataaatgcatcgacctcagcgcatcaaccatggacgtgaagaggcagatcaccgcaaacgaagtatatggaaaacagatctccgccgttcagccaagcattattaacttatctgtgacttcctccattgtgaccccagttagcttggctactgaaactgttacctttgtcacatgtacagcgtcggcctcctatactactggaaccgaatcccttgtgggagccgaacacgctatgaccactccgctgcaattgacaaccagcaagcacgccgagcccccatatagaatcccctccgaccaggtgttccctatcgcaagggaggaggctcccattaatttgagtctgggtactcctgcccatgcagtgacattggctataaccaagcccgtaacagtccctccagttggagtgactaacggttggactgacagcactgtctcccaaggaatcaccgacggtgaggtagtggatctcagtaccacgaaatctcaccggacggtcgtgactatggatgagtccacttcctccgtgatgacaaaaattattgaggatgagaaaccggtggaccttaccgctggacgcagggcggtctgctgtgatgtagtttataagctgccattcgggaggagttgcacagcacaacagccggcaaccactctcccggaagatcgtttcggatacagggatgaccattatcaatatgaccgcagcggcccatacggataccgaggcatcggtggaatgaagccttccatgagcgatactaatttggccgaggccggtcatttcttttataagtctaagaatgcctttgactattcagaaggcacggacacagctgttgacctgacaagtggcagagtcacaaccggggaagtgatggattacagttcaaagaccactggtccctacccagagacccggcaggtgatcagtggcgcaggcattagcacaccgcaatacagcactgccaggatgacacccccacccggaccgcagtactgcgtagggtcagtactgaggtcatccaacggggtcgtgtattcatctgtggctacccctacaccctctaccttcgctatcaccacacagccaggaagcattttttccacaacagtgcgagatctgtctgggattcacactgctgatgcagttacatccctgccagccatgcaccatagccagcccatgcccagatcttactttataacaacgggagcgagcgaaactgacatagctgttaccggaatcgatatctccgccagcttgcagactatcacgatggagtctctcactgctgagaccatcgactcagtgcccacactgaccactgcatctgaggtattccccgaagtggtgggggatgaaagcgctttgttgattgtccccgaagaagataagcagcagcagcagttggacctggagcgtgagctcttagagttagaaaagattaagcagcagaggttcgccgaggagctggagtgggagaggcaagagattcagcggtttcgagaacaagaaaaaattatggtacaaaaaaaactcgaggagttgcagtccatgaagcagcaccttctgttccaacaagaagaagagaggcaggcacagttcatgatgaggcaggagaccctcgcccagcaacagctgcagctcgaacagatccagcagttgcaacagcaattacaccaacagttagaagagcagaagatccgacaaatatatcagtacaattacgatcctagcggaactgcctccccacagacaactacggaacaagccattctggagggtcagtatgcagcactggaaggcagccaattctgggcaacagaagatgcaaccaccacagccagtgccgtggtggcaatagagatcccgcagagtcagggatggtatactgtacagagtgacggagtcactcaatacattgctcctcccggaattctgagcactgtaagtgagatccctttgacagatgttgttgttaaggaggagaaacaacccaaaaagcggagttctggcgctaaggtgcgcggacaatacgatgatatgggtgaaaacatgactgatgatcccagaagcttcaaaaagatcgtggactcaggagtccaaacagatgacgaggacgccactgacaggagttatgtgtctcgccgacggaggacaaagaaatctgttgacacttctgtgcaaacagacgacgaagatcaggacgaatgggacatgcctacccgttccagacggaaagcccgtgtggggaagtacggtgactccatgactgaggccgataagaccaagcctttatccaaggttagctctattgccgtacagaccgtggctgagatttccgtacagaccgagcccgtcggcaccattcgcacaccatccattagggctcgcgttgatgccaaagtggagatcatcaagcacattagcgccccagaaaagacttataaaggaggcagccttggttgtcagactgaggctgacagcgacacacagtcaccgcaatatttatctgccacatccccacctaaagacaagaagcggcctacgcccctggagatcgggtatagcagtcatctgagggctgacagcaccgtccagctggctccctctccgccaaaatctcccaaggtgctctactcccccatcagtcccttgagtccaggcaaggccctggagtctgccttcgttccatatgaaaaaccccttccagacgatatctccccgcaaaaggtgctgcatcctgacatggccaaagtgccccctgcctctcccaaaaccgctaaaatgatgcagcggtcaatgagcgaccccaaacctctgagcccaaccgcagatgaatcaagcagagcaccattccagtacacagagggctacacgtat

SEQ ID NO: 180512 - DNA, 561 bp, Artificial Sequence
  derived and/or modified sequence
atgagtcctaaaccccgtgcctccgggcctcctgcaaaagccacggaagccggaaagcggaagtctagctcccagccctctccatctgatcccaaaaagaaaaccactaaggtggctaagaagggtaaggcagtgcggcgtgggaggagaggcaagaagggagcggctaccaagatggctgcggtgaccgcacccgaagccgagtcaggccctgccgctccaggtcccagcgaccagccgtctcaagagcttcctcagcacgagctgccccctgaggagcctgtgtccgaaggcacccagcacgaccctcttagccaagagtccgagctggaagagccgctcagtcaggagagcgaggtggaggagccactttcccaggagagtcaggtagaggaacctctctcccaggaatcagaagtcgaggagcctctgagccaggagagccaagttgaggagccgctatcccaggagagtgaagtcgaagagcccctcagccaggaaagccaggtggaagaaccgctgagccaggagtctgaaatggaggagctgccatccgtctag

SEQ ID NO: 180513 - DNA, 1269 bp, Artificial Sequence
  derived and/or modified sequence
accaaggtgtggaacagcaacggcctgggcatcagaatcgtgggcggcaaggagatccccggccacagcggcgagatcggcgcctacatcgccaagatcctgcccggcggcagcgccgagcagaccggcaagctgatggagggcatgcaggtgctggagtggaacggcatccccctgaccagcaagacctacgaggaggtgcagagcatcatcagccagcagagcggcgaggccgagatctgcgtgagactggacctgaacatgctgagcgacagcgagaacagccagcacctggagctgcacgagccccccaaggccgtggacaaggccaagagccccggcgtggaccccaagcagctggccgccgagctgcagaaggtgagcctgcagcagagccccctggtgctgagcagcgtggtggagaagggcagccacgtgcacagcggccccaccagcgccggcagcagcagcgtgcccagccccggccagcccggcagccccagcgtgagcaagaagaagcacggcagcagcaagcccaccgacggcaccaaggtggtgagccaccccatcaccggcgagatccagctgcagatcaactacgacctgggcaacctgatcatccacatcctgcaggccagaaacctggtgcccagagacaacaacggctacagcgaccccttcgtgaaggtgtacctgctgcccggcagaggcgccgagtacaagagaagaaccaagcacgtgcagaagagcctgaaccccgagtggaaccagaccgtgatctacaagagcatcagcatggagcagctgaagaagaagaccctggaggtgaccgtgtgggactacgacagattcagcagcaacgacttcctgggcgaggtgctgatcgacctgagcagcaccagccacctggacaacacccccagatggtaccccctgaaggagcagaccgagagcatcgaccacggcaagagccacagcagccagagcagccagcagagccccaagcccagcgtgatcaagagcagaagccacggcatcttccccgaccccagcaaggacatgcaggtgcccaccatcgagaagagccacagcagccccggcagcagcaagagcagcagcgagggccacctgagaagccacggccccagcagaagccagagcaagaccagcgtgacccagacccacctggaggacgccggcgccgccatcgccgccgccgaggccgccgtgcagcagctgagaatccagcccagcaagagaagaaagtag

SEQ ID NO: 180514 - DNA, 14808 bp, Artificial Sequence
  derived and/or modified sequence
atgggcaacgaggccagcctggagggcgagggcctgcccgagggcctggccgccgccgccgccgccggcggcggcgccagcggcgccggcagccccagccacaccgccatccccgccggcatggaggccgacctgagccagctgagcgaggaggagagaagacagatcgccgccgtgatgagcagagcccagggcctgcccaagggcagcgtgccccccgccgccgccgagagccccagcatgcacagaaagcaggagctggacagcagccacccccccaagcagagcggcagaccccccgaccccggcagacccgcccagcccggcctgagcaagagcagaaccaccgacaccttcagaagcgagcagaagctgcccggcagaagccccagcaccatcagcctgaaggagagcaagagcagaaccgacctgaaggaggagcacaagagcagcatgatgcccggcttcctgagcgaggtgaacgccctgagcgccgtgagcagcgtggtgaacaagttcaaccccttcgacctgatcagcgacagcgaggccagccaggaggagaccaccaagaagcagaaggtggtgcagaaggagcagggcaagcccgagggcatcatcaagccccccctgcagcagcagccccccaagcccatccccaagcagcagggccccggcagagaccccctgcagcaggacggcacccccaagagcatcagcagccagcagcccgagaagatcaagagccagccccccggcaccggcaagcccatccagggccccacccagaccccccagaccgaccacgccaagctgcccctgcagagagacgccagcagaccccagaccaagcaggccgacatcgtgagaggcgagagcgtgaagcccagcctgcccagccccagcaagccccccatccagcagcccacccccggcaagccccccgcccagcagcccggccacgagaagagccagcccggccccgccaagccccccgcccagcccagcggcctgaccaagcccctggcccagcagcccggcaccgtgaagccccccgtgcagccccccggcaccaccaagccccccgcccagcccctgggccccgccaagccccccgcccagcagaccggcagcgagaagcccagcagcgagcagcccggccccaaggccctggcccagccccccggcgtgggcaagacccccgcccagcagcccggccccgccaagccccccacccagcaggtgggcacccccaagcccctggcccagcagcccggcctgcagagccccgccaaggcccccggccccaccaagacccccgtgcagcagcccggccccggcaagatccccgcccagcaggccggccccggcaagaccagcgcccagcagaccggccccaccaagccccccagccagctgcccggccccgccaagccccccccccagcagcccggccccgccaagccccccccccagcagcccggcagcgccaagccccccagccagcagcccggcagcaccaagccccccccccagcagcccggccccgccaagcccagcccccagcagcccggcagcaccaagccccccagccagcagcccggcagcgccaagcccagcgcccagcagcccagccccgccaagcccagcgcccagcagagcaccaagcccgtgagccagaccggcagcggcaagcccctgcagccccccaccgtgagccccagcgccaagcagccccccagccagggcctgcccaagaccatctgccccctgtgcaacaccaccgagctgctgctgcacgtgcccgagaaggccaacttcaacacctgcaccgagtgccagaccaccgtgtgcagcctgtgcggcttcaaccccaacccccacctgaccgaggtgaaggagtggctgtgcctgaactgccagatgaagagagccctgggcggcgacctggcccccgtgcccagcagcccccagcccaagctgaagaccgcccccgtgaccaccaccagcgccgtgagcaagagcagcccccagccccagcagaccagccccaagaaggacgccgcccccaagcaggacctgagcaaggcccccgagcccaagaagcccccccccctggtgaagcagcccaccctgcacggcagccccagcgccaaggccaagcagccccccgaggccgacagcctgagcaagcccgccccccccaaggagcccagcgtgcccagcgagcaggacaaggcccccgtggccgacgacaagcccaagcagcccaagatggtgaagcccaccaccgacctggtgagcagcagcagcgccaccaccaagcccgacatccccagcagcaaggtgcagagccaggccgaggagaagaccaccccccccctgaagaccgacagcgccaagcccagccagagcttcccccccaccggcgagaaggtgagccccttcgacagcaaggccatccccagacccgccagcgacagcaagatcatcagccaccccggccccagcagcgagagcaagggccagaagcaggtggaccccgtgcagaagaaggaggagcccaagaaggcccagaccaagatgagccccaagcccgacgccaagcccatgcccaagggcagccccaccccccccggccccagacccaccgccggccagaccgtgcccaccccccagcagagccccaagccccaggagcagagcagaagattcagcctgaacctgggcagcatcaccgacgcccccaagagccagcccaccaccccccaggagaccgtgaccggcaagctgttcggcttcggcgccagcatcttcagccaggccagcaacctgatcagcaccgccggccagcccggcccccacagccagagcggccccggcgcccccatgaagcaggcccccgcccccagccagccccccaccagccagggcccccccaagagcaccggccaggccccccccgcccccgccaagagcatccccgtgaagaaggagaccaaggcccccgccgccgagaagctggagcccaaggccgagcaggcccccaccgtgaagagaaccgagaccgagaagaagcccccccccatcaaggacagcaagagcctgaccgccgagccccagaaggccgtgctgcccaccaagctggagaagagccccaagcccgagagcacctgccccctgtgcaagaccgagctgaacatcggcagcaaggacccccccaacttcaacacctgcaccgagtgcaagaaccaggtgtgcaacctgtgcggcttcaaccccaccccccacctgaccgagatccaggagtggctgtgcctgaactgccagacccagagagccatcagcggccagctgggcgacatcagaaagatgccccccgcccccagcggccccaaggccagccccatgcccgtgcccaccgagagcagcagccagaagaccgccgtgcccccccaggtgaagctggtgaagaagcaggagcaggaggtgaagaccgaggccgagaaggtgatcctggagaaggtgaaggagaccctgagcatggagaagatcccccccatggtgaccaccgaccagaagcaggaggagagcaagctggagaaggacaaggccagcgccctgcaggagaagaagcccctgcccgaggagaagaagctgatccccgaggaggagaagatcagaagcgaggagaagaagcccctgctggaggagaagaagcccacccccgaggacaagaagctgctgcccgaggccaagaccagcgcccccgaggagcagaagcacgacctgctgaagagccaggtgcagatcgccgaggagaagctggagggcagagtggcccccaagaccgtgcaggagggcaagcagccccagaccaagatggagggcctgcccagcggcaccccccagagcctgcccaaggaggacgacaagaccaccaagaccatcaaggagcagccccagcccccctgcaccgccaagcccgaccaggtggagcccggcaaggagaagaccgagaaggaggacgacaagagcgacaccagcagcagccagcagcccaagagcccccagggcctgagcgacaccggctacagcagcgacggcatcagcagcagcctgggcgagatccccagcctgatccccaccgacgagaaggacatcctgaagggcctgaagaaggacagcttcagccaggagagcagccccagcagccccagcgacctggccaagctggagagcaccgtgctgagcatcctggaggcccaggccagcaccctggccgacgagaagagcgagaagaagacccagccccacgaggtgagccccgagcagcccaaggaccaggagaagacccagagcctgagcgagaccctggagatcaccatcagcgaggaggagatcaaggagagccaggaggagagaaaggacaccttcaagaaggacagccagcaggacatccccagcagcaaggaccacaaggagaagagcgagttcgtggacgacatcaccaccagaagagagccctacgacagcgtggaggagagcagcgagagcgagaacagccccgtgccccagagaaagagaagaaccagcgtgggcagcagcagcagcgacgagtacaagcaggaggacagccagggcagcggcgaggaggaggacttcatcagaaagcagatcatcgagatgagcgccgacgaggacgccagcggcagcgaggacgacgagttcatcagaaaccagctgaaggagatcagcagcagcaccgagagccagaagaaggaggagaccaagggcaagggcaagatcaccgccggcaagcacagaagactgaccagaaagagcagcaccagcatcgacgaggacgccggcagaagacacagctggcacgacgaggacgacgaggccttcgacgagagccccgagctgaagtacagagagaccaagagccaggagagcgaggagctggtggtgaccggcggcggcggcctgagaagattcaagaccatcgagctgaacagcaccatcgccgacaagtacagcgccgagagcagccagaagaagaccagcctgtacttcgacgaggagcccgagctggagatggagagcctgaccgacagccccgaggacagaagcagaggcgagggcagcagcagcctgcacgccagcagcttcacccccggcaccagccccaccagcgtgagcagcctggacgaggacagcgacagcagccccagccacaagaagggcgagagcaagcagcagagaaaggccagacacagaccccacggccccctgctgcccaccatcgaggacagcagcgaggaggaggagctgagagaggaggaggagctgctgaaggagcaggagaagcagagagagatcgagcagcagcagagaaagagcagcagcaagaagagcaagaaggacaaggacgagctgagagcccagagaagaagagagagacccaagaccccccccagcaacctgagccccatcgaggacgccagccccaccgaggagctgagacaggccgccgagatggaggagctgcacagaagcagctgcagcgagtacagccccagcatcgagagcgaccccgagggcttcgagatcagccccgagaagatcatcgaggtgcagaaggtgtacaagctgcccaccgccgtgagcctgtacagccccaccgacgagcagagcatcatgcagaaggagggcagccagaaggccctgaagagcgccgaggagatgtacgaggagatgatgcacaagacccacaagtacaaggccttccccgccgccaacgagagagacgaggtgttcgagaaggagcccctgtacggcggcatgctgatcgaggactacatctacgagagcctggtggaggacacctacaacggcagcgtggacggcagcctgctgaccagacaggaggaggagaacggcttcatgcagcagaagggcagagagcagaagatcagactgagcgagcagatctacgaggaccccatgcagaagatcaccgacctgcagaaggagttctacgagctggagagcctgcacagcgtggtgccccaggaggacatcgtgagcagcagcttcatcatccccgagagccacgagatcgtggacctgggcaccatggtgaccagcaccgaggaggagagaaagctgctggacgccgacgccgcctacgaggagctgatgaagagacagcagatgcagctgacccccggcagcagccccacccaggcccccatcggcgaggacatgaccgagagcaccatggacttcgacagaatgcccgacgccagcctgaccagcagcgtgctgagcggcgccagcctgaccgacagcaccagcagcgccaccctgagcatccccgacgtgaagatcacccagcacttcagcaccgaggagatcgaggacgagtacgtgaccgactacaccagagagatccaggagatcatcgcccacgagagcctgatcctgacctacagcgagcccagcgagagcgccaccagcgtgccccccagcgacacccccagcctgaccagcagcgtgagcagcgtgtgcaccaccgacagcagcagccccatcaccaccctggacagcatcaccaccgtgtacaccgagcccgtggacatgatcaccaagttcgaggacagcgaggagatcagcagcagcacctacttccccggcagcatcatcgactaccccgaggagatcagcgtgagcctggacagaaccgccccccccgacggcagagccagcgccgaccacatcgtgatcagcctgagcgacatggccagcagcatcatcgagagcgtggtgcccaagcccgagggccccgtggccgacaccgtgagcaccgacctgctgatcagcgagaaggaccccgtgaagaaggccaagaaggagaccggcaacggcatcatcctggaggtgctggaggcctacagagacaagaaggagctggaggccgagagaaccaagagcagcctgagcgagaccgtgttcgaccacccccccagcagcgtgatcgccctgcccatgaaggagcagctgagcaccacctacttcaccagcggcgagaccttcggccaggagaagcccgccagccagctgcccagcggcagccccagcgtgagcagcctgcccgccaagcccagacccttcttcagaagcagcagcctggacatcagcgcccagccccccccccccccccccccccccccccccccccccccccccccccccccccccccccccccccccctgcccccccccaccagccccaagcccaccatcctgcccaagaagaagctgaccgtggccagccccgtgaccaccgccacccccctgttcgacgccgtgaccaccctggagaccaccgccgtgctgagaagcaacggcctgcccgtgaccagaatctgcaccaccgcccccccccccgtgccccccaagcccagcagcatccccagcggcctggtgttcacccacagacccgagcccagcaagccccccatcgcccccaagcccgtgatcccccagctgcccaccaccacccagaagcccaccgacatccaccccaagcccaccggcctgagcctgaccagcagcatgaccctgaacctggtgaccagcgccgactacaagctgcccagccccaccagccccctgagcccccacagcaacaagagcagccccagattcagcaagagcctgaccgagacctacgtggtgatcaccctgcccagcgagcccggcacccccaccgacagcagcgccagccaggccatcaccagctggcccctgggcagccccagcaaggacctggtgagcgtggagcccgtgttcagcgtggtgccccccgtgaccgccgtggagatccccatcagcagcgagcagaccttctacatcagcggcgccctgcagaccttcagcgccacccccgtgaccgcccccagcagcttccaggccgcccccaccagcgtgacccagttcctgaccaccgaggtgagcaagaccgaggtgagcgccaccagaagcaccgcccccagcgtgggcctgagcagcatcagcatcaccatcccccccgagcccctggccctggacaacatccacctggagaagccccagtacaaggaggacggcaagctgcagctggtgggcgacgtgatcgacctgagaaccgtgcccaaggtggaggtgaagaccaccgacaagtgcatcgacctgagcgccagcaccatggacgtgaagagacagatcaccgccaacgaggtgtacggcaagcagatcagcgccgtgcagcccagcatcatcaacctgagcgtgaccagcagcatcgtgacccccgtgagcctggccaccgagaccgtgaccttcgtgacctgcaccgccagcgccagctacaccaccggcaccgagagcctggtgggcgccgagcacgccatgaccacccccctgcagctgaccaccagcaagcacgccgagcccccctacagaatccccagcgaccaggtgttccccatcgccagagaggaggcccccatcaacctgagcctgggcacccccgcccacgccgtgaccctggccatcaccaagcccgtgaccgtgccccccgtgggcgtgaccaacggctggaccgacagcaccgtgagccagggcatcaccgacggcgaggtggtggacctgagcaccaccaagagccacagaaccgtggtgaccatggacgagagcaccagcagcgtgatgaccaagatcatcgaggacgagaagcccgtggacctgaccgccggcagaagagccgtgtgctgcgacgtggtgtacaagctgcccttcggcagaagctgcaccgcccagcagcccgccaccaccctgcccgaggacagattcggctacagagacgaccactaccagtacgacagaagcggcccctacggctacagaggcatcggcggcatgaagcccagcatgagcgacaccaacctggccgaggccggccacttcttctacaagagcaagaacgccttcgactacagcgagggcaccgacaccgccgtggacctgaccagcggcagagtgaccaccggcgaggtgatggactacagcagcaagaccaccggcccctaccccgagaccagacaggtgatcagcggcgccggcatcagcaccccccagtacagcaccgccagaatgacccccccccccggcccccagtactgcgtgggcagcgtgctgagaagcagcaacggcgtggtgtacagcagcgtggccacccccacccccagcaccttcgccatcaccacccagcccggcagcatcttcagcaccaccgtgagagacctgagcggcatccacaccgccgacgccgtgaccagcctgcccgccatgcaccacagccagcccatgcccagaagctacttcatcaccaccggcgccagcgagaccgacatcgccgtgaccggcatcgacatcagcgccagcctgcagaccatcaccatggagagcctgaccgccgagaccatcgacagcgtgcccaccctgaccaccgccagcgaggtgttccccgaggtggtgggcgacgagagcgccctgctgatcgtgcccgaggaggacaagcagcagcagcagctggacctggagagagagctgctggagctggagaagatcaagcagcagagattcgccgaggagctggagtgggagagacaggagatccagagattcagagagcaggagaagatcatggtgcagaagaagctggaggagctgcagagcatgaagcagcacctgctgttccagcaggaggaggagagacaggcccagttcatgatgagacaggagaccctggcccagcagcagctgcagctggagcagatccagcagctgcagcagcagctgcaccagcagctggaggagcagaagatcagacagatctaccagtacaactacgaccccagcggcaccgccagcccccagaccaccaccgagcaggccatcctggagggccagtacgccgccctggagggcagccagttctgggccaccgaggacgccaccaccaccgccagcgccgtggtggccatcgagatcccccagagccagggctggtacaccgtgcagagcgacggcgtgacccagtacatcgccccccccggcatcctgagcaccgtgagcgagatccccctgaccgacgtggtggtgaaggaggagaagcagcccaagaagagaagcagcggcgccaaggtgagaggccagtacgacgacatgggcgagaacatgaccgacgaccccagaagcttcaagaagatcgtggacagcggcgtgcagaccgacgacgaggacgccaccgacagaagctacgtgagcagaagaagaagaaccaagaagagcgtggacaccagcgtgcagaccgacgacgaggaccaggacgagtgggacatgcccaccagaagcagaagaaaggccagagtgggcaagtacggcgacagcatgaccgaggccgacaagaccaagcccctgagcaaggtgagcagcatcgccgtgcagaccgtggccgagatcagcgtgcagaccgagcccgtgggcaccatcagaacccccagcatcagagccagagtggacgccaaggtggagatcatcaagcacatcagcgcccccgagaagacctacaagggcggcagcctgggctgccagaccgaggccgacagcgacacccagagcccccagtacctgagcgccaccagcccccccaaggacaagaagagacccacccccctggagatcggctacagcagccacctgagagccgacagcaccgtgcagctggcccccagcccccccaagagccccaaggtgctgtacagccccatcagccccctgagccccggcaaggccctggagagcgccttcgtgccctacgagaagcccctgcccgacgacatcagcccccagaaggtgctgcaccccgacatggccaaggtgccccccgccagccccaagaccgccaagatgatgcagagaagcatgagcgaccccaagcccctgagccccaccgccgacgagagcagcagagcccccttccagtacaccgagggctacaccaccaagggcagccagaccatgaccagcagcggcgcccagaagaaggtgaagagaaccctgcccaaccccccccccgaggagatcagcaccggcacccagagcaccttcagcaccatgggcaccgtgagcagaagaagaatctgcagaaccaacaccatggccagagccaagatcctgcaggacatcgacagagagctggacctggtggagagagagagcgccaagctgagaaagaagcaggccgagctggacgaggaggagaaggagatcgacgccaagctgagatacctggagatgggcatcaacagaagaaaggaggccctgctgaaggagagagagaagagagagagagcctacctgcagggcgtggccgaggacagagactacatgagcgacagcgaggtgagcagcaccagacccaccagaatcgagagccagcacggcatcgagagacccagaaccgccccccagaccgagttcagccagttcatccccccccagacccagaccgagagccagctggtgccccccaccagcccctacacccagtaccagtacagcagccccgccctgcccacccaggcccccaccagctacacccagcagagccacttcgagcagcagaccctgtaccaccagcaggtgagcccctaccagacccagcccaccttccaggccgtggccaccatgagcttcaccccccaggtgcagcccacccccaccccccagcccagctaccagctgcccagccagatgatggtgatccagcagaagcccagacagaccaccctgtacctggagcccaagatcaccagcaactacgaggtgatcagaaaccagcccctgatgatcgcccccgtgagcaccgacaacaccttcgccgtgagccacctgggcagcaagtacaacagcctggacctgagaatcggcctggaggagagaagcagcatggccagcagccccatcagcagcatcagcgccgacagcttctacgccgacatcgaccaccacacccccagaaactacgtgctgatcgacgacatcggcgagatcaccaagggcaccgccgccctgagcaccgccttcagcctgcacgagaaggacctgagcaagaccgacagactgctgagaaccaccgagaccagaagaagccaggaggtgaccgacttcctggcccccctgcagagcagcagcagactgcacagctacgtgaaggccgaggaggaccccatggaggacccctacgagctgaagctgctgaagcaccagatcaagcaggagttcagaagaggcaccgagagcctggaccacctggccggcctgagccactactaccacgccgacaccagctacagacacttccccaagagcgagaagtacagcatcagcagactgaccctggagaagcaggccgccaagcagctgcccgccgccatcctgtaccagaagcagagcaagcacaagaagagcctgatcgaccccaagatgagcaagttcagccccatccaggagagcagagacctggagcccgactacagcagctacatgaccagcagcaccagcagcatcggcggcatcagcagcagagccagactgctgcaggacgacatcaccttcggcctgagaaagaacatcaccgaccagcagaagttcatgggcagcagcctgggcaccggcctgggcaccctgggcaacaccatcagaagcgccctgcaggacgaggccgacaagccctacagcagcggcagcagaagcagacccagcagcagacccagcagcgtgtacggcctggacctgagcatcaagagagacagcagcagcagcagcctgagactgaaggcccaggaggccgaggccctggacgtgagcttcagccacgccagcagcagcgccagaaccaagcccaccagcctgcccatcagccagagcagaggcagaatccccatcgtggcccagaacagcgaggaggagagccccctgagccccgtgggccagcccatgggcatggccagagccgccgccggccccctgccccccatcagcgccgacaccagagaccagttcggcagcagccacagcctgcccgaggtgcagcagcacatgagagaggagagcagaaccagaggctacgacagagacatcgccttcatcatggacgacttccagcacgccatgagcgacagcgaggcctaccacctgagaagagaggagaccgactggttcgacaagcccagagagagcagactggagaacggccacggcctggacagaaagctgcccgagagactggtgcacagcagacccctgagccagcaccaggagcagatcatccagatgaacggcaagaccatgcactacatcttcccccacgccagaatcaagatcaccagagacagcaaggaccacaccgtgagcggcaacggcctgggcatcagaatcgtgggcggcaaggagatccccggccacagcggcgagatcggcgcctacatcgccaagatcctgcccggcggcagcgccgagcagaccggcaagctgatggagggcatgcaggtgctggagtggaacggcatccccctgaccagcaagacctacgaggaggtgcagagcatcatcagccagcagagcggcgaggccgagatctgcgtgagactggacctgaacatgctgagcgacagcgagaacagccagcacctggagctgcacgagccccccaaggccgtggacaaggccaagagccccggcgtggaccccaagcagctggccgccgagctgcagaaggtgagcctgcagcagagccccctggtgctgagcagcgtggtggagaagggcagccacgtgcacagcggccccaccagcgccggcagcagcagcgtgcccagccccggccagcccggcagccccagcgtgagcaagaagaagcacggcagcagcaagcccaccgacggcaccaaggtggtgagccaccccatcaccggcgagatccagctgcagatcaactacgacctgggcaacctgatcatccacatcctgcaggccagaaacctggtgcccagagacaacaacggctacagcgaccccttcgtgaaggtgtacctgctgcccggcagaggccaggtgatggtggtgcagaacgccagcgccgagtacaagagaagaaccaagcacgtgcagaagagcctgaaccccgagtggaaccagaccgtgatctacaagagcatcagcatggagcagctgaagaagaagaccctggaggtgaccgtgtgggactacgacagattcagcagcaacgacttcctgggcgaggtgctgatcgacctgagcagcaccagccacctggacaacacccccagatggtaccccctgaaggagcagaccgagagcatcgaccacggcaagagccacagcagccagagcagccagcagagccccaagcccagcgtgatcaagagcagaagccacggcatcttccccgaccccagcaaggacatgcaggtgcccaccatcgagaagagccacagcagccccggcagcagcaagagcagcagcgagggccacctgagaagccacggccccagcagaagccagagcaagaccagcgtgacccagacccacctggaggacgccggcgccgccatcgccgccgccgaggccgccgtgcagcagctgagaatccagcccagcaagagaagaaagtag

SEQ ID NO: 180515 - DNA, 10908 bp, Artificial Sequence
  derived and/or modified sequence
atgggcaacgaggccagcctggagggcgagggcctgcccgagggcctggccgccgccgccgccgccggcggcggcgccagcggcgccggcagccccagccacaccgccatccccgccggcatggaggccgacctgagccagctgagcgaggaggagagaagacagatcgccgccgtgatgagcagagcccagggcctgcccaagggcagcgtgccccccgccgccgccgagagccccagcatgcacagaaagcaggagctggacagcagccacccccccaagcagagcggcagaccccccgaccccggcagacccgcccagcccggcctgagcaagagcagaaccaccgacaccttcagaagcgagcagaagctgcccggcagaagccccagcaccatcagcctgaaggagagcaagagcagaaccgacctgaaggaggagcacaagagcagcatgatgcccggcttcctgagcgaggtgaacgccctgagcgccgtgagcagcgtggtgaacaagttcaaccccttcgacctgatcagcgacagcgaggccagccaggaggagaccaccaagaagcagaaggtggtgcagaaggagcagggcaagcccgagggcatcatcaagccccccctgcagcagcagccccccaagcccatccccaagcagcagggccccggcagagaccccctgcagcaggacggcacccccaagagcatcagcagccagcagcccgagaagatcaagagccagccccccggcaccggcaagcccatccagggccccacccagaccccccagaccgaccacgccaagctgcccctgcagagagacgccagcagaccccagaccaagcaggccgacatcgtgagaggcgagagcgtgaagcccagcctgcccagccccagcaagccccccatccagcagcccacccccggcaagccccccgcccagcagcccggccacgagaagagccagcccggccccgccaagccccccgcccagcccagcggcctgaccaagcccctggcccagcagcccggcaccgtgaagccccccgtgcagccccccggcaccaccaagccccccgcccagcccctgggccccgccaagccccccgcccagcagaccggcagcgagaagcccagcagcgagcagcccggccccaaggccctggcccagccccccggcgtgggcaagacccccgcccagcagcccggccccgccaagccccccacccagcaggtgggcacccccaagcccctggcccagcagcccggcctgcagagccccgccaaggcccccggccccaccaagacccccgtgcagcccaagccccccagccagcagcccggcagcaccaagccccccccccagcagcccggccccgccaagcccagcccccagcagcccggcagcaccaagccccccagccagcagcccggcagcgccaagcccagcgcccagcagcccagccccgccaagcccagcgcccagcagagcaccaagcccgtgagccagaccggcagcggcaagcccctgcagccccccaccgtgagccccagcgccaagcagccccccagccagggcctgcccaagaccatctgccccctgtgcaacaccaccgagctgctgctgcacgtgcccgagaaggccaacttcaacacctgcaccgagtgccagaccaccgtgtgcagcctgtgcggcttcaaccccaacccccacctgaccgaggtgaaggagtggctgtgcctgaactgccagatgaagagagccctgggcggcgacctggcccccgtgcccagcagcccccagcccaagctgaagaccgcccccgtgaccaccaccagcgccgtgagcaagagcagcccccagccccagcagaccagccccaagaaggacgccgcccccaagcaggacctgagcaaggcccccgagcccaagaagcccccccccctggtgaagcagcccaccctgcacggcagccccagcgccaaggccaagcagccccccgaggccgacagcctgagcaagcccgccccccccaaggagcccagcgtgcccagcgagcaggacaaggcccccgtggccgacgacaagcccaagcagcccaagatggtgaagcccaccaccgacctggtgagcagcagcagcgccaccaccaagcccgacatccccagcagcaaggtgcagagccaggccgaggagaagaccaccccccccctgaagaccgacagcgccaagcccagccagagcttcccccccaccggcgagaaggtgagccccttcgacagcaaggccatccccagacccgccagcgacagcaagatcatcagccaccccggccccagcagcgagagcaagggccagaagcaggtggaccccgtgcagaagaaggaggagcccaagaaggcccagaccaagatgagccccaagcccgacgccaagcccatgcccaagggcagccccaccccccccggccccagacccaccgccggccagaccgtgcccaccccccagcagagccccaagccccaggagcagagcagaagattcagcctgaacctgggcagcatcaccgacgcccccaagagccagcccaccaccccccaggagaccgtgaccggcaagctgttcggcttcggcgccagcatcttcagccaggccagcaacctgatcagcaccgccggccagcccggcccccacagccagagcggccccggcgcccccatgaagcaggcccccgcccccagccagccccccaccagccagggcccccccaagagcaccggccaggccccccccgcccccgccaagagcatccccgtgaagaaggagaccaaggcccccgccgccgagaagctggagcccaaggccgagcaggcccccaccgtgaagagaaccgagaccgagaagaagcccccccccatcaaggacagcaagagcctgaccgccgagccccagaaggccgtgctgcccaccaagctggagaagagccccaagcccgagagcacctgccccctgtgcaagaccgagctgaacatcggcagcaaggacccccccaacttcaacacctgcaccgagtgcaagaaccaggtgtgcaacctgtgcggcttcaaccccaccccccacctgaccgagaactgccagacccagagagccatcagcggccagctgggcgacatcagaaagatgccccccgcccccagcggccccaaggccagccccatgcccgtgcccaccgagagcagcagccagaagaccgccgtgcccccccaggtgaagctggtgaagaagcaggagcaggaggtgaagaccgaggccgagaaggtgatcctggagaaggtgaaggagaccctgagcatggagaagatcccccccatggtgaccaccgaccagaagcaggaggagagcaagctggagaaggacaaggccagcgccctgcaggagaagaagcccctgcccgaggagaagaagctgatccccgaggaggagaagatcagaagcgaggagaagaagcccctgctggaggagaagaagcccacccccgaggacaagaagctgctgcccgaggccaagaccagcgcccccgaggagcagaagcacgacctgctgaagagccaggtgcagatcgccgaggagaagctggagggcagagtggcccccaagaccgtgcaggagggcaagcagccccagaccaagatggagggcctgcccagcggcaccccccagagcctgcccaaggaggacgacaagaccaccaagaccatcaaggagcagccccagcccccctgcaccgccaagcccgaccaggagaaggaggacgacaagagcgacaccagcagcagccagcagcccaagagcccccagggcctgagcgacaccggctacagcagcgacggcatcagcagcagcctgggcgagatccccagcctgatccccaccgacgagaaggacatcctgaagggcctgaagaaggacagcttcagccaggagagcagccccagcagccccagcgacctggccaagctggagagcaccgtgctgagcatcctggaggcccaggccagcaccctggccgacgagaagagcgagaagaagacccagccccacgaggtgagccccgagcagcccaaggaccaggagaagacccagagcctgagcgagaccctggagatcaccatcagcgaggaggagatcaaggagagccaggaggagagaaaggacaccttcaagaaggacagccagcaggacatccccagcagcaaggaccacaaggagaagagcgagttcgtggacgacatcaccaccagaagagagccctacgacagcgtggaggagagcagcgagagcgagaacagccccgtgccccagagaaagagaagaaccagcgtgggcagcagcagcagcgacgagtacaagcaggaggacagccagggcagcggcgaggaggaggacttcatcagaaagcagatcatcgagatgagcgccgacgaggacgccagcggcagcgaggacgacgagttcatcagaaaccagctgaaggagatcagcagcagcaccgagagccagaagaaggaggagaccaagggcaagggcaagatcaccgccggcaagcacagaagactgaccagaaagagcagcaccagcatcgacgaggacgccggcagaagacacagctggcacgacgaggacgacgaggccttcgacgagagccccgagctgaagtacagagagaccaagagccaggagagcgaggagctggtggtgaccggcggcggcggcctgagaagattcaagaccatcgagctgaacagcaccatcgccgacaagtacagcgccgagagcagccagaagaagaccagcctgtacttcgacgaggagcccgagctggagatggagagcctgaccgacagccccgaggacagaagcagaggcgagggcagcagcagcctgcacgccagcagcttcacccccggcaccagccccaccagcgtgagcagcctggacgaggacagcgacagcagccccagccacaagaagggcgagagcaagcagcagagaaaggccagacacagaccccacggccccctgctgcccaccatcgaggacagcagcgaggaggaggagctgagagaggaggaggagctgctgaaggagcaggagaagcagagagagatcgagcagcagcagagaaagagcagcagcaagaagagcaagaaggacaaggacgagctgagagcccagagaagaagagagagacccaagaccccccccagcaacctgagccccatcgaggacgccagccccaccgaggagctgagacaggccgccgagatggaggagctgcacagaagcagctgcagcgagtacagccccagcatcgagagcgaccccgagggcttcgagatcagccccgagaagatcatcgaggtgcagaaggtgtacaagctgcccaccgccgtgagcctgtacagccccaccgacgagcagagcatcatgcagaaggagggcagccagaaggccctgaagagcgccgaggagatgtacgaggagatgatgcacaagacccacaagtacaaggccttccccgccgccaacgagagagacgaggtgttcgagaaggagcccctgtacggcggcatgctgatcgaggactacatctacgagagcctggtggaggacacctacaacggcagcgtggacggcagcctgctgaccagacaggaggaggagaacggcttcatgcagcagaagggcagagagcagaagatcagactgagcgagcagatctacgaggaccccatgcagaagatcaccgacctgcagaaggagttctacgagctggagagcctgcacagcgtggtgccccaggaggacatcgtgagcagcagcttcatcatccccgagagccacgagatcgtggacctgggcaccatggtgaccagcaccgaggaggagagaaagctgctggacgccgacgccgcctacgaggagctgatgaagagacagcagatgcagctgacccccggcagcagccccacccaggcccccatcggcgaggacatgaccgagagcaccatggacttcgacagaatgcccgacgccagcctgaccagcagcgtgctgagcggcgccagcctgaccgacagcaccagcagcgccaccctgagcatccccgacgtgaagatcacccagcacttcagcaccgaggagatcgaggacgagtacgtgaccgactacaccagagagatccaggagatcatcgcccacgagagcctgatcctgacctacagcgagcccagcgagagcgccaccagcgtgccccccagcgacacccccagcctgaccagcagcgtgagcagcgtgtgcaccaccgacagcagcagccccatcaccaccctggacagcatcaccaccgtgtacaccgagcccgtggacatgatcaccaagttcgaggacagcgaggagatcagcagcagcacctacttccccggcagcatcatcgactaccccgaggagatcagcgtgagcctggacagaaccgccccccccgacggcagagccagcgccgaccacatcgtgatcagcctgagcgacatggccagcagcatcatcgagagcgtggtgcccaagcccgagggccccgtggccgacaccgtgagcaccgacctgctgatcagcgagaaggaccccgtgaagaaggccaagaaggagaccggcaacggcatcatcctggaggtgctggaggcctacagagacaagaaggagctggaggccgagagaaccaagagcagcctgagcgagaccgtgttcgaccacccccccagcagcgtgatcgccctgcccatgaaggagcagctgagcaccacctacttcaccagcggcgagaccttcggccaggagaagcccgccagccagctgcccagcggcagccccagcgtgagcagcctgcccgccaagcccagacccttcttcagaagcagcagcctggacatcagcgcccagccccccccccccccccccccccccccccccccccccccccccccccccccccccccccccccccccctgcccccccccaccagccccaagcccaccatcctgcccaagaagaagctgaccgtggccagccccgtgaccaccgccacccccctgttcgacgccgtgaccaccctggagaccaccgccgtgctgagaagcaacggcctgcccgtgaccagaatctgcaccaccgcccccccccccgtgccccccaagcccagcagcatccccagcggcctggtgttcacccacagacccgagcccagcaagccccccatcgcccccaagcccgtgatcccccagctgcccaccaccacccagaagcccaccgacatccaccccaagcccaccggcctgagcctgaccagcagcatgaccctgaacctggtgaccagcgccgactacaagctgcccagccccaccagccccctgagcccccacagcaacaagagcagccccagattcagcaagagcctgaccgagacctacgtggtgatcaccctgcccagcgagcccggcacccccaccgacagcagcgccagccaggccatcaccagctggcccctgggcagccccagcaaggacctggtgagcgtggagcccgtgttcagcgtggtgccccccgtgaccgccgtggagatccccatcagcagcgagcagaccttctacatcagcggcgccctgcagaccttcagcgccacccccgtgaccgcccccagcagcttccaggccgcccccaccagcgtgacccagttcctgaccaccgaggtgagcaagaccgaggtgagcgccaccagaagcaccgcccccagcgtgggcctgagcagcatcagcatcaccatcccccccgagcccctggccctggacaacatccacctggagaagccccagtacaaggaggacggcaagctgcagctggtgggcgacgtgatcgacctgagaaccgtgcccaaggtggaggtgaagaccaccgacaagtgcatcgacctgagcgccagcaccatggacgtgaagagacagatcaccgccaacgaggtgtacggcaagcagatcagcgccgtgcagcccagcatcatcaacctgagcgtgaccagcagcatcgtgacccccgtgagcctggccaccgagaccgtgaccttcgtgacctgcaccgccagcgccagctacaccaccggcaccgagagcctggtgggcgccgagcacgccatgaccacccccctgcagctgaccaccagcaagcacgccgagcccccctacagaatccccagcgaccaggtgttccccatcgccagagaggaggcccccatcaacctgagcctgggcacccccgcccacgccgtgaccctggccatcaccaagcccgtgaccgtgccccccgtgggcgtgaccaacggctggaccgacagcaccgtgagccagggcatcaccgacggcgaggtggtggacctgagcaccaccaagagccacagaaccgtggtgaccatggacgagagcaccagcagcgtgatgaccaagatcatcgaggacgagaagcccgtggacctgaccgccggcagaagagccgtgtgctgcgacgtggtgtacaagctgcccttcggcagaagctgcaccgcccagcagcccgccaccaccctgcccgaggacagattcggctacagagacgaccactaccagtacgacagaagcggcccctacggctacagaggcatcggcggcatgaagcccagcatgagcgacaccaacctggccgaggccggccacttcttctacaagagcaagaacgccttcgactacagcgagggcaccgacaccgccgtggacctgaccagcggcagagtgaccaccggcgaggtgatggactacagcagcaagaccaccggcccctaccccgagaccagacaggtgatcagcggcgccggcatcagcaccccccagtacagcaccgccagaatgacccccccccccggcccccagtactgcgtgggcagcgtgctgagaagcagcaacggcgtggtgtacagcagcgtggccacccccacccccagcaccttcgccatcaccacccagcccggcagcatcttcagcaccaccgtgagagacctgagcggcatccacaccgccgacgccgtgaccagcctgcccgccatgcaccacagccagcccatgcccagaagctacttcatcaccaccggcgccagcgagaccgacatcgccgtgaccggcatcgacatcagcgccagcctgcagaccatcaccatggagagcctgaccgccgagaccatcgacagcgtgcccaccctgaccaccgccagcgaggtgttccccgaggtggtgggcgacgagagcgccctgctgatcgtgcccgaggaggacaagcagcagcagcagctggacctggagagagagctgctggagctggagaagatcaagcagcagagattcgccgaggagctggagtgggagagacaggagatccagagattcagagagcaggagaagatcatggtgcagaagaagctggaggagctgcagagcatgaagcagcacctgctgttccagcaggaggaggagagacaggcccagttcatgatgagacaggagaccctggcccagcagcagctgcagctggagcagatccagcagctgcagcagcagctgcaccagcagctggaggagcagaagatcagacagatctaccagtacaactacgaccccagcggcaccgccagcccccagaccaccaccgagcaggccatcctggagggccagtacgccgccctggagggcagccagttctgggccaccgaggacgccaccaccaccgccagcgccgtggtggccatcgagatcccccagagccagggctggtacaccgtgcagagcgacggcgtgacccagtacatcgccccccccggcatcctgagcaccgtgagcgagatccccctgaccgacgtggtggtgaaggaggagaagcagcccaagaagagaagcagcggcgccaaggtgagaggccagtacgacgacatgggcgagaacatgaccgacgaccccagaagcttcaagaagatcgtggacagcggcgtgcagaccgacgacgaggacgccaccgacagaagctacgtgagcagaagaagaagaaccaagaagagcgtggacaccagcgtgcagaccgacgacgaggaccaggacgagtgggacatgcccaccagaagcagaagaaaggccagagtgggcaagtacggcgacagcatgaccgaggccgacaagaccaagcccctgagcaaggtgagcagcatcgccgtgcagaccgtggccgagatcagcgtgcagaccgagcccgtgggcaccatcagaacccccagcatcagagccagagtggacgccaaggtggagatcatcaagcacatcagcgcccccgagaagacctacaagggcggcagcctgggctgccagaccgaggccgacagcgacacccagagcccccagtacctgagcgccaccagcccccccaaggacaagaagagacccacccccctggagatcggctacagcagccacctgagagccgacagcaccgtgcagctggcccccagcccccccaagagccccaaggtgctgtacagccccatcagccccctgagccccggcaaggccctggagagcgccttcgtgccctacgagaagcccctgcccgacgacatcagcccccagaaggtgctgcaccccgacatggccaaggtgccccccgccagccccaagaccgccaagatgatgcagagaagcatgagcgaccccaagcccctgagccccaccgccgacgagagcagcagagcccccttccagtacaccgagggctacacctag

SEQ ID NO: 180516 - DNA, 4269 bp, Artificial Sequence
  derived and/or modified sequence
atggactataaggaccacgacggagactacaaggatcatgatattgattacaaagacgatgacgataagatggccccaaagaagaagcggaaggtcggtatccacggagtcccagcagccgacaagaagtacagcatcggcctggacatcggcaccaactctgtgggctgggccgtgatcaccgacgagtacaaggtgcccagcaagaaattcaaggtgctgggcaacaccgaccggcacagcatcaagaagaacctgatcggagccctgctgttcgacagcggcgaaacagccgaggccacccggctgaagagaaccgccagaagaagatacaccagacggaagaaccggatctgctatctgcaagagatcttcagcaacgagatggccaaggtggacgacagcttcttccacagactggaagagtccttcctggtggaagaggataagaagcacgagcggcaccccatcttcggcaacatcgtggacgaggtggcctaccacgagaagtaccccaccatctaccacctgagaaagaaactggtggacagcaccgacaaggccgacctgcggctgatctatctggccctggcccacatgatcaagttccggggccacttcctgatcgagggcgacctgaaccccgacaacagcgacgtggacaagctgttcatccagctggtgcagacctacaaccagctgttcgaggaaaaccccatcaacgccagcggcgtggacgccaaggccatcctgtctgccagactgagcaagagcagacggctggaaaatctgatcgcccagctgcccggcgagaagaagaatggcctgttcggcaacctgattgccctgagcctgggcctgacccccaacttcaagagcaacttcgacctggccgaggatgccaaactgcagctgagcaaggacacctacgacgacgacctggacaacctgctggcccagatcggcgaccagtacgccgacctgtttctggccgccaagaacctgtccgacgccatcctgctgagcgacatcctgagagtgaacaccgagatcaccaaggcccccctgagcgcctctatgatcaagagatacgacgagcaccaccaggacctgaccctgctgaaagctctcgtgcggcagcagctgcctgagaagtacaaagagattttcttcgaccagagcaagaacggctacgccggctacattgacggcggagccagccaggaagagttctacaagttcatcaagcccatcctggaaaagatggacggcaccgaggaactgctcgtgaagctgaacagagaggacctgctgcggaagcagcggaccttcgacaacggcagcatcccccaccagatccacctgggagagctgcacgccattctgcggcggcaggaagatttttacccattcctgaaggacaaccgggaaaagatcgagaagatcctgaccttccgcatcccctactacgtgggccctctggccaggggaaacagcagattcgcctggatgaccagaaagagcgaggaaaccatcaccccctggaacttcgaggaagtggtggacaagggcgcttccgcccagagcttcatcgagcggatgaccaacttcgataagaacctgcccaacgagaaggtgctgcccaagcacagcctgctgtacgagtacttcaccgtgtataacgagctgaccaaagtgaaatacgtgaccgagggaatgagaaagcccgccttcctgagcggcgagcagaaaaaggccatcgtggacctgctgttcaagaccaaccggaaagtgaccgtgaagcagctgaaagaggactacttcaagaaaatcgagtgcttcgactccgtggaaatctccggcgtggaagatcggttcaacgcctccctgggcacataccacgatctgctgaaaattatcaaggacaaggacttcctggacaatgaggaaaacgaggacattctggaagatatcgtgctgaccctgacactgtttgaggacagagagatgatcgaggaacggctgaaaacctatgcccacctgttcgacgacaaagtgatgaagcagctgaagcggcggagatacaccggctggggcaggctgagccggaagctgatcaacggcatccgggacaagcagtccggcaagacaatcctggatttcctgaagtccgacggcttcgccaacagaaacttcatgcagctgatccacgacgacagcctgacctttaaagaggacatccagaaagcccaggtgtccggccagggcgatagcctgcacgagcacattgccaatctggccggcagccccgccattaagaagggcatcctgcagacagtgaaggtggtggacgagctcgtgaaagtgatgggccggcacaagcccgagaacatcgtgatcgaaatggccagagagaaccagaccacccagaagggacagaagaacagccgcgagagaatgaagcggatcgaagagggcatcaaagagctgggcagccagatcctgaaagaacaccccgtggaaaacacccagctgcagaacgagaagctgtacctgtactacctgcagaatgggcgggatatgtacgtggaccaggaactggacatcaaccggctgtccgactacgatgtggaccatatcgtgcctcagagctttctgaaggacgactccatcgacaacaaggtgctgaccagaagcgacaagaaccggggcaagagcgacaacgtgccctccgaagaggtcgtgaagaagatgaagaactactggcggcagctgctgaacgccaagctgattacccagagaaagttcgacaatctgaccaaggccgagagaggcggcctgagcgaactggataaggccggcttcatcaagagacagctggtggaaacccggcagatcacaaagcacgtggcacagatcctggactcccggatgaacactaagtacgacgagaatgacaagctgatccgggaagtgaaagtgatcaccctgaagtccaagctggtgtccgatttccggaaggatttccagttttacaaagtgcgcgagatcaacaactaccaccacgcccacgacgcctacctgaacgccgtcgtgggaaccgccctgatcaaaaagtaccctaagctggaaagcgagttcgtgtacggcgactacaaggtgtacgacgtgcggaagatgatcgccaagagcgagcaggaaatcggcaaggctaccgccaagtacttcttctacagcaacatcatgaactttttcaagaccgagattaccctggccaacggcgagatccggaagcggcctctgatcgagacaaacggcgaaaccggggagatcgtgtgggataagggccgggattttgccaccgtgcggaaagtgctgagcatgccccaagtgaatatcgtgaaaaagaccgaggtgcagacaggcggcttcagcaaagagtctatcctgcccaagaggaacagcgataagctgatcgccagaaagaaggactgggaccctaagaagtacggcggcttcgacagccccaccgtggcctattctgtgctggtggtggccaaagtggaaaagggcaagtccaagaaactgaagagtgtgaaagagctgctggggatcaccatcatggaaagaagcagcttcgagaagaatcccatcgactttctggaagccaagggctacaaagaagtgaaaaaggacctgatcatcaagctgcctaagtactccctgttcgagctggaaaacggccggaagagaatgctggcctctgccggcgaactgcagaagggaaacgaactggccctgccctccaaatatgtgaacttcctgtacctggccagccactatgagaagctgaagggctcccccgaggataatgagcagaaacagctgtttgtggaacagcacaagcactacctggacgagatcatcgagcagatcagcgagttctccaagagagtgatcctggccgacgctaatctggacaaagtgctgtccgcctacaacaagcaccgggataagcccatcagagagcaggccgagaatatcatccacctgtttaccctgaccaatctgggagcccctgccgccttcaagtactttgacaccaccatcgaccggaagaggtacaccagcaccaaagaggtgctggacgccaccctgatccaccagagcatcaccggcctgtacgagacacggatcgacctgtctcagctgggaggcgacaagcgtcctgctgctactaagaaagctggtcaagctaagaaaaagaaa

SEQ ID NO: 180517 - DNA, 4956 bp, Artificial Sequence
  derived and/or modified sequence
atggacaagaagtacagcatcggcctggacatcggcaccaactctgtgggctgggccgtgatcaccgacgagtacaaggtgcccagcaagaaattcaaggtgctgggcaacaccgaccggcacagcatcaagaagaacctgatcggcgccctgctgttcgacagcggagaaacagccgaggccacccggctgaagagaaccgccagaagaagatacaccagacggaagaaccggatctgctatctgcaagagatcttcagcaacgagatggccaaggtggacgacagcttcttccacagactggaagagtccttcctggtggaagaggataagaagcacgagcggcaccccatcttcggcaacatcgtggacgaggtggcctaccacgagaagtaccccaccatctaccacctgagaaagaaactggtggacagcaccgacaaggccgacctgcggctgatctatctggccctggcccacatgatcaagttccggggccacttcctgatcgagggcgacctgaaccccgacaacagcgacgtggacaagctgttcatccagctggtgcagacctacaaccagctgttcgaggaaaaccccatcaacgccagcggcgtggacgccaaggccatcctgtctgccagactgagcaagagcagacggctggaaaatctgatcgcccagctgcccggcgagaagaagaatggcctgttcggcaacctgattgccctgagcctgggcctgacccccaacttcaagagcaacttcgacctggccgaggatgccaaactgcagctgagcaaggacacctacgacgacgacctggacaacctgctggcccagatcggcgaccagtacgccgacctgtttctggccgccaagaacctgtccgacgccatcctgctgagcgacatcctgagagtgaacaccgagatcaccaaggcccccctgagcgcctctatgatcaagagatacgacgagcaccaccaggacctgaccctgctgaaagctctcgtgcggcagcagctgcctgagaagtacaaagagattttcttcgaccagagcaagaacggctacgccggctacatcgatggcggagccagccaggaagagttctacaagttcatcaagcccatcctggaaaagatggacggcaccgaggaactgctcgtgaagctgaacagagaggacctgctgcggaagcagcggaccttcgacaacggcagcatcccccaccagatccacctgggagagctgcacgccattctgcggcggcaggaagatttttacccattcctgaaggacaaccgggaaaagatcgagaagatcctgaccttccgcatcccctactacgtgggccctctggccaggggaaacagcagattcgcctggatgaccagaaagagcgaggaaaccatcaccccctggaacttcgaggaagtggtggacaagggcgccagcgcccagagcttcatcgagcggatgaccaacttcgataagaacctgcccaacgagaaggtgctgcccaagcacagcctgctgtacgagtacttcaccgtgtacaacgagctgaccaaagtgaaatacgtgaccgagggaatgagaaagcccgccttcctgagcggcgagcagaaaaaagccatcgtggacctgctgttcaagaccaaccggaaagtgaccgtgaagcagctgaaagaggactacttcaagaaaatcgagtgcttcgactccgtggaaatctccggcgtggaagatcggttcaacgcctccctgggcacataccacgatctgctgaaaattatcaaggacaaggacttcctggacaatgaggaaaacgaggacattctggaagatatcgtgctgaccctgacactgtttgaggacagagagatgatcgaggaacggctgaaaacctatgcccacctgttcgacgacaaagtgatgaagcagctgaagcggcggagatacaccggctggggcaggctgagccggaagctgatcaacggcatccgggacaagcagtccggcaagacaatcctggatttcctgaagtccgacggcttcgccaacagaaacttcatgcagctgatccacgacgacagcctgacctttaaagaggacatccagaaagcccaggtgtccggccagggcgatagcctgcacgagcacattgccaatctggccggcagccccgccattaagaagggcatcctgcagacagtgaaggtggtggacgagctcgtgaaagtgatgggccggcacaagcccgagaacatcgtgatcgaaatggccagagagaaccagaccacccagaagggacagaagaacagccgcgagagaatgaagcggatcgaagagggcatcaaagagctgggcagccagatcctgaaagaacaccccgtggaaaacacccagctgcagaacgagaagctgtacctgtactacctgcagaatgggcgggatatgtacgtggaccaggaactggacatcaaccggctgtccgactacgatgtggaccatatcgtgcctcagagctttctgaaggacgactccatcgataacaaagtgctgactcggagcgacaagaaccggggcaagagcgacaacgtgccctccgaagaggtcgtgaagaagatgaagaactactggcgccagctgctgaatgccaagctgattacccagaggaagttcgacaatctgaccaaggccgagagaggcggcctgagcgaactggataaggccggcttcatcaagagacagctggtggaaacccggcagatcacaaagcacgtggcacagatcctggactcccggatgaacactaagtacgacgagaacgacaaactgatccgggaagtgaaagtgatcaccctgaagtccaagctggtgtccgatttccggaaggatttccagttttacaaagtgcgcgagatcaacaactaccaccacgcccacgacgcctacctgaacgccgtcgtgggaaccgccctgatcaaaaagtaccctaagctggaaagcgagttcgtgtacggcgactacaaggtgtacgacgtgcggaagatgatcgccaagagcgagcaggaaatcggcaaggctaccgccaagtacttcttctacagcaacatcatgaactttttcaagaccgagattaccctggccaacggcgagatccggaagcggcctctgatcgagacaaacggcgaaacaggcgagatcgtgtgggataagggccgggactttgccaccgtgcggaaagtgctgtctatgccccaagtgaatatcgtgaaaaagaccgaggtgcagacaggcggcttcagcaaagagtctatcctgcccaagaggaacagcgacaagctgatcgccagaaagaaggactgggaccctaagaagtacggcggcttcgacagccccaccgtggcctattctgtgctggtggtggccaaagtggaaaagggcaagtccaagaaactgaagagtgtgaaagagctgctggggatcaccatcatggaaagaagcagcttcgagaagaatcccatcgactttctggaagccaagggctacaaagaagtgaaaaaggacctgatcatcaagctgcctaagtactccctgttcgagctggaaaacggccggaagagaatgctggcctctgccggcgaactgcagaagggaaacgaactggccctgccctccaaatatgtgaacttcctgtacctggccagccactatgagaagctgaagggctcccccgaggataatgagcagaaacagctgtttgtggaacagcacaaacactacctggacgagatcatcgagcagatcagcgagttctccaagagagtgatcctggccgacgctaatctggacaaggtgctgagcgcctacaacaagcacagagacaagcctatcagagagcaggccgagaatatcatccacctgtttaccctgaccaatctgggagcccctgccgccttcaagtactttgacaccaccatcgaccggaagaggtacaccagcaccaaagaggtgctggacgccaccctgatccaccagagcatcaccggcctgtacgagacacggatcgacctgtctcagctgggaggcgacgcctatccctatgacgtgcccgattatgccagcctgggcagcggctcccccaagaaaaaacgcaaggtggaagatcctaagaaaaagcggaaagtggacggcattggtagtgggagcaacggcagcagcggatccgtgagcaagggcgaggagctgttcaccggggtggtgcccatcctggtcgagctggacggcgacgtaaacggccacaagttcagcgtgcgcggcgagggcgagggcgatgccaccaacggcaagctgaccctgaagttcatctgcaccaccggcaagctgcccgtgccctggcccaccctcgtgaccaccctgacctacggcgtgcagtgcttcagccgctaccccgaccacatgaagcagcacgacttcttcaagtccgccatgcccgaaggctacgtccaggagcgcaccatctccttcaaggacgacggcacctacaagacccgcgccgaggtgaagttcgagggcgacaccctggtgaaccgcatcgagctgaagggcatcgacttcaaggaggacggcaacatcctggggcacaagctggagtacaacttcaacagccacaacgtctatatcacggccgacaagcagaagaacggcatcaaggcgaacttcaagatccgccacaacgtcgaggacggcagcgtgcagctcgccgaccactaccagcagaacacccccatcggcgacggccccgtgctgctgcccgacaaccactacctgagcacccagtccaagctgagcaaagaccccaacgagaagcgcgatcacatggtcctgctggagttcgtgaccgccgccgggatcactctcggcatggacgagctgtacaagtag

SEQ ID NO: 180518 - RNA, 4269 nt, Artificial Sequence
  derived and/or modified sequence
auggacuauaaggaccacgacggagacuacaaggaucaugauauugauuacaaagacgaugacgauaagauggccccaaagaagaagcggaaggucgguauccacggagucccagcagccgacaagaaguacagcaucggccuggacaucggcaccaacucugugggcugggccgugaucaccgacgaguacaaggugcccagcaagaaauucaaggugcugggcaacaccgaccggcacagcaucaagaagaaccugaucggagcccugcuguucgacagcggcgaaacagccgaggccacccggcugaagagaaccgccagaagaagauacaccagacggaagaaccggaucugcuaucugcaagagaucuucagcaacgagauggccaagguggacgacagcuucuuccacagacuggaagaguccuuccugguggaagaggauaagaagcacgagcggcaccccaucuucggcaacaucguggacgagguggccuaccacgagaaguaccccaccaucuaccaccugagaaagaaacugguggacagcaccgacaaggccgaccugcggcugaucuaucuggcccuggcccacaugaucaaguuccggggccacuuccugaucgagggcgaccugaaccccgacaacagcgacguggacaagcuguucauccagcuggugcagaccuacaaccagcuguucgaggaaaaccccaucaacgccagcggcguggacgccaaggccauccugucugccagacugagcaagagcagacggcuggaaaaucugaucgcccagcugcccggcgagaagaagaauggccuguucggcaaccugauugcccugagccugggccugacccccaacuucaagagcaacuucgaccuggccgaggaugccaaacugcagcugagcaaggacaccuacgacgacgaccuggacaaccugcuggcccagaucggcgaccaguacgccgaccuguuucuggccgccaagaaccuguccgacgccauccugcugagcgacauccugagagugaacaccgagaucaccaaggccccccugagcgccucuaugaucaagagauacgacgagcaccaccaggaccugacccugcugaaagcucucgugcggcagcagcugccugagaaguacaaagagauuuucuucgaccagagcaagaacggcuacgccggcuacauugacggcggagccagccaggaagaguucuacaaguucaucaagcccauccuggaaaagauggacggcaccgaggaacugcucgugaagcugaacagagaggaccugcugcggaagcagcggaccuucgacaacggcagcaucccccaccagauccaccugggagagcugcacgccauucugcggcggcaggaagauuuuuacccauuccugaaggacaaccgggaaaagaucgagaagauccugaccuuccgcauccccuacuacgugggcccucuggccaggggaaacagcagauucgccuggaugaccagaaagagcgaggaaaccaucacccccuggaacuucgaggaagugguggacaagggcgcuuccgcccagagcuucaucgagcggaugaccaacuucgauaagaaccugcccaacgagaaggugcugcccaagcacagccugcuguacgaguacuucaccguguauaacgagcugaccaaagugaaauacgugaccgagggaaugagaaagcccgccuuccugagcggcgagcagaaaaaggccaucguggaccugcuguucaagaccaaccggaaagugaccgugaagcagcugaaagaggacuacuucaagaaaaucgagugcuucgacuccguggaaaucuccggcguggaagaucgguucaacgccucccugggcacauaccacgaucugcugaaaauuaucaaggacaaggacuuccuggacaaugaggaaaacgaggacauucuggaagauaucgugcugacccugacacuguuugaggacagagagaugaucgaggaacggcugaaaaccuaugcccaccuguucgacgacaaagugaugaagcagcugaagcggcggagauacaccggcuggggcaggcugagccggaagcugaucaacggcauccgggacaagcaguccggcaagacaauccuggauuuccugaaguccgacggcuucgccaacagaaacuucaugcagcugauccacgacgacagccugaccuuuaaagaggacauccagaaagcccagguguccggccagggcgauagccugcacgagcacauugccaaucuggccggcagccccgccauuaagaagggcauccugcagacagugaaggugguggacgagcucgugaaagugaugggccggcacaagcccgagaacaucgugaucgaaauggccagagagaaccagaccacccagaagggacagaagaacagccgcgagagaaugaagcggaucgaagagggcaucaaagagcugggcagccagauccugaaagaacaccccguggaaaacacccagcugcagaacgagaagcuguaccuguacuaccugcagaaugggcgggauauguacguggaccaggaacuggacaucaaccggcuguccgacuacgauguggaccauaucgugccucagagcuuucugaaggacgacuccaucgacaacaaggugcugaccagaagcgacaagaaccggggcaagagcgacaacgugcccuccgaagaggucgugaagaagaugaagaacuacuggcggcagcugcugaacgccaagcugauuacccagagaaaguucgacaaucugaccaaggccgagagaggcggccugagcgaacuggauaaggccggcuucaucaagagacagcugguggaaacccggcagaucacaaagcacguggcacagauccuggacucccggaugaacacuaaguacgacgagaaugacaagcugauccgggaagugaaagugaucacccugaaguccaagcugguguccgauuuccggaaggauuuccaguuuuacaaagugcgcgagaucaacaacuaccaccacgcccacgacgccuaccugaacgccgucgugggaaccgcccugaucaaaaaguacccuaagcuggaaagcgaguucguguacggcgacuacaagguguacgacgugcggaagaugaucgccaagagcgagcaggaaaucggcaaggcuaccgccaaguacuucuucuacagcaacaucaugaacuuuuucaagaccgagauuacccuggccaacggcgagauccggaagcggccucugaucgagacaaacggcgaaaccggggagaucgugugggauaagggccgggauuuugccaccgugcggaaagugcugagcaugccccaagugaauaucgugaaaaagaccgaggugcagacaggcggcuucagcaaagagucuauccugcccaagaggaacagcgauaagcugaucgccagaaagaaggacugggacccuaagaaguacggcggcuucgacagccccaccguggccuauucugugcuggugguggccaaaguggaaaagggcaaguccaagaaacugaagagugugaaagagcugcuggggaucaccaucauggaaagaagcagcuucgagaagaaucccaucgacuuucuggaagccaagggcuacaaagaagugaaaaaggaccugaucaucaagcugccuaaguacucccuguucgagcuggaaaacggccggaagagaaugcuggccucugccggcgaacugcagaagggaaacgaacuggcccugcccuccaaauaugugaacuuccuguaccuggccagccacuaugagaagcugaagggcucccccgaggauaaugagcagaaacagcuguuuguggaacagcacaagcacuaccuggacgagaucaucgagcagaucagcgaguucuccaagagagugauccuggccgacgcuaaucuggacaaagugcuguccgccuacaacaagcaccgggauaagcccaucagagagcaggccgagaauaucauccaccuguuuacccugaccaaucugggagccccugccgccuucaaguacuuugacaccaccaucgaccggaagagguacaccagcaccaaagaggugcuggacgccacccugauccaccagagcaucaccggccuguacgagacacggaucgaccugucucagcugggaggcgacaagcguccugcugcuacuaagaaagcuggucaagcuaagaaaaagaaa

SEQ ID NO: 180519 - RNA, 4956 nt, Artificial Sequence
  derived and/or modified sequence
auggacaagaaguacagcaucggccuggacaucggcaccaacucugugggcugggccgugaucaccgacgaguacaaggugcccagcaagaaauucaaggugcugggcaacaccgaccggcacagcaucaagaagaaccugaucggcgcccugcuguucgacagcggagaaacagccgaggccacccggcugaagagaaccgccagaagaagauacaccagacggaagaaccggaucugcuaucugcaagagaucuucagcaacgagauggccaagguggacgacagcuucuuccacagacuggaagaguccuuccugguggaagaggauaagaagcacgagcggcaccccaucuucggcaacaucguggacgagguggccuaccacgagaaguaccccaccaucuaccaccugagaaagaaacugguggacagcaccgacaaggccgaccugcggcugaucuaucuggcccuggcccacaugaucaaguuccggggccacuuccugaucgagggcgaccugaaccccgacaacagcgacguggacaagcuguucauccagcuggugcagaccuacaaccagcuguucgaggaaaaccccaucaacgccagcggcguggacgccaaggccauccugucugccagacugagcaagagcagacggcuggaaaaucugaucgcccagcugcccggcgagaagaagaauggccuguucggcaaccugauugcccugagccugggccugacccccaacuucaagagcaacuucgaccuggccgaggaugccaaacugcagcugagcaaggacaccuacgacgacgaccuggacaaccugcuggcccagaucggcgaccaguacgccgaccuguuucuggccgccaagaaccuguccgacgccauccugcugagcgacauccugagagugaacaccgagaucaccaaggccccccugagcgccucuaugaucaagagauacgacgagcaccaccaggaccugacccugcugaaagcucucgugcggcagcagcugccugagaaguacaaagagauuuucuucgaccagagcaagaacggcuacgccggcuacaucgauggcggagccagccaggaagaguucuacaaguucaucaagcccauccuggaaaagauggacggcaccgaggaacugcucgugaagcugaacagagaggaccugcugcggaagcagcggaccuucgacaacggcagcaucccccaccagauccaccugggagagcugcacgccauucugcggcggcaggaagauuuuuacccauuccugaaggacaaccgggaaaagaucgagaagauccugaccuuccgcauccccuacuacgugggcccucuggccaggggaaacagcagauucgccuggaugaccagaaagagcgaggaaaccaucacccccuggaacuucgaggaagugguggacaagggcgccagcgcccagagcuucaucgagcggaugaccaacuucgauaagaaccugcccaacgagaaggugcugcccaagcacagccugcuguacgaguacuucaccguguacaacgagcugaccaaagugaaauacgugaccgagggaaugagaaagcccgccuuccugagcggcgagcagaaaaaagccaucguggaccugcuguucaagaccaaccggaaagugaccgugaagcagcugaaagaggacuacuucaagaaaaucgagugcuucgacuccguggaaaucuccggcguggaagaucgguucaacgccucccugggcacauaccacgaucugcugaaaauuaucaaggacaaggacuuccuggacaaugaggaaaacgaggacauucuggaagauaucgugcugacccugacacuguuugaggacagagagaugaucgaggaacggcugaaaaccuaugcccaccuguucgacgacaaagugaugaagcagcugaagcggcggagauacaccggcuggggcaggcugagccggaagcugaucaacggcauccgggacaagcaguccggcaagacaauccuggauuuccugaaguccgacggcuucgccaacagaaacuucaugcagcugauccacgacgacagccugaccuuuaaagaggacauccagaaagcccagguguccggccagggcgauagccugcacgagcacauugccaaucuggccggcagccccgccauuaagaagggcauccugcagacagugaaggugguggacgagcucgugaaagugaugggccggcacaagcccgagaacaucgugaucgaaauggccagagagaaccagaccacccagaagggacagaagaacagccgcgagagaaugaagcggaucgaagagggcaucaaagagcugggcagccagauccugaaagaacaccccguggaaaacacccagcugcagaacgagaagcuguaccuguacuaccugcagaaugggcgggauauguacguggaccaggaacuggacaucaaccggcuguccgacuacgauguggaccauaucgugccucagagcuuucugaaggacgacuccaucgauaacaaagugcugacucggagcgacaagaaccggggcaagagcgacaacgugcccuccgaagaggucgugaagaagaugaagaacuacuggcgccagcugcugaaugccaagcugauuacccagaggaaguucgacaaucugaccaaggccgagagaggcggccugagcgaacuggauaaggccggcuucaucaagagacagcugguggaaacccggcagaucacaaagcacguggcacagauccuggacucccggaugaacacuaaguacgacgagaacgacaaacugauccgggaagugaaagugaucacccugaaguccaagcugguguccgauuuccggaaggauuuccaguuuuacaaagugcgcgagaucaacaacuaccaccacgcccacgacgccuaccugaacgccgucgugggaaccgcccugaucaaaaaguacccuaagcuggaaagcgaguucguguacggcgacuacaagguguacgacgugcggaagaugaucgccaagagcgagcaggaaaucggcaaggcuaccgccaaguacuucuucuacagcaacaucaugaacuuuuucaagaccgagauuacccuggccaacggcgagauccggaagcggccucugaucgagacaaacggcgaaacaggcgagaucgugugggauaagggccgggacuuugccaccgugcggaaagugcugucuaugccccaagugaauaucgugaaaaagaccgaggugcagacaggcggcuucagcaaagagucuauccugcccaagaggaacagcgacaagcugaucgccagaaagaaggacugggacccuaagaaguacggcggcuucgacagccccaccguggccuauucugugcuggugguggccaaaguggaaaagggcaaguccaagaaacugaagagugugaaagagcugcuggggaucaccaucauggaaagaagcagcuucgagaagaaucccaucgacuuucuggaagccaagggcuacaaagaagugaaaaaggaccugaucaucaagcugccuaaguacucccuguucgagcuggaaaacggccggaagagaaugcuggccucugccggcgaacugcagaagggaaacgaacuggcccugcccuccaaauaugugaacuuccuguaccuggccagccacuaugagaagcugaagggcucccccgaggauaaugagcagaaacagcuguuuguggaacagcacaaacacuaccuggacgagaucaucgagcagaucagcgaguucuccaagagagugauccuggccgacgcuaaucuggacaaggugcugagcgccuacaacaagcacagagacaagccuaucagagagcaggccgagaauaucauccaccuguuuacccugaccaaucugggagccccugccgccuucaaguacuuugacaccaccaucgaccggaagagguacaccagcaccaaagaggugcuggacgccacccugauccaccagagcaucaccggccuguacgagacacggaucgaccugucucagcugggaggcgacgccuaucccuaugacgugcccgauuaugccagccugggcagcggcucccccaagaaaaaacgcaagguggaagauccuaagaaaaagcggaaaguggacggcauugguagugggagcaacggcagcagcggauccgugagcaagggcgaggagcuguucaccgggguggugcccauccuggucgagcuggacggcgacguaaacggccacaaguucagcgugcgcggcgagggcgagggcgaugccaccaacggcaagcugacccugaaguucaucugcaccaccggcaagcugcccgugcccuggcccacccucgugaccacccugaccuacggcgugcagugcuucagccgcuaccccgaccacaugaagcagcacgacuucuucaaguccgccaugcccgaaggcuacguccaggagcgcaccaucuccuucaaggacgacggcaccuacaagacccgcgccgaggugaaguucgagggcgacacccuggugaaccgcaucgagcugaagggcaucgacuucaaggaggacggcaacauccuggggcacaagcuggaguacaacuucaacagccacaacgucuauaucacggccgacaagcagaagaacggcaucaaggcgaacuucaagauccgccacaacgucgaggacggcagcgugcagcucgccgaccacuaccagcagaacacccccaucggcgacggccccgugcugcugcccgacaaccacuaccugagcacccaguccaagcugagcaaagaccccaacgagaagcgcgaucacaugguccugcuggaguucgugaccgccgccgggaucacucucggcauggacgagcuguacaaguag

SEQ ID NO: 180520 - protein, 304 aa, Artificial Sequence
  derived and/or modified sequence
MSLTVVSMACVGFFLLQGAWPHEGVHRKPSLLAHPGRLVKSEETVILQCWSDVMFEHFLLHREGMFNDTLRLIGEHHDGVSKANFSISRMKQDLAGTYRCYGSVTHSPYQLSAPSDPLDIVIIGLYEKPSLSAQPGPTVLAGENVTLSCSSRSSYDMYHLSREGEAHERRLPAGTKVNGTFQANFPLGPATHGGTYRCFGSFRDSPYEWSKSSDPLLVSVTGNPSNSWPSPTEPSSETGNPRHLHVLIGTSVVKIPFTILLFFLLHRWCSDKKNAAVMDQEPAGNRTVNSEDSDEQDHQEVSYA

SEQ ID NO: 180521 - protein, 540 aa, Artificial Sequence
  derived and/or modified sequence
MVRTDGHTLSEKRNYQVTNSMFGASRKKFVEGVDSDYHDENMYYSQSSMFPHRSEKDMLASPSTSGQLSQFGASLYGQQSALGLPMRGMSNNTPQLNRSLSQGTQLPSHVTPTTGVPTMSLHTPPSPSRGILPMNPRNMMNHSQVGQGIGIPSRTNSMSSSGLGSPNRSSPSIICMPKQQPSRQPFTVNSMSGFGMNRNQAFGMNNSLSSNIFNGTDGSENVTGLDLSDFPALADRNRREGSGNPTPLINPLAGRAPYVGMVTKPANEQSQDFSIHNEDFPALPGSSYKDPTSSNDDSKSNLNTSGKTTSSTDGPKFPGDKSSTTQNNNQQKKGIQVLPDGRVTNIPQGMVTDQFGMIGLLTFIRAAETDPGMVHLALGSDLTTLGLNLNSPENLYPKFASPWASSPCRPQDIDFHVPSEYLTNIHIRDKLAAIKLGRYGEDLLFYLYYMNGGDVLQLLAAVELFNRDWRYHKEERVWITRAPGMEPTMKTNTYERGTYYFFDCLNWRKVAKEFHLEYDKLEERPHLPSTFNYNPAQQAF

SEQ ID NO: 180522 - protein, 183 aa, Artificial Sequence
  derived and/or modified sequence
MVRTDGHTLSEKRNYQVTNSMFGASRKKFVEGVDSDYHDENMYYSQSSMFPHRSEKDMLASPSTSGQLSQFGASLYGQQSALGLPMRGMSNNTPQLNRSLSQGTQLPSHVTPTTGVPTMSLHTPPSPSRGILPMNPRNMMNHSQVGQGIGIPSRTNSMSSSGLGSPNRSSPSIICMPKQQPSR

SEQ ID NO: 180523 - protein, 321 aa, Artificial Sequence
  derived and/or modified sequence
MVRTDGHTLSEKRNYQVTNSMFGASRKKFVEGVDSDYHDENMYYSQSSMFPHRSEKDMLASPSTSGQLSQFGASLYGQQSALGLPMRGMSNNTPQLNRSLSQGTQLPSHVTPTTGVPTMSLHTPPSPSRGILPMNPRNMMNHSQVGQGIGIPSRTNSMSSSGLGSPNRSSPSIICMPKQQPSRQPFTVNSMSGFGMNRNQAFGMNNSLSSNIFNGTDGSENVTGLDLSDFPALADRNRREGSGNPTPLINPLAGRAPYVGMVTKPANEQSQDFSIHNEDFPALPGSSYKDPTSSNDDSKSNLNTSGKTTSSTDGPKFPGDK

SEQ ID NO: 180524 - DNA, 1623 bp, Artificial Sequence
  derived and/or modified sequence
atggtccggaccgacggccatactctgtccgaaaaaagaaactaccaagtaactaattctatgtttggcgcctcacgtaagaaattcgtagaaggggtggactccgattatcacgatgagaatatgtattacagccaaagcagtatgttcccccacagaagtgaaaaggacatgctggcttctcctagcactagcggtcaactgagccaattcggagcgtctctgtacgggcagcaaagtgccctgggactgcccatgcgtggcatgtctaataacacaccacaactcaacagatctctgagccaaggcacacagcttccatcccacgtgacacctaccaccggagttcctaccatgtccttgcatactccaccatcccccagtcggggtatcctacctatgaaccctagaaacatgatgaaccactcccaggtaggtcagggaataggaatcccatccaggactaacagtatgtcctcatcaggactgggcagccctaataggtcatccccgtctattatttgtatgcctaagcaacagccctctcgccagcccttcaccgttaactccatgtctggctttggcatgaaccgaaatcaggcctttggtatgaacaactcactcagctctaatatcttcaatggaactgatggatctgagaacgtcactggacttgacctcagtgatttcccggccctggcggaccggaatcgccgagagggatctggaaaccctactcctctcattaaccctttagccgggagggccccttacgtgggcatggtgaccaaacccgcaaacgagcaatctcaggacttctctatccataatgaagactttccggcccttcctggctcaagttacaaagaccccacctcaagcaacgatgattctaaatccaacctcaacaccagcggaaagaccacctcatcgaccgatggaccaaaatttccgggagacaagtcatccactactcaaaataacaatcagcaaaaaaagggcattcaggtgttgccagatggccgggtgactaatataccccaaggtatggtgaccgaccagttcggcatgattggactactcaccttcattcgggcagccgagactgaccccggtatggttcacttagccctgggatctgatctgacaacattgggcctcaacctgaattctccggaaaacctctatccaaagtttgcaagtccctgggcctcctcaccctgtcgcccacaggatattgacttccatgtcccatccgaatacctgaccaatatccacatccgcgacaaactcgccgctatcaaactggggaggtatggggaggacctgctcttttacctatactatatgaatggtggtgatgtgctccaactgcttgccgccgtagagctctttaatcgggactggcgttatcacaaggaagagcgggtgtggatcaccagagctcctgggatggagccaacgatgaagaccaatacctacgagcgggggacctattatttcttcgactgcttgaactggcgtaaggtggctaaggaatttcacctggaatacgataaactggaggagagaccccaccttccctccacgtttaattacaatccagcacagcaggctttttag

SEQ ID NO: 180525 - DNA, 1623 bp, Artificial Sequence
  derived and/or modified sequence
atggtgcgcaccgacgggcacaccctcagcgagaagcgaaactatcaggtgacaaacagtatgtttggcgcatcccgaaaaaaattcgtggaaggtgtggacagcgactaccacgacgagaacatgtattacagccaatcatccatgtttccccacagaagcgaaaaggatatgctagccagcccctccacaagtgggcaactctctcaatttggagccagtctctacggacaacagtcggcattggggctgccaatgcgtggcatgtccaacaacacccctcagctcaaccggtcactcagtcagggcacgcagcttccaagtcatgttacccctaccactggggtccctactatgtctctccacaccccaccgtcaccttcaaggggaattctgcccatgaacccgaggaacatgatgaaccattcacaagtgggccaaggaatcgggattcctagcagaacaaactctatgagcagcagcgggctaggaagccctaaccggtcaagcccctcgatcatatgcatgccgaagcagcagcctagtcgccagccatttacagtaaactccatgtctggttttgggatgaacagaaatcaggcgtttggaatgaacaactctttgtcgtctaacatattcaacgggacggacggaagcgaaaatgtcacagggctcgacctgtcagactttcctgctttggcggatagaaaccgtagagaggggtctggcaatccaacccccctgattaaccctctcgcaggtagagctccgtatgttggtatggttaccaaacctgctaacgaacagagtcaggactttagcatacataacgaggattttcctgccctgccgggctcatcttataaagatcctacctcatcaaatgatgactccaagtctaatctaaataccagcggtaaaaccacatccagtaccgacggccctaagttccctggcgacaaatccagcacaactcaaaataataatcagcaaaaaaaggggatacaagtgttgccagacggtagggtcacgaacatcccacagggtatggtgacagaccaattcggcatgatcgggcttctcacatttattagggctgctgagacagatcccggaatggtccacctagcgctcggttctgacctgactacactgggcttgaacctgaattcccctgaaaacctatatccaaagttcgcgagtccttgggcctcctccccctgtcgaccacaggacattgatttccatgttccttctgaatatttgaccaatatacatattagagacaaactagccgccattaagctgggaaggtatggggaggatttgctcttctacctctattacatgaacggtggagacgtgctgcagctgctggctgccgtggagctgttcaatcgcgactggcgctaccacaaggaagaacgagtctggattactcgagcgccaggaatggagccaacgatgaagacaaatacatacgagaggggcacgtactacttctttgactgtctgaactggaggaaggtggccaaagagttccaccttgagtacgataagctcgaagagaggccccacctgccctccaccttcaattacaatcccgctcagcaggctttttag

SEQ ID NO: 180526 - DNA, 966 bp, Artificial Sequence
  derived and/or modified sequence
atggtccgcacggacgggcataccctgtctgagaaaaggaattaccaggtgacaaactctatgtttggcgctagcaggaagaagtttgttgaaggtgttgactcggattaccacgacgaaaacatgtattattctcagagctccatgtttccccaccgatccgagaaggacatgctggcgagcccatccacttcaggacaactctctcagttcggggcatctctctatggtcagcagagtgccctgggtcttcctatgcgtggcatgtcgaataatacaccccagcttaaccggtccttgagccagggcacgcagctaccgtcccacgttacgcctactacaggggtgcctacaatgtccctccatacaccaccctccccatccagaggcatactcccgatgaaccctcgaaatatgatgaaccattctcaagtgggccaaggcattggcatcccaagtagaactaatagcatgtcgtcaagcggcctcggtagccctaaccgcagtagcccgtcaataatttgtatgcctaaacagcagccgagccgtcaacctttcacggtgaatagtatgtctgggtttgggatgaacagaaatcaagcttttggcatgaacaattctctctcctcaaacatttttaatggcactgatggttcagagaatgtcacagggctggacctgtctgatttcccggccttggcagaccggaacagacgagaaggctcaggcaatccgacacccctgatcaatcccctggctgggagagctccatacgtgggaatggtgactaagcccgctaacgagcagtcccaggatttcagtattcataacgaggactttcccgccctgccaggaagctcatacaaagatcctacttcgagcaacgatgattccaagagcaacctgaatacctcgggtaagacgacctcctcaaccgatggccctaagttcccaggagataaatag

SEQ ID NO: 180527 - DNA, 1623 bp, Artificial Sequence
  derived and/or modified sequence
atggtgcgaacagacgggcacaccctgtctgaaaaacgaaattatcaggtcacaaacagcatgttcggcgctagcaggaagaaatttgtagagggagtggattcggactatcacgacgaaaatatgtactacagccagagcagcatgttcccacataggtccgaaaaggacatgctggcatcaccctcaacctccggacagcttagtcagttcggcgcctcattgtacggacagcagtcagccctgggactgcccatgaggggtatgagtaataatacacctcagctgaacaggagcctgagtcagggcacccagctgccctcgcacgtaacacctactacaggagtgcccactatgtccctccacacacccccaagcccctcaaggggaatccttccaatgaatcctcggaacatgatgaatcactctcaagttgggcagggcatcgggattcccagcaggaccaactctatgagtagttccggccttgggagcccgaatagatccagcccctcaattatctgcatgcccaagcagcagccttcgcggcagccctttaccgtgaattctatgtcagggtttggtatgaatagaaatcaagcttttgggatgaataactccctgagcagcaatatattcaacgggacagatggatccgagaacgtcacaggccttgacctgagtgatttcccagctttagccgaccggaacagaagggaaggatccggcaatcccacacccctgattaaccctctggctgggagggccccctatgtgggaatggtgacaaagcctgccaatgagcagtcgcaggacttctccatccacaacgaagacttcccagccttgcctggcagtagctataaagacccaaccagcagtaacgatgactctaaatcaaacctgaatacatccggaaaaacaaccagctctacagatgggccaaaatttcctggggacaagtcttctaccacgcagaacaataatcagcagaaaaaggggatccaggtgctccccgacggacgggtgaccaacatacctcagggtatggtcaccgatcagttcggaatgatcggtctgctgaccttcattagagcagccgaaaccgaccccggtatggtgcaccttgctctgggaagtgacctaaccacattggggctgaacctgaattcacccgaaaatttgtaccccaagttcgccagtccatgggccagtagcccttgccgtccccaggatatagatttccacgttccctccgagtatctcaccaatattcatataagggataaacttgctgctatcaaattaggaagatacggggaagatctgttgttctacctctactacatgaacggaggggacgtcctgcagctgttggccgccgtggaattatttaacagagattggagatatcataaggaagagcgcgtgtggatcactagagcccccggcatggagccaaccatgaagaccaacacctacgagaggggcacatactacttttttgattgcctgaactggaggaaggttgctaaagaatttcaccttgaatacgataagcttgaagagagacctcacctgccctccacttttaactataacccagctcagcaggcattctag

SEQ ID NO: 180528 - DNA, 1623 bp, Artificial Sequence
  derived and/or modified sequence
atggtgaggacagatggccacaccctgtctgagaagaggaactaccaggtgaccaacagcatgtttggagccagcaggaagaagtttgtggagggcgtggacagcgactaccatgatgagaacatgtactacagccagagctccatgttcccccacaggtctgagaaggacatgctggccagccccagcaccagcggccagctgagccagtttggagccagcctgtatggccagcagagcgccctgggcctgcccatgaggggcatgagcaacaacaccccccagctgaacagaagcctgagccagggcacccagctgcccagccacgtgacccccaccaccggggtgcccaccatgagcctgcacaccccacccagccccagccggggcatcctgcccatgaaccccaggaacatgatgaaccacagccaggtgggccagggcatcggcatccccagcaggaccaacagcatgagcagcagcggcctgggcagccccaacagaagcagccccagcatcatctgcatgcccaagcagcagcccagccggcagcccttcaccgtgaacagcatgagcggcttcggcatgaacagaaaccaggccttcggcatgaacaacagcctgagcagcaacatcttcaacggcacagatggctctgaaaatgtgacaggcctggacctgagtgacttccctgccctggccgacaggaacagaagagagggcagcggcaaccccacccccctcatcaaccccctggccggccgggccccctacgtgggcatggtgaccaagccagccaatgagcagagccaggacttcagcatccacaatgaagacttccctgccctgcccggcagcagctacaaggaccccaccagcagcaatgatgacagcaagagcaacctgaacaccagcggcaagaccaccagcagcacagatggccccaagtttcctggggacaagagcagcaccacccagaacaacaaccagcagaagaagggcatccaggtgctgcctgatggccgggtgaccaacatcccccagggcatggtgacagaccagtttggcatgattggcctgctgaccttcatccgggctgctgagacagatcctggcatggtgcacctggccctgggcagtgacctgaccaccctgggcctgaacctgaacagcccagaaaatctctaccccaagtttgccagcccctgggccagcagcccctgccggccccaggacatcgacttccacgtgcccagcgagtacctgaccaacatccacatccgggacaagctggccgccatcaagctgggccgctatggagaggacctgctcttctacctgtactacatgaatggaggagatgtgctgcagctgctggccgctgtggagctgttcaacagagactggagataccacaaggaggagcgggtgtggatcacccgggcccctggcatggagcccaccatgaagaccaacacctatgaaagaggcacctactacttctttgactgcctgaactggaggaaggtggccaaggagttccacctggagtatgacaagctggaggagcggccccacctgcccagcaccttcaactacaacccagcccagcaggccttctag

SEQ ID NO: 180529 - DNA, 966 bp, Artificial Sequence
  derived and/or modified sequence
atggtgaggacagatggccacaccctgtctgagaagaggaactaccaggtgaccaacagcatgtttggagccagcaggaagaagtttgtggagggcgtggacagcgactaccatgatgagaacatgtactacagccagagctccatgttcccccacaggtctgagaaggacatgctggccagccccagcaccagcggccagctgagccagtttggagccagcctgtatggccagcagagcgccctgggcctgcccatgaggggcatgagcaacaacaccccccagctgaacagaagcctgagccagggcacccagctgcccagccacgtgacccccaccaccggggtgcccaccatgagcctgcacaccccacccagccccagccggggcatcctgcccatgaaccccaggaacatgatgaaccacagccaggtgggccagggcatcggcatccccagcaggaccaacagcatgagcagcagcggcctgggcagccccaacagaagcagccccagcatcatctgcatgcccaagcagcagcccagccggcagcccttcaccgtgaacagcatgagcggcttcggcatgaacagaaaccaggccttcggcatgaacaacagcctgagcagcaacatcttcaacggcacagatggctctgaaaatgtgacaggcctggacctgagtgacttccctgccctggccgacaggaacagaagagagggcagcggcaaccccacccccctcatcaaccccctggccggccgggccccctacgtgggcatggtgaccaagccagccaatgagcagagccaggacttcagcatccacaatgaagacttccctgccctgcccggcagcagctacaaggaccccaccagcagcaatgatgacagcaagagcaacctgaacaccagcggcaagaccaccagcagcacagatggccccaagtttcctggggacaagtag

SEQ ID NO: 180530 - DNA, 1623 bp, Artificial Sequence
  derived and/or modified sequence
atggtgcggaccgacggccacaccctgagcgagaagcggaactaccaggtcaccaactctatgttcggcgcgagcagaaaaaaattcgtagaaggagtcgattctgattatcatgacgagaatatgtattactcccagtccagtatgttcccacatcgcagtgaaaaagatatgctcgccagcccttccaccagtggacagctttcccagttcggcgcatcattatatgggcagcagtctgccctcggactgcccatgcgcggcatgtctaataatacaccccaactaaacagatccctgagtcaagggactcagctgcccagtcacgtgacacccacaaccggggtcccaacaatgtctctgcataccccacccagtccaagtcgcggaatcctacccatgaatcctcgcaatatgatgaaccatagtcaagtgggacaaggaattggcatcccatccagaacgaatagcatgtcttcgagcggcctcggctctcccaatagaagtagcccgagcatcatctgtatgcccaagcagcaaccgtcccgccagccttttaccgtcaattcaatgtcaggcttcgggatgaatcggaatcaagcgttcggcatgaataatagcttatcaagcaatattttcaatggcaccgatggctctgagaacgtgacagggttggacctcagtgatttcccagccttggcagataggaaccgcagggagggcagtggtaatcccacccctctcataaaccccctggctggtagagctccttacgtggggatggtaaccaaacctgccaacgagcagagtcaggattttagtattcataacgaagacttcccagccctccctgggagcagttataaggatcctacttcctccaacgacgacagcaagtccaatctcaacacgtccgggaagactacatcctcaactgatgggccgaaatttcccggagacaaatcaagtaccacgcagaacaacaaccaacaaaagaagggcatccaggttctccctgacgggagagtcacgaacattcctcagggtatggtcacagaccagttcgggatgatcggacttctgacgttcatacgagctgccgaaaccgacccgggcatggtgcacctggcgctcggctccgacctgaccactctaggcctgaatttgaactccccggaaaacctctatcctaagttcgcaagcccttgggcttcctcaccatgtcgcccccaggatatcgactttcatgttccttccgagtacctcacgaacatccatatcagagataaactcgctgcaattaaactcggtcgctacggtgaagatctattattctacctgtactacatgaatggaggcgacgtgctacagctcctggctgcggtggaactctttaaccgagattggaggtaccacaaagaggaacgagtgtggatcaccagggctccaggcatggaacctaccatgaagaccaacacctatgagaggggaacttattacttcttcgattgtctcaattggcggaaggtggcaaaagaattccacttggaatatgataagctcgaggagagaccacacctccctagtacattcaattataacccagcgcaacaagcattctag

SEQ ID NO: 180531 - DNA, 1623 bp, Artificial Sequence
  derived and/or modified sequence
atggtgcggaccgacggccacaccctgagcgagaagcggaactaccaggtgaccaactccatgttcggggcatcccggaaaaagtttgtggagggtgtggatagtgattatcatgatgagaacatgtattactcccaaagctcaatgtttccacatcgaagcgagaaggacatgctggcctcaccatctacctccggacaacttagtcagtttggcgcgtcactttatggccagcagagcgcgcttggccttccgatgcggggtatgagcaataacaccccacagctaaacagaagcctgtctcaaggtacacagttgccttcacatgttactccaacaactggagtgcctactatgtcgctccacactcctccctcaccctctagaggaatcctgccgatgaatcccaggaatatgatgaatcattctcaggtgggccaaggcatcggaatcccttcccgaacaaactcgatgtcctcctctggactgggttcccccaatcgttccagccccagcatcatctgcatgcccaagcagcagccaagtcgacaacccttcacggtcaattctatgtctggcttcggcatgaaccgcaatcaggccttcgggatgaacaattctttaagctccaatatattcaatgggactgatggctccgagaacgtgacaggtctggacctgtccgacttcccggcactggccgacaggaaccgccgggaaggaagcggcaatcctacacctctgataaacccactggccggcagagccccatacgtgggaatggtaaccaaacccgccaatgaacaatctcaggacttctcaatccacaatgaagactttccagcattgccgggatcatcgtataaagatccaacctcatcaaacgacgacagcaagagcaatctaaacactagcgggaagaccacctccagcacagacggacccaaattccccggcgataagtcttcaacaactcaaaacaacaaccaacagaagaaaggcattcaggtcttgccagacggacgggtgactaatatccctcagggcatggtgaccgaccagtttggcatgatagggctccttacattcatacgagcagctgagacagatccgggaatggttcacctcgccctgggctctgatctgacaacactcgggcttaacctcaattcccccgaaaacctgtaccctaagtttgccagcccctgggcctcctcaccttgtcgacctcaggatatcgacttccatgtgccctcggaatacctgactaatatccacatcagggacaaacttgctgccatcaaactcgggagatatggcgaggacctgctgttttacctgtattacatgaacggcggggatgtacttcagctactcgctgccgtcgaactcttcaatagagactggaggtaccacaaagaagagcgagtgtggattactcgggccccaggaatggagcctacaatgaagactaatacttatgagcgcggtacctattatttcttcgactgcctgaattggaggaaggtagcaaaggagttccatttggaatacgataagctcgaagaacggccccatttaccgagtaccttcaattataatccagctcagcaagccttctag

SEQ ID NO: 180532 - DNA, 966 bp, Artificial Sequence
  derived and/or modified sequence
atggtgcggaccgacggccacaccctgagcgagaagcggaactaccaagtaaccaactccatgtttggcgcctctcgtaaaaagtttgtggagggggtggacagcgattaccatgacgagaatatgtattacagccaatcctcaatgtttccgcatcgcagtgagaaagacatgctggcgtccccatctacgtccggacagctgagtcaattcggcgccagcctgtacggtcagcagagcgcattgggtctgccgatgcgaggcatgagtaataacacaccacaactcaatcggtccctgtctcagggaacacagctgccttcccatgttacgccaaccacgggagtgccaaccatgtccctccatactccgcccagtccgtctcgagggatcctgcccatgaaccctaggaacatgatgaatcactcgcaggttggccagggcatagggatcccgtcacggactaactccatgagcagttcgggactgggtagcccaaaccggagtagtccatctatcatctgtatgcctaagcaacaacctagcaggcagccattcactgtgaattcaatgagcggtttcggcatgaatcgaaatcaggcattcggcatgaacaacagtctgtcttccaatatcttcaacggcaccgacgggagcgagaatgtcacaggtttggatctctccgactttccggcattggccgatagaaaccgacgggaggggtcggggaacccaacccccctgattaaccctctggcaggccgcgctccttatgtgggcatggttacgaaaccggctaatgaacaatctcaggacttctcgatacacaatgaggacttccctgcgttgccaggttcctcctacaaagatcctacttcttcaaacgacgatagcaagtccaatctcaatactagtggaaaaacaacctcttcgacagacggtcccaagtttccaggtgataaatag

SEQ ID NO: 180533 - DNA, 1623 bp, Artificial Sequence
  derived and/or modified sequence
atggtgcggaccgacggccacaccctgagcgagaagcggaactaccaggtgaccaattctatgtttggggcctcaaggaaaaaattcgtggagggtgtagactctgactatcacgatgagaacatgtactactcccaaagcagcatgtttccacaccggtctgaaaaagacatgctcgccagtccgtcaacctccggacaactctctcagttcggggcttccctctacggacaacaatccgcactcggacttcctatgcgaggcatgtctaacaacactccccagctgaatcgcagcctgtctcagggcactcagctaccatcacatgtaacccccactacaggggtgccaactatgagtttgcatacccctccttcaccaagccgtggcattctgcccatgaaccctcggaatatgatgaatcactcacaggtgggtcagggcatcgggatcccttcacggacgaacagtatgtctagctccggactgggctcacccaacagatcctctccttccattatttgtatgcccaaacaacagcccagccggcagccctttacagtaaacagtatgtctggctttgggatgaaccgcaaccaggccttcggtatgaacaattccttgtccagcaatatcttcaacggaactgacggctctgagaatgtcaccggactggacttgagcgattttccagccctggcagaccgcaaccgcagggaaggttccggcaatccaactccactcatcaatcccttggcgggacgggccccctacgtcggaatggttacgaaaccagctaatgagcagtctcaggacttctccatccacaacgaggacttcccagctctccccgggagtagctataaggatcccactagttctaacgacgattcgaaatctaatcttaatactagtggtaagaccactagctcaacagacggaccaaaatttcccggggataagtccagcaccacccagaacaacaaccagcagaagaaaggcatccaggtcttgcccgacgggagagtgactaacatcccgcagggtatggttaccgaccagttcggaatgatcggactgcttactttcatcagggccgccgaaacggatccaggcatggtgcatttggctcttggcagtgacctgaccacactcggtctgaatctcaattctcccgagaacctttaccctaaattcgccagtccttgggcatccagtccttgcaggccccaggacattgactttcatgtgccgagtgaatatctgaccaacatccatatccgcgacaagttggctgccattaagcttggtagatacggggaggacttgttgttctatctctattacatgaacggaggtgacgttttacagctgttggctgcggtcgagctcttcaaccgggattggcgataccacaaagaggaacgggtgtggatcactagagcaccaggtatggaacctaccatgaaaacgaacacttacgaacgcgggacatactattttttcgattgcctaaattggagaaaggtggccaaagaattccacttggagtatgataaattggaagaaagaccacaccttcctagcacatttaattacaacccagcacagcaggccttttag

SEQ ID NO: 180534 - DNA, 1623 bp, Artificial Sequence
  derived and/or modified sequence
atggtgcggacagatggacacaccctctccgaaaaaagaaactaccaagtcactaacagcatgtttggcgctagccgcaagaaattcgttgaaggagttgatagtgattatcacgatgaaaatatgtattacagccagtcgtctatgttcccacatcgaagcgagaaggacatgctcgccagcccttctacctccggacagctgagccagtttggagcttctctgtacgggcagcagtccgcactgggcctgccgatgagaggaatgtccaacaatactccccagttgaatcggtctttgtctcaggggacccagctgccctctcacgtgacacctaccactggcgtccctaccatgtctcttcatacaccaccgtcccccagccgcggtatacttccgatgaatccacgaaatatgatgaaccacagccaagtgggccagggtattgggatcccttcgagaactaattcaatgagcagctccgggttggggagcccaaaccgctctagcccctcaatcatttgcatgcctaagcagcaaccatcccgtcagcctttcacggtcaacagcatgtctggatttggtatgaatcgcaaccaggcttttggaatgaacaacagcttgtcgagtaatatctttaacggaacagatggaagcgaaaatgtgaccggactggacctcagtgactttccggcactggccgatcgcaaccgtagagaggggagtgggaacccaactccattgattaacccccttgccggaagagctccctacgtaggcatggtaacaaagcctgccaatgaacaaagtcaggacttcagcatccataacgaggactttccggcacttcctgggagtagctacaaagacccaacaagtagcaacgatgattccaagtctaatctaaatacatcaggtaaaactacatcctcaactgatggaccaaagttccctggtgataaatcctctactacccagaataacaaccagcaaaagaaggggatccaggttcttccagacggaagagttactaacatccctcaggggatggtgacagaccagttcgggatgatcggtctgctcacctttatccgagccgcagagacagaccctgggatggtacatctggccctcgggtctgatctcacaacgctcggcctcaacttgaacagccctgagaacttgtatcccaaattcgcctctccttgggcaagtagcccatgcagaccccaagatatcgatttccacgtcccctcagagtatttgaccaatattcatattagggataaactggccgctatcaagttaggtcggtacggtgaggaccttctcttctacctgtattacatgaacggcggagacgtgctgcagttgctcgccgcagtagaactgttcaatagggattggcgctatcacaaggaggagagagtgtggattaccagggctcctggcatggagccaactatgaagacaaacacatacgagagggggacttactatttttttgactgcttgaactggcgtaaagtggcgaaggaattccacttagaatacgacaaactggaagagagaccacacttgcctagcacatttaattacaaccctgcacaacaagcattttag

SEQ ID NO: 180535 - DNA, 1623 bp, Artificial Sequence
  derived and/or modified sequence
atggtacggactgatggccataccctgtcggagaagaggaattaccaggtgacaaacagcatgtttggggcatctcgcaaaaaatttgttgagggcgtagattcggattatcacgacgaaaacatgtactattcccaaagtagcatgtttccccatagaagcgagaaggatatgctggcttcaccaagtacctccgggcagcttagccagttcggagcatctctttacggacaacagtccgcgcttggtctgcccatgagaggaatgagtaataatacaccccagcttaaccgatctctgagccaaggaactcaactcccaagtcatgttaccccaaccaccggcgtgcctaccatgtccttgcacacaccaccctcgccttcccggggtattttacccatgaaccctcggaacatgatgaaccacagccaggtcggccagggaataggaattccatctcgtactaattccatgagcagctccgggctgggatcgcccaaccggtcctctccatcaattatctgtatgccgaaacagcagcccagccggcagcctttcacagtcaactctatgtcaggctttggaatgaacagaaatcaagcgttcgggatgaacaacagcctgtcaagcaatatcttcaatggcaccgacggaagcgaaaatgtgacaggactggacctcagcgacttccctgcattggcagatagaaacagacgggagggctccggaaacccaaccccgcttataaaccccctggccggacgagccccttacgtaggtatggtcaccaaacctgcgaacgagcagagtcaggatttcagtatacataatgaggacttcccagctcttccgggttcatcctacaaggatccgacaagcagcaacgatgattctaagtctaatctgaacacctccggtaagactacgtcaagtacagacggtccaaagttccctggcgacaagagctcaacaactcagaacaataaccaacagaagaaagggatccaggtcctgccagatgggagagtgacaaacattccacagggcatggtgactgaccagtttggaatgatcgggctgctgacatttataagagccgctgagactgatccaggtatggttcatctagcattagggtcggaccttacaacgcttggactcaatctcaactcccccgagaacctgtatccaaagttcgccagcccctgggctagtagcccatgccgcccacaggacattgacttccatgtgccatcagagtatcttactaatatacatatacgcgataaacttgcagcaataaaactcggtcggtatggcgaagacctgctgttctatctttactacatgaatggaggcgacgtgctacagctgctcgccgcagttgaactcttcaatcgcgactggcgctaccacaaggaggagagagtgtggattacccgggcaccgggtatggaaccaacaatgaaaactaatacctacgaaagaggtacatattatttttttgattgcctgaattggcgcaaagtggccaaggagtttcatctcgaatacgataaactggaagagcgaccccatctgccatcaacattcaactataaccccgctcagcaggccttttag

SEQ ID NO: 180536 - DNA, 966 bp, Artificial Sequence
  derived and/or modified sequence
atggtacgtacagacggccataccctgtctgagaaaagaaactatcaggtgactaacagcatgtttggggcttctcgcaagaagttcgtggaaggcgttgactccgactaccacgacgagaacatgtactactctcagtcaagcatgtttccacacagatctgagaaagacatgctggcatcaccgagcaccagcggacagttatctcaattcggagccagcctgtacgggcagcagtcagcgctcggcttaccaatgcgaggcatgagcaataacacaccccagctgaatcgcagcctcagtcaggggactcagctaccgagtcatgtgactccaactaccggcgtgcccaccatgtcgctacacacgccaccctcaccctcgagaggaatattgcctatgaatcctcgcaatatgatgaaccatagtcaagttggacaagggatcggcatcccgtccagaactaattccatgagctcctctggcctcgggtcacccaaccgttctagcccatccataatctgtatgccaaagcagcagccctctaggcagcccttcaccgtcaacagtatgtctggtttcggcatgaatcggaaccaagcttttggaatgaataattccctgtcttctaacattttcaacggaacggacggatccgaaaatgtgactggcctcgacctgtctgactttcccgcattggcagacaggaacagaagagaagggtccggcaatcccaccccccttattaaccccctcgcgggacgagcaccttatgtgggcatggttaccaagcccgctaatgagcagagccaggatttcagcattcacaatgaagatttccctgccctccctgggtcctcatataaggatcccacctcctcgaacgatgacagcaagtcaaaccttaacacctccggcaagacaacttctagcacagatgggccaaagttccccggtgacaagtag

SEQ ID NO: 180537 - DNA, 1623 bp, Artificial Sequence
  derived and/or modified sequence
atggtgaggacagatggccacactctcagtgaaaaacgcaattaccaggtgactaattcaatgtttggcgcaagcaggaaaaagtttgtggaaggggtggatagtgactaccacgatgaaaatatgtactactcacagtcctctatgtttcctcacaggagcgaaaaagacatgctcgctagtccctcaacatctggccagctgagccagtttggtgccagcctatacggacagcagagcgcgctgggcctgcctatgagggggatgtccaacaatacaccccaactgaatcggagcttgagtcagggaacacaactgccttctcacgtaacccccacaactggggtgccaactatgagtttgcacacacctccctccccctcacgaggaattcttcctatgaatcccaggaacatgatgaatcattctcaagtaggacagggcattggcataccctcccgcaccaatagcatgtcatcaagcggcctaggcagtccaaacaggtcgtctccttctatcatttgtatgcctaagcagcagccctctaggcaaccattcacagtgaacagcatgtctggattcgggatgaaccggaatcaagctttcggcatgaataactcgttgtcaagtaatatttttaacggcacagatggatctgagaacgtaaccggactcgacctgagcgactttcctgcactcgcagaccgcaatcgtagggagggttcgggcaaccccacacctctgattaatcctttggccggaagagctccatacgtgggcatggtgacaaagccggctaacgaacagtctcaggacttcagcatccacaacgaggacttccccgcactgccagggagtagctataaagatcccactagctctaatgacgattctaaatccaacctcaacacttcaggcaaaaccacgtcctccacggatggtcccaagtttcctggcgacaagtcatctaccacgcagaacaataatcaacagaaaaaaggcattcaagtgctgcccgacgggcgagtcactaacattcctcaggggatggtcacagatcagtttgggatgatagggcttctcaccttcatacgcgcagccgagaccgatcccggaatggtgcaccttgcgttgggcagtgatctcaccaccctcgggctgaatttgaatagtccggagaacctgtatcccaagttcgcgagcccctgggcctcctctccatgtcggcctcaggatattgactttcatgtcccgtccgagtacttaacaaacatccatattcgcgacaagctagctgcaataaagcttggcagatacggagaagacctgctgttctatctctattacatgaatggcggagacgtcctccaactcctggcggctgttgagctgtttaatcgggattggaggtatcacaaggaagagagagtttggataactcgagcacccggaatggagccaactatgaagacgaacacctatgagcgcggaacttactatttcttcgattgcttaaactggcggaaagttgccaaagagtttcacctggagtacgataaattggaggagcgcccacacttaccgtccacgttcaactataaccctgctcagcaggctttttag

SEQ ID NO: 180538 - DNA, 3280 bp, Artificial Sequence
  derived and/or modified sequence
aacacaaacacaaacacgaacacgaacacgctcagcgtccccggggagggcggactgaagccacctcaccattcatcgcccctggaccccgcagtccccctcggactcagggccagagccttctgcgaagcaacctagccccagggaaacggtagcggccgcagaagccccgctctctgtaacggccgcggaggagcagcaagcctccctgtgagtcggtgggagacaagacggagcggcggtaagggcggtagggaagtgaagcgcctctctccaccttgttagaagcgcgctgaaagcggcctgcctacccaccccatcgctgccgttttgcagtcgtcgctcccaccttccgctgccgcctggagggaagccggagcgacgggggtcacggcggcggtcagagggtaaaggtcttgctcccagcagcctccgcggtggatacgtcgccatcttggatccgcgggacaagaaaattcatgcgagggagacgtggtgggcggtccttcctgtgacacgacccttgagtgacagttctatttgattgcctccggtactgtgaggaaaggacacgactctatggtgaggactgatggacatacattatctgagaaaagaaactaccaggtgacaaacagcatgtttggtgcttcaagaaagaagtttgtagagggggtcgacagtgactaccatgacgaaaacatgtactacagccagtcttctatgtttccacatcggtcagaaaaagatatgctggcatcaccatctacatcaggtcagctgtctcagtttggggcaagtttatacgggcaacaaagtgcactaggccttccaatgagggggatgagcaacaatacccctcagttaaatcgcagcttatcacaaggcactcagttaccgagccacgtcacgccaacaacaggggtaccaacaatgtcacttcacacgcctccatctccaagcaggggtattttgcctatgaatcctaggaatatgatgaaccactcccaggttggtcagggcattggaattcctagcaggacaaatagcatgagcagttcagggttaggtagccccaacagaagctcgccaagcataatatgtatgccaaagcagcagccttctcgacagccttttactgtgaacagtatgtctggatttggaatgaacaggaatcaggcatttggaatgaataactccttatcaagtaacatttttaatggaacagacggaagtgaaaatgtgacaggattggacctttcagatttcccagcattagcagaccgaaacaggagggaaggaagtggtaacccaactccattaataaaccccttggctggaagagctccttatgttggaatggtaacaaaaccagcaaatgaacaatcccaggacttctcaatacacaatgaagattttccagcattaccaggctccagctataaagatccaacatcaagtaatgatgacagtaaatctaatttgaatacatctggcaagacaacttcaagtacagatggacccaaattccctggagataaaagttcaacaacacaaaataataaccagcagaaaaaagggatccaggtgttacctgatggtcgggttactaacattcctcaagggatggtgacggaccaatttggaatgattggcctgttaacatttatcagggcagcagagacagacccaggaatggtacatcttgcattaggaagtgacttaacaacattaggcctcaatctgaactctcctgaaaatctctaccccaaatttgcgtcaccctgggcatcttcaccttgtcgacctcaagacatagacttccatgttccatctgagtacttaacgaacattcacattagggataagctggctgcaataaaacttggccgatatggtgaagaccttctcttctatctctattacatgaatggaggagacgtattacaacttttagctgcagtggagctttttaaccgtgattggagataccacaaagaagaacgagtatggattaccagggcaccaggcatggagccaacaatgaaaaccaatacctatgagaggggaacatattacttctttgactgtcttaactggaggaaagtagctaaggagttccatctggaatatgacaaattagaagaacggcctcacctgccatccaccttcaactacaaccctgctcagcaagccttctaaaaaaaaaaaaaaaaaaaaaaaaagacttcccttttcttggggtatggctgtctcagcacaatactcaacataactgcagaactgatgtggctcaggcaccctggttttaattccttgaggatctggcaattggcttacgcaaaaggtcaccatttgaggtcctgccttactaattatgtgctgcccaacaactaaatttgtaatttgtttttctctagtttgagcagggtctgaattttttcatttatttccttttttgccagcagacagacttgagtctgtaaagacaagcaaatacactgacagaagtttaccatagtttctaaaatgtaaaaaagaaaacccccaaaagactcaagaaaattagaccacaaattttgcattgttcattgtagcactattggtaataaaataacaaatgtttgtgcatttttatgtgaagatccttctcgtatttcatttggaaagatgagcaagaggtctgcttccttcattttacttccccttctgtttttgaaaggcagtttcgccaagcttaatgcaagaatatctgactgtttagaagaaagatattgccacaatctctggatggttttccagggttgtgttattactgagcttcatctttccagaatgagcaaaacactgtccagtctttgttacgattttgtaataaatgtgtacattttttttaaatttttggacatcacatgaataaaggtatgtatgtacgaatgtgtatatattatatatatgacatctattttggaaaatgtttgccctgctgtacctcatttttaggaggtgtgcatggatgcaatatatgaaaatgggacattctggaactgctggtcaggggactttgtcgccctgtgcactaaaagggccagattttcagcagccaaggacatccatacccaagtgaatgtgatgggacttaaaagaagtgaactgagacaattcactctggctgtttgaacagcagcgtttcataggaagagaaaaaaagatcaatcttgtattttctgaccacataaaggcttcttctctttgtaataaagtagaaaagctctcctca

SEQ ID NO: 180539 - DNA, 3152 bp, Artificial Sequence
  derived and/or modified sequence
agcgtccccggggagggcggactgaagccacctcaccattcatcgcccctggaccccgcagtccccctcggactcagggccagagccttctgcgaagcaacctagccccagggaaacggtagcggccgcagaagccccgctctctgtaacggccgcggaggagcagcaagcctccctgtgagtcggtgggagacaagacggagcggcgtcgtcgctcccaccttccgctgccgcctggagggaagccggagcgacgggggtcacggcggcggtcagagggtaaaggtcttgctcccagcagcctccgcggtggatacgtcgccatcttggatccgcgggacaagaaaattcatgcgagggagacgtggtgggcggtccttcctgtgacacgacccttgagtgacagttctatttgattgcctccggtactgtgaggaaaggacacgactctatggtgaggactgatggacatacattatctgagaaaagaaactaccaggtgacaaacagcatgtttggtgcttcaagaaagaagtttgtagagggggtcgacagtgactaccatgacgaaaacatgtactacagccagtcttctatgtttccacatcggtcagaaaaagatatgctggcatcaccatctacatcaggtcagctgtctcagtttggggcaagtttatacgggcaacaaagtgcactaggccttccaatgagggggatgagcaacaatacccctcagttaaatcgcagcttatcacaaggcactcagttaccgagccacgtcacgccaacaacaggggtaccaacaatgtcacttcacacgcctccatctccaagcaggggtattttgcctatgaatcctaggaatatgatgaaccactcccaggttggtcagggcattggaattcctagcaggacaaatagcatgagcagttcagggttaggtagccccaacagaagctcgccaagcataatatgtatgccaaagcagcagccttctcgacagccttttactgtgaacagtatgtctggatttggaatgaacaggaatcaggcatttggaatgaataactccttatcaagtaacatttttaatggaacagacggaagtgaaaatgtgacaggattggacctttcagatttcccagcattagcagaccgaaacaggagggaaggaagtggtaacccaactccattaataaaccccttggctggaagagctccttatgttggaatggtaacaaaaccagcaaatgaacaatcccaggacttctcaatacacaatgaagattttccagcattaccaggctccagctataaagatccaacatcaagtaatgatgacagtaaatctaatttgaatacatctggcaagacaacttcaagtacagatggacccaaattccctggagataaaagttcaacaacacaaaataataaccagcagaaaaaagggatccaggtgttacctgatggtcgggttactaacattcctcaagggatggtgacggaccaatttggaatgattggcctgttaacatttatcagggcagcagagacagacccaggaatggtacatcttgcattaggaagtgacttaacaacattaggcctcaatctgaactctcctgaaaatctctaccccaaatttgcgtcaccctgggcatcttcaccttgtcgacctcaagacatagacttccatgttccatctgagtacttaacgaacattcacattagggataagctggctgcaataaaacttggccgatatggtgaagaccttctcttctatctctattacatgaatggaggagacgtattacaacttttagctgcagtggagctttttaaccgtgattggagataccacaaagaagaacgagtatggattaccagggcaccaggcatggagccaacaatgaaaaccaatacctatgagaggggaacatattacttctttgactgtcttaactggaggaaagtagctaaggagttccatctggaatatgacaaattagaagaacggcctcacctgccatccaccttcaactacaaccctgctcagcaagccttctaaaaaaaaaaaaaaaaaaaaaaaaagacttcccttttcttggggtatggctgtctcagcacaatactcaacataactgcagaactgatgtggctcaggcaccctggttttaattccttgaggatctggcaattggcttacgcaaaaggtcaccatttgaggtcctgccttactaattatgtgctgcccaacaactaaatttgtaatttgtttttctctagtttgagcagggtctgaattttttcatttatttccttttttgccagcagacagacttgagtctgtaaagacaagcaaatacactgacagaagtttaccatagtttctaaaatgtaaaaaagaaaacccccaaaagactcaagaaaattagaccacaaattttgcattgttcattgtagcactattggtaataaaataacaaatgtttgtgcatttttatgtgaagatccttctcgtatttcatttggaaagatgagcaagaggtctgcttccttcattttacttccccttctgtttttgaaaggcagtttcgccaagcttaatgcaagaatatctgactgtttagaagaaagatattgccacaatctctggatggttttccagggttgtgttattactgagcttcatctttccagaatgagcaaaacactgtccagtctttgttacgattttgtaataaatgtgtacattttttttaaatttttggacatcacatgaataaaggtatgtatgtacgaatgtgtatatattatatatatgacatctattttggaaaatgtttgccctgctgtacctcatttttaggaggtgtgcatggatgcaatatatgaaaatgggacattctggaactgctggtcaggggactttgtcgccctgtgcactaaaagggccagattttcagcagccaaggacatccatacccaagtgaatgtgatgggacttaaaagaagtgaactgagacaattcactctggctgtttgaacagcagcgtttcataggaagagaaaaaaagatcaatcttgtattttctgaccacataaaggcttcttctctttgtaataaagtagaaaagctctcctca

SEQ ID NO: 180540 - DNA, 2288 bp, Artificial Sequence
  derived and/or modified sequence
gctgtactcgggccgctgcagcagcagcagctccagatcctaggcccggtcccatccgcgagtggtggggcttccccagactccactcccctaggctcccgccagcgcggaggagccgctgccgccgcgctgcttcctgggggagaagagaaggcggcagcggccgtggccgtggccgacgagctcgagcccgctttagacggctctgccgccttcccggcagctggtgctgtctgtggcttcttaccttctctcaatacacgtatatcatctgccagttatgtgtatttctgttagtgtgtttgcaagtgtcagatgggagacactggactggctaacgggtgtcaggatcctgcaggccctgggataccgaaggctgtgcatggtggagggagaaggaatgcaactgcgatgccgcctctgccaccgcaccaggaaggtgaagcttccgtagtgtcgtagactgagtccggatgatcctggggcggcggaggaaccacagacgcttctgtctgtgaagttgcaagtcctgggtttctacttccgcaggggcctctccaccttttgctgtcagggagacgtggtgggcggtccttcctgtgacacgacccttgagtgacagttctatttgattgcctccggtactgtgaggaaaggacacgactctatggtgaggactgatggacatacattatctgagaaaagaaactaccaggtgacaaacagcatgtttggtgcttcaagaaagaagtttgtagagggggtcgacagtgactaccatgacgaaaacatgtactacagccagtcttctatgtttccacatcggtcagaaaaagatatgctggcatcaccatctacatcaggtcagctgtctcagtttggggcaagtttatacgggcaacaaagtgcactaggccttccaatgagggggatgagcaacaatacccctcagttaaatcgcagcttatcacaaggcactcagttaccgagccacgtcacgccaacaacaggggtaccaacaatgtcacttcacacgcctccatctccaagcaggggtattttgcctatgaatcctaggaatatgatgaaccactcccaggttggtcagggcattggaattcctagcaggacaaatagcatgagcagttcagggttaggtagccccaacagaagctcgccaagcataatatgtatgccaaagcagcagccttctcgacagccttttactgtgaacagtatgtctggatttggaatgaacaggaatcaggcatttggaatgaataactccttatcaagtaacatttttaatggaacagacggaagtgaaaatgtgacaggattggacctttcagatttcccagcattagcagaccgaaacaggagggaaggaagtggtaacccaactccattaataaaccccttggctggaagagctccttatgttggaatggtaacaaaaccagcaaatgaacaatcccaggacttctcaatacacaatgaagattttccagcattaccaggctccagctataaagatccaacatcaagtaatgatgacagtaaatctaatttgaatacatctggcaagacaacttcaagtacagatggacccaaattccctggagataaaagttcaacaacacaaaataataaccagcagaaaaaagggatccaggtgttacctgatggtcgggttactaacattcctcaagggatggtgacggaccaatttggaatgattggcctgttaacatttatcagggcagcagagacagacccaggaatggtacatcttgcattaggaagtgacttaacaacattaggcctcaatctgaactctcctgaaaatctctaccccaaatttgcgtcaccctgggcatcttcaccttgtcgacctcaagacatagacttccatgttccatctgagtacttaacgaacattcacattagggataagctggctgcaataaaacttggccgatatggtgaagaccttctcttctatctctattacatgaatggaggagacgtattacaacttttagctgcagtggagctttttaaccgtgattggagataccacaaagaagaacgagtatggattaccagggcaccaggcatggagccaacaatgaaaaccaatacctatgagaggggaacatattacttctttgactgtcttaactggaggaaagtagctaaggagttccatctggaatatgacaaattagaagaacggcctcacctgccatccaccttcaactacaaccctgctcagcaagccttct

SEQ ID NO: 180541 - DNA, 1545 bp, Artificial Sequence
  derived and/or modified sequence
acaaacacaaacacaaacacgaacacgaacacgctcagcgtccccggggagggcggactgaagccacctcaccattcatcgcccctggaccccgcagtccccctcggactcagggccagagccttctgcgaagcaacctagccccagggaaacggtagcggccgcagaagccccgctctctgtaacggccgcggaggagcagcaagcctccctgtgagtcggtgggagacaagacggagcggcggtaagggcggtagggaagtgaagcgcctctctccaccttgttagaagcgcgctgaaagcggcctgcctacccaccccatcgctgccgttttgcagtcgtcgctcccaccttccgctgccgcctggagggaagccggagcgacgggggtcacggcggcggtcagagggtaaaggtcttgctcccagcagcctccgcggtggatacgtcgccatcttggatccgcgggacaagaaaattcatgcgagggagacgtggtgggcggtccttcctgtgacacgacccttgagtgacagttctatttgattgcctccggtactgtgaggaaaggacacgactctatggtgaggactgatggacatacattatctgagaaaagaaactaccaggtgacaaacagcatgtttggtgcttcaagaaagaagtttgtagagggggtcgacagtgactaccatgacgaaaacatgtactacagccagtcttctatgtttccacatcggtcagaaaaagatatgctggcatcaccatctacatcaggtcagctgtctcagtttggggcaagtttatacgggcaacaaagtgcactaggccttccaatgagggggatgagcaacaatacccctcagttaaatcgcagcttatcacaaggcactcagttaccgagccacgtcacgccaacaacaggggtaccaacaatgtcacttcacacgcctccatctccaagcaggggtattttgcctatgaatcctaggaatatgatgaaccactcccaggttggtcagggcattggaattcctagcaggacaaatagcatgagcagttcagggttaggtagccccaacagaagctcgccaagcataatatgtatgccaaagcagcagccttctcgacagccttttactgtgaacagtatgtctggatttggaatgaacaggaatcaggcatttggaatgaataactccttatcaagtaacatttttaatggaacagacggaagtgaaaatgtgacaggattggacctttcagatttcccagcattagcagaccgaaacaggagggaaggaagtggtaacccaactccattaataaaccccttggctggaagagctccttatgttggaatggtaacaaaaccagcaaatgaacaatcccaggacttctcaatacacaatgaagattttccagcattaccaggctccagctataaagatccaacatcaagtaatgatgacagtaaatctaatttgaatacatctggcaagacaacttcaagtacagatggacccaaattccctggagataaa

SEQ ID NO: 180542 - DNA, 1623 bp, Artificial Sequence
  derived and/or modified sequence
atggtgagaaccgacggccacaccctgagcgagaagagaaactaccaggtgaccaacagcatgttcggcgccagcagaaagaagttcgtggagggcgtggacagcgactaccacgacgagaacatgtactacagccagagcagcatgttcccccacagaagcgagaaggacatgctggccagccccagcaccagcggccagctgagccagttcggcgccagcctgtacggccagcagagcgccctgggcctgcccatgagaggcatgagcaacaacaccccccagctgaacagaagcctgagccagggcacccagctgcccagccacgtgacccccaccaccggcgtgcccaccatgagcctgcacaccccccccagccccagcagaggcatcctgcccatgaaccccagaaacatgatgaaccacagccaggtgggccagggcatcggcatccccagcagaaccaacagcatgagcagcagcggcctgggcagccccaacagaagcagccccagcatcatctgcatgcccaagcagcagcccagcagacagcccttcaccgtgaacagcatgagcggcttcggcatgaacagaaaccaggccttcggcatgaacaacagcctgagcagcaacatcttcaacggcaccgacggcagcgagaacgtgaccggcctggacctgagcgacttccccgccctggccgacagaaacagaagagagggcagcggcaaccccacccccctgatcaaccccctggccggcagagccccctacgtgggcatggtgaccaagcccgccaacgagcagagccaggacttcagcatccacaacgaggacttccccgccctgcccggcagcagctacaaggaccccaccagcagcaacgacgacagcaagagcaacctgaacaccagcggcaagaccaccagcagcaccgacggccccaagttccccggcgacaagagcagcaccacccagaacaacaaccagcagaagaagggcatccaggtgctgcccgacggcagagtgaccaacatcccccagggcatggtgaccgaccagttcggcatgatcggcctgctgaccttcatcagagccgccgagaccgaccccggcatggtgcacctggccctgggcagcgacctgaccaccctgggcctgaacctgaacagccccgagaacctgtaccccaagttcgccagcccctgggccagcagcccctgcagaccccaggacatcgacttccacgtgcccagcgagtacctgaccaacatccacatcagagacaagctggccgccatcaagctgggcagatacggcgaggacctgctgttctacctgtactacatgaacggcggcgacgtgctgcagctgctggccgccgtggagctgttcaacagagactggagataccacaaggaggagagagtgtggatcaccagagcccccggcatggagcccaccatgaagaccaacacctacgagagaggcacctactacttcttcgactgcctgaactggagaaaggtggccaaggagttccacctggagtacgacaagctggaggagagaccccacctgcccagcaccttcaactacaaccccgcccagcaggccttctag

SEQ ID NO: 180543 - DNA, 966 bp, Artificial Sequence
  derived and/or modified sequence
atggtgagaaccgacggccacaccctgagcgagaagagaaactaccaggtgaccaacagcatgttcggcgccagcagaaagaagttcgtggagggcgtggacagcgactaccacgacgagaacatgtactacagccagagcagcatgttcccccacagaagcgagaaggacatgctggccagccccagcaccagcggccagctgagccagttcggcgccagcctgtacggccagcagagcgccctgggcctgcccatgagaggcatgagcaacaacaccccccagctgaacagaagcctgagccagggcacccagctgcccagccacgtgacccccaccaccggcgtgcccaccatgagcctgcacaccccccccagccccagcagaggcatcctgcccatgaaccccagaaacatgatgaaccacagccaggtgggccagggcatcggcatccccagcagaaccaacagcatgagcagcagcggcctgggcagccccaacagaagcagccccagcatcatctgcatgcccaagcagcagcccagcagacagcccttcaccgtgaacagcatgagcggcttcggcatgaacagaaaccaggccttcggcatgaacaacagcctgagcagcaacatcttcaacggcaccgacggcagcgagaacgtgaccggcctggacctgagcgacttccccgccctggccgacagaaacagaagagagggcagcggcaaccccacccccctgatcaaccccctggccggcagagccccctacgtgggcatggtgaccaagcccgccaacgagcagagccaggacttcagcatccacaacgaggacttccccgccctgcccggcagcagctacaaggaccccaccagcagcaacgacgacagcaagagcaacctgaacaccagcggcaagaccaccagcagcaccgacggccccaagttccccggcgacaagtag

SEQ ID NO: 180544 - protein, 753 aa, Artificial Sequence
  derived and/or modified sequence
MADKRKLQGEIDRCLKKVSEGVEQFEDIWQKLHNAANANQKEKYEADLKKEIKKLQRLRDQIKTWVASNEIKDKRQLIDNRKLIETQMERFKVVERETKTKAYSKEGLGLAQKVDPAQKEKEEVGQWLTNTIDTLNMQVDQFESEVESLSVQTRKKKGDKDKQDRIEGLKRHIEKHRYHVRMLETILRMLDNDSILVDAIRKIKDDVEYYVDSSQDPDFEENEFLYDDLDLEDIPQALVATSPPSHSHMEDEIFNQSSSTPTSTTSSSPIPPSPANCTTENSEDDKKRGRSTDSEVSQSPAKNGSKPVHSNQHPQSPAVPPTYPSGPPPAASALSTTPGNNGVPAPAAPPSALGPKASPAPSHNSGTPAPYAQAVAPPAPSGPSTTQPRPPSVQPSGGGGGGSGGGGSSSSSNSSAGGGAGKQNGATSYSSVVADSPAEVALSSSGGNNASSQALGPPSGPHNPPPSTSKEPSAAAPTGAGGVAPGSGNNSGGPSLLVPLPVNPPSSPTPSFSDAKAAGALLNGPPQFSTAPEIKAPEPLSSLKSMAERAAISSGIEDPVPTLHLTERDIILSSTSAPPASAQPPLQLSEVNIPLSLGVCPLGPVPLTKEQLYQQAMEEAAWHHMPHPSDSERIRQYLPRNPCPTPPYHHQMPPPHSDTVEFYQRLSTETLFFIFYYLEGTKAQYLAAKALKKQSWRFHTKYMMWFQRHEEPKTITDEFEQGTYIYFDYEKWGQRKKEGFTFEYRYLEDRDLQ

SEQ ID NO: 180545 - protein, 571 aa, Artificial Sequence
  derived and/or modified sequence
MLETILRMLDNDSILVDAIRKIKDDVEYYVDSSQDPDFEENEFLYDDLDLEDIPQALVATSPPSHSHMEDEIFNQSSSTPTSTTSSSPIPPSPANCTTENSEDDKKRGRSTDSEVSQSPAKNGSKPVHSNQHPQSPAVPPTYPSGPPPAASALSTTPGNNGVPAPAAPPSALGPKASPAPSHNSGTPAPYAQAVAPPAPSGPSTTQPRPPSVQPSGGGGGGSGGGGSSSSSNSSAGGGAGKQNGATSYSSVVADSPAEVALSSSGGNNASSQALGPPSGPHNPPPSTSKEPSAAAPTGAGGVAPGSGNNSGGPSLLVPLPVNPPSSPTPSFSDAKAAGALLNGPPQFSTAPEIKAPEPLSSLKSMAERAAISSGIEDPVPTLHLTERDIILSSTSAPPASAQPPLQLSEVNIPLSLGVCPLGPVPLTKEQLYQQAMEEAAWHHMPHPSDSERIRQYLPRNPCPTPPYHHQMPPPHSDTVEFYQRLSTETLFFIFYYLEPRDVRTAWVDSEAGPLRHTSAPLPVAHWLTRGPSPALLQQPQSRPTPLCSSAHSQASLETTGELSSPLPTPLL

SEQ ID NO: 180546 - DNA, 2855 bp, Artificial Sequence
  derived and/or modified sequence
gaggaggggaggcctcctccgccgccgccatcttggaccgggcccggtcagcttccgcggagccatcggcagacgccgcggcctcccttgagccccgacccccgtcgtcagaacaaccccgggcccactcccccaaccccacttccgcttcgcgccgctatcgcgatagcgcccgggcccggggcgcgagaaaaaggcggcgggcgctcgcctcccccgcctgtcgcgatacgctcctcagcggcggcgccagctcctgtgcgtccgtctccaagagagtatgaagagagtgcgtctgtagggcagggaagatggcggacaagcgcaaactccaaggtgagattgatcgctgcctcaagaaggtgtccgagggcgtggagcagtttgaagatatttggcagaagctccacaatgcagccaacgcgaaccagaaagaaaagtatgaggctgacctaaagaaggagattaagaagctacaacggctgagggaccaaatcaagacatgggtagcgtccaacgagatcaaggacaagaggcagcttatagacaaccgcaagctcattgagacgcaaatggaacggttcaaagttgtggaacgagagaccaaaaccaaagcttacagcaaagagggcctgggcctggcccagaaggtagatcctgcccagaaggagaaggaagaggttggccagtggctcacgaataccatcgacacgctcaacatgcaggtggaccagtttgagagtgaagtggagtcactgtcagtgcagacacgcaagaagaagggcgacaaggataagcaggaccggattgagggcttgaagcggcacatcgagaagcaccgctaccacgtgcgcatgctagagaccatcctgcgcatgctggacaatgactccatcctcgttgacgccatccgcaagatcaaggacgacgttgagtactatgttgactcatcccaggaccccgacttcgaggagaacgagtttctctacgatgacctggacctcgaggacattccacaggcgctggtcgccacctccccccccagccacagccacatggaggatgagatcttcaaccagtccagcagcacgcccacctcaaccacctccagctctcccatcccgcccagcccagccaactgtaccacggaaaactctgaagatgataagaagaggggacgttccacagacagtgaagtcagccagtctccagccaaaaacggctccaagcctgtccacagcaaccagcaccctcagtccccagctgtgccgcccacctacccctccggccccccgcctgctgcctctgccttgagcaccactcctggcaacaatggggtccccgcccccgcagcacccccaagtgccctgggccccaaggccagtccagctcccagccacaactcgggcacccctgctccctatgcccaggctgtggccccaccagctcccagtgggcccagcacgacccagccccggccccccagcgtccagcctagcggaggcggaggcggcggcagcggaggtggagggagcagcagcagtagtaacagcagtgccggtggaggggctggcaagcagaatggcgccaccagttacagctcagttgtggcagacagcccggcagaggtggctttgagcagcagtgggggcaacaatgccagcagccaggccttgggccccccttccggcccccacaacccacctcccagcacctcgaaggaacccagtgcggcagccccaacgggggctgggggcgtggccccaggctcagggaacaactcagggggacccagcctcctggtgccactgcctgtgaatcctcccagctccccaacgcccagcttcagtgatgccaaggcagccggtgccctgctcaatgggcctccacagttcagcaccgccccagaaatcaaggcccctgagcctctgagctccttgaagtccatggcggaacgggcagccatcagctctggcattgaggaccctgtgccaacgctgcacctgaccgagcgagacatcatcctgagcagtacatcagcacctccggcctcagcccagccgcccctgcagctgtcagaggtgaacataccgctgtcgctgggtgtctgtccactgggccctgtgcccctcaccaaggagcagctctatcagcaggccatggaagaggccgcctggcaccacatgcctcacccctctgactctgagcgtattcggcagtacctcccccggaacccctgtccgacgcccccctaccaccaccagatgccacccccacactcggacactgtggaattctaccagcgcctgtcgaccgagacactcttcttcatcttctactatctggagggcactaaggcacagtatctggcagccaaggccctaaagaagcagtcatggcgattccacaccaagtacatgatgtggttccagaggcacgaggagcccaagaccatcactgacgagtttgagcagggcacctacatctactttgactacgagaagtggggccagcggaagaaggaaggcttcacctttgagtaccgctacctggaggaccgggacctccagtgacaccggcccctccctctacccacccccttcccccgcatgctgatccccctgcccaggtgagggccctgccctggaagactggagggaggccccaagccacggggcatccccctctcccaggaagcagggagggggccgggaggttttcctctcagccccaccctgggggcccgggggcgagggctgccccctcctcccctccccagtgagggacattttttggtaaacctattttcattttggaaaatatttatgaataaatagttttatatgacggctggc

SEQ ID NO: 180547 - DNA, 2262 bp, Artificial Sequence
  derived and/or modified sequence
atggcagacaagcgcaagctgcaaggggagatcgataggtgccttaagaaggtgagtgaaggcgttgaacagttcgaagacatctggcagaagctccataacgccgctaacgccaatcaaaaagagaagtacgaagctgatcttaagaaggaaattaagaagctgcagagactgcgggatcaaatcaagacttgggtggcctcaaatgagataaaggacaaaaggcagttgatcgataaccggaaactcatcgaaacgcagatggaaagatttaaggtagtggaaagagagaccaaaactaaagcctatagcaaggaaggcttggggctggctcagaaagttgaccctgcacagaaggagaaagaagaagtggggcaatggcttacaaacactatcgataccctgaacatgcaagtggaccagtttgaatctgaagtggaaagcttatcggtgcagactcgaaagaagaagggggacaaggacaagcaagaccgcattgagggactcaaacgacatatcgagaaacatagataccacgtgcgcatgctcgagacaatcctgagaatgctggataatgactcaatactggtcgacgcaattagaaagattaaagacgacgttgagtattatgtggatagctcgcaggatcctgattttgaggagaacgagttcctgtacgacgatcttgatctcgaggacataccacaggcactggtcgcaactagcccgccaagccactctcatatggaggatgagatcttcaatcaatcaagctctacccccacctctaccacaagtagctcccccattccacctagccccgctaattgcactactgaaaactctgaagatgacaagaagcgcggccgatccaccgattccgaagtgtcacaatcgcctgctaagaacgggagtaagcccgtacatagcaatcagcacccccagagcccagccgttccacccacctaccccagcgggccaccacccgccgcctccgcattatccactacgccggggaacaacggtgtgcctgcacccgccgcacctccaagtgccctggggcccaaagcatcacccgcaccttcccataattcggggactccagcaccctacgctcaggctgtggcccctcctgccccatctgggccttccaccactcaacctcggcctccctcagtacaaccctccggcggcggcggaggaggaagcggcgggggtggctcctcatccagcagtaactcatctgcaggcggcggagcgggcaaacaaaatggcgctacatcatacagctctgtggttgcagactccccagcggaggtcgctctgtcttcttccggaggcaataacgcctcttcgcaggcactcgggccgccttccgggccccacaacccccccccatctacctcaaaagagcctagcgctgcggcacccactggggcaggcggtgttgcgcccgggagcggaaataacagcggcggaccttccctgctggtccccctcccggtcaacccacccagttcccccacaccctcattttccgatgccaaagccgcaggagccctcctgaacgggcccccccagttctcgacggcacccgagattaaagccccagaaccattatcaagcctgaagagtatggcggagcgggcggcaatctcatctggcatcgaagacccagttcccacactccaccttacagaacgggacatcattcttagttccaccagtgcaccaccagctagcgcgcagccccctcttcaattgagcgaggtgaacataccgctgtctctgggagtttgccctctcggcccagtacccctgacaaaagagcaactgtatcagcaggctatggaggaggccgcctggcaccatatgccccatccttctgactctgagcgaattcggcaatacctgccaagaaatccgtgcccaacgcctccctatcaccaccagatgcctcccccacatagcgataccgttgaattttatcaacggctgagtaccgagactttatttttcatcttctattacctggaaggcaccaaggctcagtatctggcagctaaagctctgaagaagcagtcctggcgcttccacacaaaatacatgatgtggttccagcgccacgaggagcctaagaccattacagatgaattcgagcaggggacctatatctacttcgactacgaaaaatggggccagcggaagaaggagggtttcacatttgaatataggtatctagaggatagagatctgcaatag

SEQ ID NO: 180548 - DNA, 2262 bp, Artificial Sequence
  derived and/or modified sequence
atggctgacaagaggaagctgcagggcgagattgaccgctgcctgaagaaggtgtctgaaggagtggagcagtttgaggacatctggcagaagctgcacaatgctgccaatgccaaccagaaggagaagtatgaggccgacctgaagaaggagatcaagaagctgcagaggctgcgggaccagatcaagacctgggtggccagcaatgagatcaaggacaagaggcagctgattgacaacaggaagctgattgagacccagatggagcgcttcaaggtggtggagcgggagaccaagaccaaggcctacagcaaggagggcctgggcctggcccagaaggtggaccctgcccagaaggagaaggaggaggtgggccagtggctgaccaacaccatcgacaccctgaacatgcaggtggaccagtttgagagcgaggtggagagcctgtctgtgcagaccaggaagaagaagggggacaaggacaagcaggaccgcatcgagggcctgaagaggcacatcgagaagcaccgctaccacgtgaggatgctggagaccatcctgaggatgctggacaatgacagcatcctggtggatgccatcaggaagatcaaggatgatgtggagtactacgtggacagcagccaggaccctgactttgaagaaaatgagttcctgtatgatgacctggacctggaggacatcccccaggccctggtggccaccagcccccccagccacagccacatggaggatgagatcttcaaccagagcagcagcacccccaccagcaccaccagcagcagccccatcccccccagccctgccaactgcaccacagagaacagtgaagatgacaagaagaggggccgcagcacagacagcgaggtgtcccagagccctgccaagaatggcagcaagcctgtgcacagcaaccagcacccccagagccctgctgtgccccccacctaccccagcggccccccacctgctgccagcgccctgagcaccaccccaggcaacaatggagtgcctgccccagctgcccctccttctgccctgggccccaaggccagccctgcccccagccacaacagcggcaccccagccccctatgcccaggccgtggcccccccagcccccagcggccccagcaccacccagccccggccccccagcgtgcagcccagcggcggcggcggcggcggcagcggcggcggcggcagcagcagcagcagcaacagcagcgctgggggcggggccggcaagcagaatggagccaccagctacagctctgtggtggccgacagccctgctgaggtggccctgagcagcagcggcggcaacaatgccagcagccaggccctgggccccccatctggcccccacaaccccccacccagcaccagcaaggagcccagcgctgctgcccccaccggggccggcggcgtggcccctggcagcggcaacaacagcggcggccccagcctgctggtgcccctgcctgtgaacccccccagcagccccacccccagcttcagtgatgccaaggccgccggggccctgctgaatggaccaccccagttcagcacagcccctgagatcaaggcccctgagcccctgagcagcctgaagtccatggccgagcgggccgccatcagcagcggcattgaagatcctgtgcccaccctgcacctgacagagcgggacatcatcctgagcagcaccagcgcccccccagccagcgcccagccccccctgcagctgtctgaggtgaacatccccctgagcctgggcgtgtgccccctgggccctgtgcccctgaccaaggagcagctgtaccagcaggccatggaggaggccgcctggcaccacatgccccaccccagcgacagcgagcgcatccggcagtacctgcccaggaacccctgccccaccccaccctaccaccaccagatgcccccaccccacagcgacacagtggagttctaccagaggctgagcacagagaccctcttcttcatcttctactacctggagggcaccaaggcccagtacctggccgccaaggccctgaagaagcagagctggaggttccacaccaagtacatgatgtggttccagagacatgaggagcccaagaccatcacagatgaatttgagcagggcacctacatctactttgattatgagaagtggggccagaggaagaaggagggcttcacctttgagtaccgctacctggaggaccgggacctgcagtag

SEQ ID NO: 180549 - DNA, 2262 bp, Artificial Sequence
  derived and/or modified sequence
atggccgacaagcggaagctgcagggcgagatcgaccggtgcctgaagaaggtctccgaaggggtggagcagtttgaggatatttggcaaaagctccacaatgcagccaacgccaaccaaaaggaaaaatacgaggctgatctgaagaaggagataaagaaactgcagcggctgcgggatcaaatcaagacctgggttgcctcaaacgagataaaagacaaacgacaattgattgataatagaaaactgatagaaacacagatggaacgcttcaaggtggtggaacgggagacaaagacaaaggcttattctaaggagggactcggacttgcgcagaaggtcgaccccgcacagaaggagaaagaggaagtaggtcagtggctcaccaatactattgataccctaaacatgcaggtagatcaattcgaatctgaagtcgagagtctcagcgtgcagacccggaaaaaaaagggcgacaaagacaaacaggatcgtatcgagggccttaagcgacacatcgagaagcaccggtaccacgtcaggatgctggagactattctccgtatgcttgacaatgacagcatcctggtagatgcaatccggaagatcaaagatgatgtcgagtattacgtagattcatcccaagaccccgacttcgaggagaatgagttcctctatgacgatcttgatcttgaagacatcccacaggccctggtggcaacctcgccaccaagccattctcatatggaggatgagatcttcaaccaaagttcaagcactccaacttctactacctcttcatctccaatccctcccagtccagctaactgcacaactgagaacagcgaggatgacaagaagcgagggcggtcaaccgacagcgaagttagccagtctcccgccaagaatggatcaaaacccgtccatagcaaccagcatccacaatcccctgccgtcccaccaacctaccctagcgggcctccaccggccgcttcagcgctgtccactacgcctggcaataacggagtacccgctccggctgctccccctagtgccctgggacctaaagcttctcccgcccccagtcacaactctggaactcctgcgccttatgctcaggcggttgctccgcctgctcccagcggccccagcactacacaaccaagacccccgtccgtacagccatccggtggcgggggcggaggaagcggcgggggtggctcttctagtagctccaacagtagtgccgggggaggtgctggaaaacagaacggcgccacttcttatagctcagtggttgctgactcgcctgccgaagtcgctctctctagtagcggcggaaacaacgcatcatcccaggcacttggtcccccatccggtccccataacccaccaccctccacaagtaaggaacccagtgccgccgcgcctacgggtgccggaggtgttgctccaggctcaggcaacaatagcggtggcccgagtttactggttccgctgccagtgaatccaccttcctccccgactccttcttttagtgatgccaaggccgcgggcgcactcctcaatggacctccacagttttctactgccccggagatcaaggccccggaaccactgtccagcttaaagtccatggctgaacgggccgccataagttcaggaatcgaagatcctgtaccgaccctgcacctgacagagcgggatatcatactatcctcaacatcagccccacctgcctccgcccagcccccccttcagctgagtgaagtgaacataccattatcgctgggcgtctgcccactgggacccgtcccactgactaaggaacaactgtatcagcaggccatggaagaagccgcctggcatcatatgcctcaccctagcgacagcgaacgcatccggcagtatctccctagaaatccatgtcccacccctccgtaccaccatcagatgccacctccacattctgacaccgtggaattttatcagagattgtccacagagaccttgttctttattttctattatttagaagggacaaaagctcaatatctagcggccaaggcgttgaagaagcagtcctggaggttccataccaaatacatgatgtggttccaaagacacgaagaacctaagaccattaccgacgaatttgagcaggggacttacatttacttcgactacgagaagtggggccagcgcaagaaggagggctttaccttcgagtatcgctacttggaggatcgggacctgcagtag

SEQ ID NO: 180550 - DNA, 2262 bp, Artificial Sequence
  derived and/or modified sequence
atggccgacaagcgaaaactgcagggcgaaattgaccgctgtctgaagaaggtgtcagagggtgtcgaacagttcgaggacatctggcagaaactgcacaatgcagcaaacgcaaatcagaaggagaaatacgaagcggatctgaaaaaagagattaagaagctccagagattgagggaccaaattaagacgtgggtcgcgagcaacgaaataaaggataaacgacagctgattgacaatcgtaagctcatcgaaacgcaaatggagcggtttaaggtggttgagcgcgagactaagactaaggcttacagtaaggaaggccttggccttgcccagaaggtcgatccagcccaaaaggaaaaggaggaagtgggccagtggcttaccaatactatagatactctcaacatgcaggtggaccaatttgaatcagaggttgagagcctgtctgtacagaccagaaaaaaaaaaggcgataaagacaagcaggacaggattgagggtctcaagcgacacatagaaaaacatcggtaccacgtgcgcatgctagagacgattttgcgaatgctggataacgactctatactcgtcgacgccatacgaaaaatcaaagacgatgttgaatattatgtggactcatcacaggaccctgactttgaggaaaatgagtttctctacgacgatctggatctggaggatatcccgcaggcccttgtcgccacttcacccccatctcacagccacatggaagacgagatattcaaccaatcaagtagtactccaacctcaaccacttcttctagtcccattcctccttcccctgcaaactgcactacggagaatagcgaagacgacaaaaagaggggcagatcaacagacagcgaggtttcccaatccccagctaagaatgggagcaaaccggtgcattccaaccaacaccctcagagccctgcagtgccccctacttatcccagcggccctcccccagccgctagcgcattgtcaacgacccctggaaataacggagtgccagctcctgccgcaccaccgagtgctctggggcctaaggcatcgccagccccatcacacaatagcggaacaccagcaccctacgctcaagcagttgcacccccagctcctagtgggccatcaaccacacagcccaggcccccatccgtccagccctccggcggtggaggagggggttcaggcggtgggggatccagttctagctcaaactcgtctgccggtggcggagccggaaaacaaaacggagccacgagttacagctcagttgtggccgactccccagccgaagttgccctctcttctagcgggggaaataatgccagttctcaggcgcttgggcctccttctggcccacataatccccctccttccactagcaaggaacccagtgctgccgctcctaccggggctggcggagtggctcctggctctggtaataattcaggcggtccgtcattgctggtcccccttcctgtcaatccccctagtagcccaaccccctccttttcagatgccaaggcggcaggagccctgctcaacggtcccccacagttttcgacagccccagaaattaaggctcctgagccactttcttcactgaagtcaatggccgaacgggcagctattagcagcggcatcgaggatcccgtacctaccctgcatctcactgagcgcgatataatccttagcagtacaagcgctccgcctgcgagtgctcagcctccactccagttgtccgaagtgaacattcccctgtccctgggagtgtgccctctcgggccagtaccactgacaaaggaacaactgtaccagcaggcaatggaagaggcagcatggcatcatatgccccacccctccgactctgaacgcattcgccagtacctcccgaggaatccctgtcccacccccccatatcatcaccagatgcccccacctcacagcgataccgtggaattttaccagcgcctctccaccgaaactttatttttcattttttattaccttgagggcactaaagcacagtatctggctgccaaggctcttaagaaacaatcttggcggtttcacactaaatacatgatgtggtttcagcggcacgaagagccgaaaactattacggacgaatttgaacagggcacctatatatacttcgactacgaaaagtggggccagaggaagaaagaaggtttcaccttcgagtatcggtacctggaagatagggatctgcaatag

SEQ ID NO: 180551 - DNA, 2262 bp, Artificial Sequence
  derived and/or modified sequence
atggccgacaagagaaagctgcagggcgagatcgacagatgcctgaagaaggtgagcgagggcgtggagcagttcgaggacatctggcagaagctgcacaacgccgccaacgccaaccagaaggagaagtacgaggccgacctgaagaaggagatcaagaagctgcagagactgagagaccagatcaagacctgggtggccagcaacgagatcaaggacaagagacagctgatcgacaacagaaagctgatcgagacccagatggagagattcaaggtggtggagagagagaccaagaccaaggcctacagcaaggagggcctgggcctggcccagaaggtggaccccgcccagaaggagaaggaggaggtgggccagtggctgaccaacaccatcgacaccctgaacatgcaggtggaccagttcgagagcgaggtggagagcctgagcgtgcagaccagaaagaagaagggcgacaaggacaagcaggacagaatcgagggcctgaagagacacatcgagaagcacagataccacgtgagaatgctggagaccatcctgagaatgctggacaacgacagcatcctggtggacgccatcagaaagatcaaggacgacgtggagtactacgtggacagcagccaggaccccgacttcgaggagaacgagttcctgtacgacgacctggacctggaggacatcccccaggccctggtggccaccagcccccccagccacagccacatggaggacgagatcttcaaccagagcagcagcacccccaccagcaccaccagcagcagccccatcccccccagccccgccaactgcaccaccgagaacagcgaggacgacaagaagagaggcagaagcaccgacagcgaggtgagccagagccccgccaagaacggcagcaagcccgtgcacagcaaccagcacccccagagccccgccgtgccccccacctaccccagcggccccccccccgccgccagcgccctgagcaccacccccggcaacaacggcgtgcccgcccccgccgccccccccagcgccctgggccccaaggccagccccgcccccagccacaacagcggcacccccgccccctacgcccaggccgtggccccccccgcccccagcggccccagcaccacccagcccagaccccccagcgtgcagcccagcggcggcggcggcggcggcagcggcggcggcggcagcagcagcagcagcaacagcagcgccggcggcggcgccggcaagcagaacggcgccaccagctacagcagcgtggtggccgacagccccgccgaggtggccctgagcagcagcggcggcaacaacgccagcagccaggccctgggcccccccagcggcccccacaaccccccccccagcaccagcaaggagcccagcgccgccgcccccaccggcgccggcggcgtggcccccggcagcggcaacaacagcggcggccccagcctgctggtgcccctgcccgtgaacccccccagcagccccacccccagcttcagcgacgccaaggccgccggcgccctgctgaacggccccccccagttcagcaccgcccccgagatcaaggcccccgagcccctgagcagcctgaagagcatggccgagagagccgccatcagcagcggcatcgaggaccccgtgcccaccctgcacctgaccgagagagacatcatcctgagcagcaccagcgccccccccgccagcgcccagccccccctgcagctgagcgaggtgaacatccccctgagcctgggcgtgtgccccctgggccccgtgcccctgaccaaggagcagctgtaccagcaggccatggaggaggccgcctggcaccacatgccccaccccagcgacagcgagagaatcagacagtacctgcccagaaacccctgccccacccccccctaccaccaccagatgccccccccccacagcgacaccgtggagttctaccagagactgagcaccgagaccctgttcttcatcttctactacctggagggcaccaaggcccagtacctggccgccaaggccctgaagaagcagagctggagattccacaccaagtacatgatgtggttccagagacacgaggagcccaagaccatcaccgacgagttcgagcagggcacctacatctacttcgactacgagaagtggggccagagaaagaaggagggcttcaccttcgagtacagatacctggaggacagagacctgcagtag

SEQ ID NO: 180552 - DNA, 2262 bp, Artificial Sequence
  derived and/or modified sequence
atggctgataaaagaaaattgcagggtgagatagatcggtgcctcaagaaagtgtccgagggagtggagcagttcgaagacatatggcagaagctgcataacgccgccaatgcaaaccaaaaggaaaaatacgaggccgacttgaagaaagagatcaagaagctgcagcggttacgggatcagattaaaacctgggtggcatcaaacgagatcaaagataagcgccaattgatagataataggaagctgattgagacgcagatggagaggttcaaggtagtggagcgtgaaaccaagacgaaggcctattcaaaggaggggctgggtttggctcagaaagtggaccccgctcagaaagagaaagaggaagttgggcagtggttaacaaataccattgataccttaaacatgcaggtagaccagttcgagtccgaggtcgagtcactctcagtgcagacgagaaaaaagaagggggataaagacaagcaagaccggattgaaggactcaagcggcacatagaaaagcatcgttatcatgtgcggatgctggagacaatactgcgaatgctcgacaacgacagtatccttgtggatgcaattaggaaaatcaaagacgatgtagaatactacgtggacagtagccaggaccccgatttcgaggagaacgaatttctctatgacgaccttgatctggaggacattcctcaggccctggtggctacatctcccccgtcccattcccacatggaggacgagatttttaatcagtcatcatccacccctacaagtacaacttctagcagccccatcccgccctcccccgctaattgcacaactgagaattctgaggacgacaagaaacgcgggcggtcaacagactccgaagtgtcgcagtccccagctaaaaatgggtcaaaacctgttcattctaaccagcacccacaatccccggcggtacccccgacctatccatccggcccaccccctgccgcaagcgcattgagcacaacacccgggaacaatggagtgccagcaccggccgcaccaccctccgccctcggtccgaaagccagccccgccccttcccacaatagcggcactccggctccttatgctcaggcggtcgctcctcctgcgccttctgggcctagtaccacgcaacctcgccccccttctgtgcagccttcaggaggcgggggaggggggagtggtggtgggggctcaagctcttcttccaactccagtgcgggcgggggggctgggaaacagaatggcgctacatcttacagttctgtcgtggccgactcccctgctgaagtggcactatcctcctccggaggcaacaatgcttctagtcaggccttaggtccaccctccggcccacacaatcctccaccaagcacgagcaaagagccaagtgccgccgcccctactggggccggtggagtggctcccgggagtggtaacaattcaggaggtcccagtctgttggtcccactcccagtgaacccgccttcttctccgaccccgtctttcagtgatgcgaaagcagccggcgctttgctgaacggacccccacagttctcaactgcgccggagatcaaggcaccagaacccttgtcctccctgaagtctatggccgagcgagccgccatctcctctgggatcgaggatcccgtccccacgctccacctgaccgaacgagacattattcttagctctacgagtgctccccctgcttccgcccagcctcctctgcagctgagcgaagtgaacatccctctgtctttgggtgtatgccctctcggccctgtacctttaacgaaagagcagctgtaccagcaagccatggaagaggcagcctggcatcacatgccacaccccagcgactccgagaggattaggcagtatcttccaaggaacccttgcccaacgcctccctaccaccaccagatgccaccaccgcacagcgataccgtagagttctaccaacgattgtcgactgagacactgttttttattttctattacttggagggcactaaggcccagtaccttgcagcaaaggcactcaaaaaacagagttggaggttccacacaaagtacatgatgtggttccaacgccacgaggaacccaagacaataacagacgagtttgagcaggggacgtacatctactttgactatgagaagtgggggcagcgcaaaaaggaaggttttacatttgaatatcgctacctcgaggatcgggacttgcagtag

SEQ ID NO: 180553 - DNA, 2262 bp, Artificial Sequence
  derived and/or modified sequence
atggccgataaacgcaagctacaaggcgagatcgatcgatgtctcaaaaaagtgtccgaaggcgtggagcagttcgaggacatttggcaaaagctgcacaatgcagcgaacgcaaaccagaaggagaagtacgaagcggacctgaaaaaggaaatcaagaagctgcagagattgagggaccagattaaaacgtgggtagccagtaatgaaatcaaggacaaacgccagttaatcgacaatcgcaaattaattgagacccagatggaaaggtttaaggtggtagaacgggagaccaagactaaggcctacagcaaggagggcctgggactcgcccaaaaagtggatcccgcccaaaaggagaaggaggaggtggggcagtggctcactaacacaatcgacaccctgaacatgcaggtggatcagttcgagtccgaggtggaatcgctctccgttcagacccggaaaaaaaaaggggataaggataaacaggacagaatagaaggtctcaaacgccatatagagaaacacagataccatgtccgcatgctggagaccatcctgaggatgctagataacgacagcattctcgtggatgcaatacgcaagatcaaggacgacgtggaatactatgtggactcctcgcaggaccctgattttgaagagaacgagttcttgtacgacgatttagatctggaagacattcctcaggcactggttgcgacatcacctccttcacactcgcatatggaggacgagattttcaaccaatcaagcagtactcctactagcacaaccagttcatccccgattccgccctcccctgctaattgcacaactgaaaactctgaggacgacaaaaagcgtggccgatcaaccgattcggaagtcagccaatctccagccaaaaacggatctaagccagtacacagcaatcagcatccgcaatctccagccgtcccgcctacctacccaagcggccctcctcctgcggccagcgccttatctacaacccctgggaataatggggttccagctcccgccgccccccctagtgcgctgggcccaaaggcgtccccagccccttcccataacagcggcacacctgccccttatgctcaagccgtggccccacctgcaccatctggccctagcactacccaaccaaggccgccctccgtccagccgtctggaggggggggaggtggttccggagggggcgggtcttcttcctcttcgaacagcagcgccggtggcggggcaggcaagcagaacggcgctacatcatattcttccgtagtggccgattctcctgccgaggtggccctgtcttctagtggcggaaataatgcatcctcccaggcccttggacccccgtcgggccctcacaatccacctccctccacgtctaaagagcctagcgcagcggcacctacaggggccgggggcgtggcacccggctctggcaacaacagcgggggtccctcactgctcgtccccctgccagtgaaccctccctccagccctactcccagcttctctgatgctaaagctgctggagccctgctgaatggcccgccacaatttagcaccgctcccgagattaaagcacctgagcccctgtcctctctgaagagcatggcagagagggctgccattagcagcggcatcgaggaccccgtacccactctccatttgacagagagagacattattttgagctctactagcgcaccacccgctagtgcccagccaccgctgcagctctctgaagtgaacattcccctgagccttggcgtttgcccactcggccctgtccccctgacaaaggagcagctttatcagcaagcaatggaggaggcagcatggcatcacatgccacatccttccgattcggagcggatcaggcagtatctgcctcgcaatccctgtcctactcccccttaccaccaccagatgccaccaccacattcagataccgttgaattttaccagagactttcaaccgagactctcttcttcatcttctattaccttgaggggaccaaggcccagtacctagcagccaaggctctcaagaagcagtcctggcgattccataccaagtatatgatgtggttccagcggcatgaagagccaaaaaccataacagacgagtttgagcaaggcacttacatctattttgattatgagaagtggggacagcggaagaaggagggctttacctttgagtaccgttacctggaggatcgcgacctgcagtag

SEQ ID NO: 180554 - DNA, 2262 bp, Artificial Sequence
  derived and/or modified sequence
atggcagataaaagaaaactccagggggaaattgacagatgtttgaagaaggttagtgagggggttgagcaattcgaagatatctggcagaaactgcataatgcagctaacgcgaaccagaaggagaaatacgaagccgatcttaaaaaagagatcaaaaaactgcaacgcctcagagaccagattaagacctgggtggctagtaacgagattaaagataaacgtcagctcatcgacaatagaaaactaatcgagacccagatggaaagattcaaggtagtggaacgggaaacgaagaccaaagcatattccaaagaagggctcggtctggcgcagaaggtagatcccgcccagaaggaaaaggaggaggtgggccagtggctgaccaataccatcgatactctgaatatgcaagtggatcagtttgagtccgaggtggagagcctcagcgtgcagactcgtaagaaaaagggagataaagacaaacaggatcggattgagggattgaagagacacatcgaaaaacataggtaccacgtgcgtatgctggagactatcctcaggatgctggacaacgacagtattcttgtagacgcaatacgtaagattaaagatgatgtggagtactacgttgactccagtcaagaccctgatttcgaagaaaatgaatttctatacgacgatctagatctggaagacataccccaggcactagtcgctaccagccccccctcacatagccatatggaggacgagatctttaaccagagcagcagcaccccaacttccaccacatcttcctcccccattccgccttctccagcaaattgtactacggaaaatagcgaggacgataaaaagagggggcgaagcactgacagcgaagtcagtcaatcacccgcaaagaacggcagtaaacctgtgcacagcaaccagcacccacagagcccagccgtgcctcctacctaccctagtggaccacctcccgccgcatcggctctgtcaacaacccccggcaacaatggagtaccagcacctgctgcgccaccaagcgcccttggccccaaggccagccccgccccgagtcacaactccggaacaccagcgccctatgcacaggcagtggcgccccccgcccctagtgggcccagcaccactcaaccaagaccaccctctgtgcagccttccggcggcggcggtggaggatccggaggcggtggctcatcaagctcctccaatagcagcgccggcggcggcgccggtaaacaaaatggagcaacaagttattcaagcgtggtggctgactcacctgccgaggtggccctatcctccagcggcggtaacaacgcctcatcacaggccctgggtcctccgagcggtcctcacaatccaccaccttccactagcaaggaaccttcagccgctgctcctaccggggcaggcggagtcgcgcctgggtctgggaataactcaggagggccttccctgctggtgcctctgcccgtcaatccaccttcgagccctaccccatctttctccgacgccaaggctgccggcgcactccttaatggcccccctcaattcagcacagcacccgaaatcaaagctcctgagccactgtcctcccttaaaagcatggctgagcgcgctgcaattagtagcggtattgaagatcccgtccccacactccacctcacagaaagagacatcatcctgagctcaacctccgccccacccgcatcagctcagccaccattgcagcttagcgaggtcaatatccctctgtcactgggagtgtgtcctcttgggccagtcccactcaccaaagagcagctgtaccaacaggccatggaagaagccgcttggcaccacatgcctcatccctccgacagtgaaaggatccggcagtacctcccccgcaatccatgtccaacccctccttaccaccaccagatgccaccacctcactcagacaccgtagaattctatcagcgtctgtccaccgagaccctattcttcatcttctattatctggagggaacaaaggcacaatacctcgccgccaaggccctcaaaaagcagtcctggaggttccatacaaagtacatgatgtggtttcagcggcatgaggaacctaagaccataactgatgaattcgagcaaggcacctatatttactttgactatgagaagtggggtcagcgtaagaaggaagggttcaccttcgagtatagatacctggaagacagagacttacagtag

SEQ ID NO: 180555 - DNA, 2262 bp, Artificial Sequence
  derived and/or modified sequence
atggctgacaagaggaagctacaaggagagatcgatcgctgtctaaagaaggtatccgagggggtcgaacagttcgaggacatatggcagaaactgcataatgccgcgaacgcaaaccagaaagagaaatacgaagcggatctgaagaaagagattaaaaagctgcagcgcttacgggaccagatcaagacatgggtagcgtcgaatgaaataaaagacaagaggcagctaatcgacaatagaaaactcatcgaaacacagatggagcgttttaaggtggtggaaagagagaccaaaactaaggcctattccaaggaaggcctagggcttgcacagaaggtggatcccgcccagaaggaaaaggaggaagtaggacaatggctgactaataccattgacactctcaatatgcaggtcgaccagtttgagtctgaggtggagagtctgagcgtccagacccggaagaagaaaggggacaaagacaagcaggaccgaatcgaggggttgaagcggcatatagagaagcacaggtaccacgtgcgcatgcttgagaccatcctgagaatgttggataacgatagtatcttggtggatgccataaggaaaatcaaggatgatgtggaatactatgtggacagttctcaggaccccgattttgaagaaaatgagtttctatacgatgacctggacctggaggacataccacaagcactggtagcaaccagccctccatctcactcccacatggaggacgaaatctttaaccagagttcttctacacccacttcaacaacatccagctcaccgatccctccgagtcccgccaactgtacaaccgaaaatagtgaggacgataagaagagaggacgtagtacagattcggaagtgtcccagtctcccgccaagaatggcagtaaaccagtccattcaaaccagcacccacagtcccccgccgtcccccccacttacccaagcggcccgccccccgctgcctctgccctgagcactacacccggcaacaacggggttcctgcacctgcagctccaccctccgccctcgggccaaaagcgtcaccagcaccgagccataattcaggtaccccagctccctacgcccaagccgtggcaccccctgcgccaagcggtccttctactactcaaccccgcccgccctccgtgcagccatccggcggcggcgggggcggatcaggcggtggcgggagctccagttcctcgaattccagtgcgggggggggggcaggaaagcagaatggcgccacttcctattctagcgtcgtggcagactcgccagctgaagtggccctttcgtccagtggaggcaacaacgcgtcatctcaggcactggggccccctagtggtccccacaatccaccgccaagtacttccaaagaaccaagcgctgctgctcccactggagcgggcggggttgctcccggatcaggaaacaacagcggcggcccgtctctcttagtgccattgcccgtgaatccgccaagttctcccacgccatccttttccgacgctaaggcagcgggggccctgttgaacggccccccccagttcagcaccgcccctgagattaaggcacctgagccactgtccagcttgaagtcaatggctgaaagagccgccatctctagtggcatcgaggacccggtgccaactctgcacctgaccgagcgggacattattctcagctctaccagtgcccctccggccagcgcccaaccaccactgcagctgtctgaggtcaatatacctttgagcctgggggtatgcccattaggccccgtacctctcactaaggagcaactgtatcaacaggctatggaagaggctgcctggcaccacatgcctcatccgagcgattcagagagaatcaggcagtatctgccgcgtaatccttgtcccaccccaccttatcaccatcagatgccacctcctcattcggatacagtagagttctaccagaggttaagcacagagaccttattttttatcttttactatttagagggcaccaaggcccagtacttggccgcgaaggcactaaaaaagcagtcctggagatttcacactaagtacatgatgtggttccaaaggcacgaagagcccaaaacaatcaccgacgaatttgaacaggggacttatatatattttgactatgaaaagtggggacaacgcaaaaaggagggatttacatttgaataccgctatctcgaagatcgggatctccagtag

SEQ ID NO: 180556 - DNA, 2262 bp, Artificial Sequence
  derived and/or modified sequence
atggctgacaagcgcaagctgcaaggagagattgaccgatgcctcaaaaaggtctccgaaggagttgaacagttcgaggacatatggcagaagctccataacgcagcgaacgctaatcagaaggagaagtacgaggccgatctaaagaaagagatcaagaagctgcagcggctcagggaccaaatcaagacatgggtggcctcaaacgagattaaggacaaaaggcaacttatcgataatagaaaactcatagagactcagatggagagatttaaggtggtcgaaagggagaccaagaccaaagcctactccaaagagggacttgggctcgcgcagaaagttgacccggctcaaaaggaaaaagaagaggtgggccagtggctgaccaacaccatcgataccctgaacatgcaggtggaccaattcgagagcgaggtcgagtccctgagcgtccagacgcggaagaagaaaggggataaagacaagcaggacaggatagagggcctgaagcggcacatagagaagcatcgctaccacgtcaggatgctggaaaccattctgcgcatgttagacaacgacagtattcttgtggacgccatcaggaagatcaaagacgatgtagaatactacgtcgacagtagtcaggatccggactttgaggaaaatgagtttttgtacgatgacctggacctcgaagacatccctcaagcgctggtggcgacttcgcccccaagccattcccacatggaagacgagatttttaatcagagttcatccactccgactagtacgacctcatcaagcccgatccctcccagtccagctaattgcacgactgagaactccgaggatgacaagaaacgcggccggagcaccgactcagaagtatcacagagtccggccaaaaacggatcgaaaccagtacacagtaatcagcaccctcagtcgcccgcagtacctccgacttatccgagtggcccaccacctgccgcatccgctctgagtaccactcctgggaacaatggtgtcccggctcctgctgccccaccgagcgccctgggccccaaagcttccccggctccctctcataactcagggactcccgctccttacgcccaagctgttgcaccacctgcacctagcggtccgtccacaactcagccaagaccccctagtgtccagcctagtggaggtggaggggggggaagcggagggggcggctcctctagttcctctaattccagcgccgggggtggcgccggcaaacagaatggcgctacatcttacagctctgtggtcgccgacagtccagccgaggtggccctctcctctagtggcggaaacaatgcatccagccaggccctgggcccaccatctggcccacacaatcccccacctagtacatcaaaagaaccatctgctgcggccccgaccggagccggaggagtggcacctggttcagggaacaattctggggggccttccttgctcgttccccttccagtgaaccccccaagtagccctactcctagcttcagtgatgccaaggctgccggcgccctgctcaatggaccccctcagttttctactgcccctgaaatcaaggcgccagagcctctcagctctctgaaaagtatggcagaaagagccgcgatcagctccggcatcgaagatccggtaccaacactgcatctcactgagcgtgatatcatcctgtccagcacatcagctcctcccgccagtgcgcagcctcctttacaactcagtgaagtcaatatacctctttccctcggagtgtgtccactcggccccgtgcctctgacgaaagagcaactgtatcagcaggcgatggaagaagccgcttggcaccacatgccgcaccctagcgactctgaacgaatcagacagtacctgccccgcaacccatgccccactcctccctaccatcaccagatgccccccccacattccgacacagtggaattttaccagcgtctttctacggaaaccctattcttcattttttactatctggagggcacaaaggcccagtatctcgcagccaaggccttgaagaaacagtcttggcgatttcatacaaaatacatgatgtggttccagaggcacgaagagccgaaaactatcacagacgagtttgaacagggcacttacatctacttcgactatgagaaatggggccagagaaagaaggagggttttactttcgaataccgttatctagaggatcgcgatttgcagtag

SEQ ID NO: 180557 - DNA, 2262 bp, Artificial Sequence
  derived and/or modified sequence
atggcagataaacgcaagctccagggagagattgatagatgccttaagaaggtgagcgagggggttgagcaatttgaagacatatggcagaagctgcacaatgccgcaaacgctaaccagaaggaaaagtatgaagccgaccttaaaaaagagatcaaaaagttgcaacgtctacgggaccagataaagacctgggttgctagcaatgaaatcaaggacaaaagacagcttattgacaataggaaacttatcgagacccaaatggagcgctttaaagtcgtcgagagagagacaaagacaaaagcatattccaaagaaggactcggactggcccagaaagtcgacccagctcagaaggagaaggaagaagtggggcaatggctgaccaatacgattgacacattaaacatgcaagtagatcagttcgagagcgaggttgagtccctcagcgtgcaaacccgcaaaaagaagggagacaaggacaagcaagataggatcgaggggctaaaaagacatattgagaaacacaggtatcacgtgcgaatgttggagaccatcctccggatgctggacaatgactcaatcctggttgatgcaattcggaagattaaagacgacgtagagtattatgttgacagctcccaggaccccgactttgaggaaaatgagtttctgtacgatgatttggacctggaagacatccctcaggcgctggtggctacatcacccccttctcactcacatatggaggatgagatctttaatcaatcaagtagcactcctacttcaactaccagctcgtcccccattccaccatcgcctgccaattgtactactgagaacagcgaggatgataagaaaagaggacggtcgactgacagcgaagtgagtcaatcccctgctaagaatggctcaaagcccgtgcatagtaatcagcacccacagagtccggcagtgcctcctacctatcctagtggcccaccccctgctgcgtcagctttgagcacaacacctggaaataatggcgttcccgcccccgcagctcctccgtccgcccttggacctaaagccagtcctgcacccagccacaactcaggcactcccgccccttacgctcaggcggtggcaccacctgcaccaagcgggcccagtacaacacaacctagaccccctagcgtccagccatctggcgggggcggaggcggatccggtgggggcgggtccagctcatcttcgaactctagcgctggcgggggggcaggaaagcaaaatggcgcaactagttattctagtgtcgttgctgatagccctgccgaggtggccttatcaagctctgggggcaataacgcgtcctcacaggccctaggccccccgagcgggcctcacaatcctcccccatccacaagcaaagagccttccgctgccgcccccacaggtgctgggggagtggctccggggtccggaaacaattctgggggaccttcgctgctagtgcccctgcctgttaacccgcctagtagtccgacaccatcgttctctgatgcaaaggcagccggcgccttactgaacggccccccgcagtttagcacagcgcccgaaatcaaggcccctgagcccctgtccagtctgaaatcgatggccgagcgggcagcaatctcaagcgggatagaagatcctgtgcctaccctccatcttacggaacgggacataatcctgtcgagtacttctgcaccaccggcgtctgcccagcctccgctccaactgtccgaagtcaatatccccttgtccctgggcgtgtgcccgttggggcctgttcctctgaccaaagagcagctatatcagcaggcaatggaggaggccgcatggcatcacatgccacacccgtctgactcagagagaatccgccagtacctgccacgaaatccttgtccaacgcccccttaccatcaccagatgcctccaccacatagtgacactgtagagttttaccaaaggctgtcaacagagacgctgttctttatcttttactatctcgaagggactaaggcacaatatctggccgcgaaagccctcaaaaagcagtcatggaggttccacaccaagtatatgatgtggttccaacggcatgaggaacccaagacgattacagacgagttcgagcagggtacatatatttacttcgattacgagaaatgggggcagaggaagaaagagggttttacattcgagtatagatatctggaagatagagacttacaatag

SEQ ID NO: 180558 - DNA, 2262 bp, Artificial Sequence
  derived and/or modified sequence
atggccgacaagcggaagctccaaggcgaaatcgacagatgtttaaagaaagttagcgaaggggttgagcagtttgaagacatatggcagaagctgcataacgctgccaatgctaaccaaaaagagaagtatgaagccgatctgaagaaagagattaagaaactccagagactccgagaccagattaagacgtgggtggcttctaacgaaattaaggataaaagacagctcatcgataaccgcaagctcatcgagactcagatggagcggtttaaagtcgttgagcgtgagacaaagacaaaagcctattccaaggagggcctgggcctcgcccaaaaggtcgacccagctcaaaaagaaaaagaggaggtaggtcagtggctgaccaacacgatcgatactctgaatatgcaggtggaccagttcgaatcggaggtagagagcctctcagtccagacgaggaagaagaagggtgataaagataaacaagataggattgaaggcttaaaacgccacatagagaagcaccgctaccacgttcgaatgctggagactattctcagaatgctggataacgacagcattctggtggatgccatcaggaagattaaagatgatgttgagtattatgtggactccagccaagaccccgacttcgaagagaacgaatttctgtacgacgacctggatcttgaagatatcccacaagctctggtcgcaactagtccaccatctcattcacacatggaagacgagatctttaaccaaagcagctcaacccctacctctaccacgtcatctagtccaattcctccgtcacccgctaattgcacgacagaaaactctgaggacgataagaaacgcggcaggagcacagactccgaagtgagccagtctcctgccaaaaacggatccaaaccggttcattcaaatcagcacccgcaaagccctgctgtgcctccaacttatccctcaggacctccacccgctgctagtgcactctccactaccccagggaacaacggcgttccagcgccggccgctcctccaagcgcgctgggccctaaggcctcgcctgctcctagccacaattctgggacaccggctccatatgcacaggctgtggcacctccagccccctccgggccgagcaccactcagccccggccaccatccgtgcagccaagcggcggaggtggagggggctccgggggtggtgggtctagtagttcaagcaactcatccgccggcggaggtgcagggaagcaaaacggtgcaaccagttactcaagtgttgtcgccgatagtcctgcggaggtagctctctcttcatcgggagggaataacgcatcctctcaagctctcgggcccccttcaggccctcacaatcccccgccatctacctccaaggagccatcagctgctgcgccgacaggtgcagggggggtcgctcccggctccggcaataactccggcggtcccagtctcctggttccactaccggtgaaccccccatcttctcccacacccagttttagtgacgccaaggctgcgggcgctcttctgaacggccctccccaattttctaccgcacctgaaattaaggcccccgaacccctgtcatcactgaaatccatggccgagcgcgcggccatttcctctggtatcgaagatcctgtgcccacactgcacctgaccgagcgggatatcatcctctcttctacttccgcccctccggctagcgctcaacctcctctgcagctgtcagaggtgaatatccccctgagcctaggcgtttgtcctctcgggccagttcccttaacgaaggagcagctttaccaacaagctatggaagaagcggcatggcaccacatgcctcatcccagcgatagcgaaagaataaggcaatacctgccacgtaatccctgtcctacacccccataccatcatcagatgcctcccccccactcagatacagtcgagttttatcagaggctgagcacggaaacactatttttcattttctattatctggaaggcaccaaggcacagtatttagcagcaaaagctctgaagaagcagtcctggcgctttcatactaagtatatgatgtggtttcagcgccacgaggaaccaaaaacaatcaccgatgagttcgaacagggtacttacatttatttcgactacgagaaatggggccaacgtaagaaggaggggtttacatttgagtaccgatacctggaggatcgggatctgcagtag

SEQ ID NO: 180559 - DNA, 2262 bp, Artificial Sequence
  derived and/or modified sequence
atggccgacaagcggaagctgcagggcgagatcgaccggtgcctgaagaaagtttcagagggggtggagcagtttgaggacatatggcaaaaattgcacaacgcagctaacgccaatcagaaggagaagtacgaagcggacttgaaaaaagaaattaaaaaattgcagcggctcagggatcagatcaagacgtgggtcgcctccaacgaaatcaaggataagaggcagctaatcgacaaccggaagctcatcgagacgcaaatggagcgcttcaaggtcgtcgaacgagagaccaaaactaaagcatactccaaggaaggcctgggcttggcccagaaagtcgatcccgctcaaaaagagaaggaagaggttggtcagtggctgaccaacactattgacaccctgaatatgcaggtcgatcaatttgagagcgaggttgaatcactcagcgtgcagactcgcaagaaaaagggggataaagataaacaagacaggatcgaaggattaaagagacacatagagaagcacagatatcacgtgcgtatgctagagaccatcctccgcatgctggataacgacagcatactggtcgacgccatccggaaaatcaaggacgacgttgaatattacgtcgacagttcccaggacccggattttgaagagaacgaatttctgtatgacgacttggacctggaggatattcctcaggcccttgtggccacctctccgccctctcactcccacatggaggatgaaatctttaatcagtcctcttcaaccccaacctccacgacatccagttctccaatcccaccttcaccagctaactgcacgacagagaactctgaggatgacaaaaagcggggtcgctccacagactcagaggtgagccagagtccagccaagaacggcagcaaaccagtgcacagcaatcagcatccccagagtcctgcagtgccccccacctatccttccggaccaccccctgccgccagtgccctgtccactacgcccggaaacaacggggtgccggcgcccgccgcccccccaagcgccctgggccccaaggcaagtccggccccctcccacaatagcggcactcccgctccctacgcacaggctgttgcaccccccgcaccatcaggaccctcgacaacgcagcccagacctccctcggtccagccctccggcggcggaggagggggcagtggcggtggtggtagcagtagcagctcaaactcttcggccgggggcggcgctggaaagcagaatggagccacaagttattccagtgtggtggccgactcacccgccgaggtggccctgtcaagttccggcgggaataacgcctcaagtcaggccctgggcccccccagcgggccccataacccgccaccgtcaacctctaaggaaccatcagctgccgcacctactggcgcagggggcgtagcacccggctctggcaataattcgggcgggccatctctgctggttcctctgccggtaaatccccccagtagccctaccccttcattttctgacgccaaagcagctggggccctgctcaatgggcccccccagtttagcacagcgcctgagattaaagctcctgaacccctgtcgagcctaaaatccatggcagaacgagccgccatatctagcgggatagaggatccagtgccaacactgcacctgaccgagcgagatattatcctgagttccacctcagcacctcctgcctcagctcaaccacctctccagctgtctgaagttaatatccccctatcactgggggtatgtcctctcggtccagtgcccctgacaaaggagcagctctaccagcaagcaatggaggaggccgcttggcatcacatgccacaccccagcgactctgaacggattcgtcaatacctcccacgaaacccatgtcctacccctccatatcatcaccagatgccaccaccacacagtgacactgtagaattctaccagcggctttccactgaaacccttttttttatattttactatcttgaaggcacgaaagctcagtacttggctgcgaaagcactcaaaaagcagagctggcggtttcacacaaaatacatgatgtggttccaaaggcacgaggagccgaagactatcacagacgaattcgagcaggggacctacatttactttgactacgagaagtggggtcagcgtaagaaagaaggcttcacgtttgagtacaggtacttggaggaccgcgacctccagtag

SEQ ID NO: 180560 - DNA, 2262 bp, Artificial Sequence
  derived and/or modified sequence
atggccgacaagcggaagctgcagggcgagatcgaccggtgcctgaaaaaagtgtcggagggtgtggaacaattcgaggatatctggcaaaaactccataacgccgccaatgctaaccagaaggaaaaatatgaagccgatctgaaaaaggagatcaaaaagctccagaggttgcgggatcaaattaaaacttgggtcgcgtctaatgaaattaaggataaaaggcagcttatcgataacagaaaactcatcgagactcagatggagcggttcaaggtggtagaaagggagaccaaaactaaggcgtactccaaggagggactgggactggcccagaaggtcgatcccgcccaaaaagagaaggaagaagttggtcagtggctaactaacacaatcgatacattgaacatgcaggtcgaccagtttgaaagcgaggtggaatccctgtctgtgcagactagaaagaaaaagggggacaaggataagcaggataggatagagggtttgaagaggcatatcgagaagcatcgttatcacgtgaggatgttggaaacaattctgaggatgctggacaacgatagcatactagtggatgccatcagaaagatcaaggatgacgtggagtattatgtcgactcctctcaggatccggattttgaggagaacgagttcctctatgatgatctcgatctagaggatataccgcaggctctagtagccacttcacctccaagtcactcccacatggaagacgagatcttcaaccaatcatcaagcacacctaccagcacaactagttcaagtccaatccccccctctcccgccaactgcacaactgaaaatagcgaagatgacaaaaagcgtgggcgaagcacagattccgaagtctcacaatccccagctaaaaatggatctaagccagtgcatagcaaccagcacccacaatccccggctgtgccacctacgtacccatctgggccacctcctgcagcttcagccctctccaccactccagggaataacggggttcctgcacctgccgcgcccccaagcgccctgggccctaaagcatcccctgccccttctcacaactcaggcacccccgcgccttatgcacaggccgtcgcaccacctgcaccgagtggcccgtcaacgactcagcccaggccgccttccgtacagccttccggtgggggcggtggaggaagtggtggtggcgggtctagtagcagctcgaactcatcagccggtggaggcgctggaaagcagaacggagccacctcttactcctctgtcgtcgccgacagccccgccgaggtggctctttctagctctggtgggaataacgcatcctcccaagcgctggggccgccatcaggcccacataacccgcctccctccacatccaaggaaccctcagcagccgcaccaacgggcgccggcggtgtcgcccctggatctggtaacaacagcggcggtccctcacttctggtgcctcttcctgtgaaccctccctccagtccaaccccctcattttcagacgccaaggccgctggggctctgcttaacggccctccccagttcagcacagcacctgagataaaagcccctgagcctctgagcagcctgaagtccatggccgaaagagctgctatatcaagcggtatcgaagatccagtaccaaccctgcatctgacggagagggatatcattctgagctctacatctgcaccaccagcctccgcccagccacccctgcaattaagcgaagtgaacataccattatcccttggggtttgtccgctgggccccgttcccctcactaaggagcaactgtaccagcaggcgatggaggaagctgcctggcaccacatgccacatccgtcggactccgagcggatcaggcaatacttgccaaggaatccctgtccaactccgccatatcaccaccagatgccgccacctcattccgacacagtggaattttatcaacgactgagcacagagacgctgtttttcatcttttattatctagagggcaccaaggctcaatacctggcggccaaggcactcaaaaaacaatcttggcggttccacaccaagtacatgatgtggttccagcggcatgaggaacccaagacgattaccgacgagttcgagcagggcacatacatatactttgactacgagaaatggggccagagaaagaaagaggggttcacttttgagtatcgctacctggaggacagggatctgcagtag

SEQ ID NO: 180561 - DNA, 2262 bp, Artificial Sequence
  derived and/or modified sequence
atggccgacaagcggaagctgcagggcgagatcgaccggtgcctgaagaaagtgtctgagggagtagagcagttcgaagacatttggcagaagttacataatgcggcgaatgccaatcagaaggagaagtatgaggctgacttaaagaaggagatcaagaaattgcaacggctgagagatcagataaagacatgggtcgcttccaatgagataaaagacaagcgacagctgatagataacagaaaactcattgaaacacagatggagagattcaaggtggtggaaagggagactaagacgaaggcttattcgaaagagggcttgggtttagcgcagaaggtggatccggcccagaaagagaaagaggaggtggggcagtggctgaccaacactattgataccctgaatatgcaggtcgaccagttcgaatccgaggtcgagtccctgtcggtgcaaacaagaaaaaagaaaggagacaaggacaaacaagacagaatcgaggggctgaagcgtcatatcgagaagcatcgctaccacgtgcggatgctggagacaatattacggatgttggacaatgattccatcttagtagatgcgattagaaaaatcaaggatgacgttgaatattacgttgactctagccaggaccctgacttcgaggaaaatgagtttctttatgatgacctcgacctcgaagacatcccacaggctttggtggcaacctccccaccttcgcactcacatatggaagatgaaatcttcaatcaaagcagtagcacacccacttctacaacatcaagttctccaatcccaccgagtcctgccaattgtacaactgagaattcagaggatgacaaaaagcggggacgaagcactgattcggaagtgagtcagtcacctgccaagaacggaagcaagcctgttcacagcaatcaacatccccagtcaccggccgtaccgccaacatatccgagcggcccccccccagccgctagtgcactgagcaccacgcccggcaataacggcgtgcccgcccccgctgcccctcctagtgcgctgggccctaaagcctcacccgctccctcccacaattctggcactccagctccctacgcccaagccgtggccccaccagccccaagtgggccatctacaacccagccaaggcctcccagtgtgcagccctccggcggcggcgggggaggatctggaggaggaggaagtagttcttcatctaattcatcagcggggggaggagcaggaaaacagaatggtgctacatcttacagcagcgtggtcgccgatagtccggccgaggtagcgttgtcatccagtggaggcaacaatgcttcatcacaggctctcggcccgccatcaggcccccataatccgccaccctcaacttcaaaggagccttctgcggcagcaccaaccggcgcgggaggggtcgctcccggctccggtaataattcaggaggtccgagcctcctggtccctctgccggtgaaccctccatcttctccaaccccttctttctctgatgccaaagccgccggggctctgctgaatgggcctccacagttctccaccgcccctgagataaaggctccggaacccttgtccagcctgaaatccatggccgaaagggccgccattagctctggtatcgaggaccctgtacctacacttcatttaaccgagagagacatcatcttatccagcacgtccgcccccccagcctctgcgcagcccccactgcagttatcagaggttaacatcccgctgagtctgggagtgtgcccccttggaccggtccctttgacaaaggaacagctgtatcagcaggcaatggaggaggccgcttggcatcacatgccccacccaagcgactctgagaggataaggcagtatctgcctcggaatccttgtcctacacccccctaccaccaccaaatgccgcctcctcacagcgacaccgttgagttctaccagagactaagcacggaaacattgttctttattttctactatctcgagggaacaaaggcccaatacctggcagcaaaagctcttaagaaacaatcttggcgctttcacaccaaatacatgatgtggttccagcgacacgaagaaccgaaaacgattaccgacgaatttgaacagggcacctacatctacttcgattatgagaaatggggccagagaaaaaaggaggggttcacgttcgaatatcgctaccttgaggatcgtgacctacagtag

SEQ ID NO: 180562 - DNA, 2262 bp, Artificial Sequence
  derived and/or modified sequence
atggccgacaagcggaagctgcagggcgagatcgaccggtgcctgaagaaagttagcgaaggcgttgagcaatttgaggacatatggcagaagttgcacaacgcagctaacgccaaccagaaggagaaatatgaggctgatctaaagaaagagattaaaaagctgcaaaggcttagagaccaaatcaagacatgggtggcttcaaacgagataaaggacaaaagacagttaattgacaataggaagctgattgaaacccagatggagagattcaaagtcgtcgaacgcgagaccaaaaccaaagcttactctaaagagggactaggattggcgcaaaaggtcgatcctgcccaaaaagagaaagaagaggtcgggcagtggttgactaacacaatcgacaccctgaacatgcaggtggatcagtttgaatccgaagtggaatcactctctgttcagactcggaagaagaagggcgataaagataagcaggatagaatagaaggcctaaagcgacacatagaaaaacacaggtatcatgtccggatgctcgagaccatactgcgtatgcttgataacgacagcatcctcgtggatgccatacggaagataaaggatgacgtggaatattatgttgactcctcacaagacccagactttgaagaaaatgagttcctgtacgacgatctcgacctcgaagatatccctcaagctctggtggcgaccagccccccctcacattcccacatggaagacgaaatattcaatcagtcttcatcaacccctacgagcaccacatctagtagcccgatccctcctagccctgccaattgcacaacagaaaactcggaagacgataaaaaaagaggaagaagcaccgacagtgaagtgtctcagtcacctgccaagaacgggtccaagcccgtgcatagcaatcaacaccctcaatctccagcggtgccgccaacctatccatccggacccccacccgccgcctcagctcttagtacaaccccagggaacaacggggtgccagctccagctgcgcctcctagcgcgctgggacccaaggcgtccccagccccctcacataacagtggaacacccgcgccctatgcgcaggcagtggcgccccccgccccatcagggcccagtactacccagccgaggccaccaagcgtgcagccctccggaggcggcgggggaggatctggcggcggcgggagctcctcatcttctaattcttcagccggaggtggggccgggaagcaaaatggtgccacaagctatagcagtgttgttgccgacagtccggctgaggtggcactgagctcctcaggggggaataacgctagttcccaggcactaggcccacctagtggtccgcacaacccaccgccaagcaccagcaaagagccttcagctgctgcccccactggggctgggggtgtggcacctggatccggcaataacagcgggggaccatccctgttagtgccgctaccagttaatcctcctagtagtcctactccctcctttagcgacgcaaaggcggctggagcactgctgaatggacccccacaattctccactgctcccgaaatcaaggcaccagagccactctcatcgctgaagtccatggccgaacgagcagcaattagctcaggtatcgaggaccctgtgcctaccttacacctgaccgagagggacattattctgtccagcacatccgctcctcccgcatccgcccagccgccactccagttatccgaagtgaacatccctctcagtctcggagtgtgccccttgggtcccgttcccctgaccaaagagcagctttatcagcaggccatggaggaggccgcctggcaccacatgccgcacccttcagattccgaaaggattcgccaatatctgcctcgtaacccatgccccacaccaccttatcatcatcagatgcccccacctcactcagacactgtggagttctatcaacggttgagcacagaaacactcttctttattttctactacctggagggcactaaagctcagtatttagcagccaaagccctgaagaaacagtcatggagattccatactaaatacatgatgtggttccagcgccatgaagaacctaaaacaatcaccgacgaattcgagcaaggaacctacatctattttgactatgagaagtggggccagagaaagaaagagggattcacattcgagtatcggtacctcgaagaccgcgacctccagtag

SEQ ID NO: 180563 - DNA, 2262 bp, Artificial Sequence
  derived and/or modified sequence
atggccgacaagcggaagctgcagggcgagatcgaccggtgcctgaagaaggtgagcgagggagttgagcagttcgaagatatttggcagaagctgcacaacgccgccaacgctaatcaaaaggagaaatatgaggccgacctgaagaaagagattaaaaagcttcagaggctgcgggatcagataaagacatgggtggcgtccaatgaaattaaagataagagacaactgattgataatagaaagctcattgagacccagatggagcgctttaaagtggtggagagggagacaaaaacaaaagcttatagtaaggaagggctgggtctggcccagaaagtcgatccagcccagaaagaaaaagaggaagtcggccagtggctgacaaataccatcgatacacttaacatgcaggtcgaccagttcgaatccgaggtcgagtccctcagtgttcaaacacggaagaaaaaaggtgacaaagataagcaagaccgaattgagggcttgaagcgccatatcgagaaacatagatatcatgtgcggatgctggaaacaatcttgaggatgttagataatgattccatcctagtagacgcaataagaaaaataaaagacgatgtggaatactatgtggattcatcgcaggatcccgacttcgaggaaaatgaattcctgtacgacgatctggacctagaggacattccccaagctctggtcgcaacatcccctcctagccactctcacatggaagatgagatctttaatcaatcctcgtctacaccaacgtcaaccacatccagtagcccgattccgcccagtcccgccaactgcaccacggagaattcagaggacgacaagaagagaggtagatccactgatagcgaggtaagccagtccccagctaagaatggatccaagcctgtgcactctaaccagcaccctcagagtcctgcagtgcctccaacctacccgagcggacctcctcctgccgcctcggccctgtccaccactcctgggaataatggggtccctgcccccgccgcaccaccttccgcccttggtcctaaggcttctcccgcccccagccataattctggcacacctgccccttatgcccaagcagttgccccccctgcccccagcggtccctctactactcaacccagacctccatctgtacagccatctgggggcggcggaggggggtcgggtggtggcggcagctccagctccagcaacagctccgccgggggcggagccggtaagcagaatggcgctacctcgtattcatcagttgtggcagattctcctgccgaggtcgctctgtctagttccggcggcaacaatgcctcctcccaggccctgggaccgccctctggcccccataacccacctcccagcacttcaaaagagccatcagccgcagcccctacaggagctggtggagttgcaccaggttcaggcaataactctggtggaccctcactgctcgtcccccttcccgtgaatcctcctagctcccccactccttctttctccgatgctaaagctgctggggcactgctcaacgggcccccacagtttagcacagcaccagaaattaaagctcccgaacctctgagctctttaaaatccatggcggaacgtgccgcaatctcttcaggaatagaagatcccgtccccactcttcatttaaccgagagggacatcatcttatccagcacctccgcaccaccggcttctgcccaacctccccttcagctaagtgaagttaatattcccctaagtttgggtgtttgcccactgggccccgtgcccctaaccaaagaacagttgtaccagcaggctatggaggaagcagcttggcaccatatgccccatccaagtgacagtgagcgcatcagacagtacttgcctagaaatccatgcccaacccctccctaccatcaccagatgcccccaccccactccgacaccgtggagttttatcagaggcttagcaccgagaccctctttttcattttctattatctagagggcactaaagctcaataccttgcagccaaggccctcaaaaagcagagctggcgctttcatacaaagtatatgatgtggtttcaaagacacgaggaaccaaagaccatcacagacgagtttgaacagggcacctacatctacttcgactacgagaagtggggtcaacgaaagaaggagggtttcaccttcgaatacagatacctggaggacagggatcttcagtag

SEQ ID NO: 180564 - DNA, 2262 bp, Artificial Sequence
  derived and/or modified sequence
atggccgacaagcggaagctgcagggcgagatcgaccggtgcctgaaaaaagtcagcgagggtgtcgagcagtttgaggatatctggcaaaaattacacaatgccgcaaacgcaaaccagaaggagaaatacgaagccgaccttaagaaggagatcaaaaaactgcaacggctcagagatcaaatcaaaacctgggtggcgtctaacgaaattaaggataagcggcaattaattgacaatagaaaattgattgaaacacagatggagaggtttaaagtcgttgaacgcgaaaccaaaacgaaggcgtacagcaaggagggtctgggcctcgctcagaaagttgatcctgctcagaaggagaaagaggaggtcggccaatggcttaccaacacaatcgataccctcaatatgcaggtggatcaattcgagtccgaggtggaatccttgtcggtccagacacggaaaaagaaaggagataaagacaagcaggatcgaatagaaggacttaaacgccacattgaaaaacacaggtaccatgttcgcatgctagaaacaatcttgaggatgctcgataacgactctatcctggtggatgcgatccggaaaataaaggacgacgtggaatattacgtcgatagctctcaggatcctgacttcgaagaaaatgaatttctgtacgacgatttggatctggaagatatcccacaggcattggtggctaccagccccccaagtcacagccacatggaggacgagatttttaaccagtcctcaagcacaccaacaagcaccactagttctagcccaatacctccaagtccggctaactgtacaaccgaaaattctgaggatgacaaaaaaaggggaagaagcacggactcagaagtgagccagtctcccgccaagaatgggtctaagcccgtccattctaaccagcacccgcagtctccagccgttccccctacctacccgtccggtcctccccccgcagcatcagccttgagcaccacaccagggaacaatggcgttcccgcccctgctgctccacccagcgcactgggaccaaaagcaagccccgctcctagccacaattcgggcactcccgcgccttatgcccaggctgtcgccccacccgcccctagcggaccgtccaccacacagcctcgccccccgtccgtccaaccctctggcggaggaggaggcggaagcggtggcggaggatcctcaagctcaagcaacagctctgcaggagggggcgctggtaagcagaatggggcgacaagctattctagcgtggtggcggactcaccagcagaagtggccctcagttcatcgggcggaaacaacgcatccagccaggcgctgggacctccctccggaccacataatccacctccgagtaccagcaaggagcccagtgctgccgctccaaccggagcaggcggcgtcgcccccgggagtggcaacaatagcgggggcccctctctgctggtgccattgcctgttaatcctcccagcagcccgacccctagcttttctgacgctaaagcggctggtgcactgttgaacggacctccccagttctctaccgcacccgaaatcaaagcacctgaacccctgtcctctctcaagtccatggctgaaagggctgctatcagcagcgggatagaagatcctgttcccacactacatcttaccgagcgtgacatcattctatctagcaccagtgcaccacccgccagcgctcagccacccctccagctcagcgaggttaatatcccactgagtcttggtgtctgcccactggggcctgtgccactgactaaggagcagctgtaccagcaagccatggaggaagcagcctggcaccacatgccccacccctcagacagcgagcgtattaggcagtacctgcctcgaaatccctgcccaactcccccctaccaccaccagatgccacctccgcactcagacaccgtggagttctatcagcgattgtcaaccgaaacactcttcttcattttttactatctggaaggaaccaaggctcaatatttagccgccaaggccttgaagaagcaatcctggagatttcacaccaagtacatgatgtggttccagagacacgaggaacccaaaacgatcactgacgagttcgagcagggcacgtacatctattttgactatgaaaagtgggggcagcggaaaaaggagggttttacgtttgagtaccggtacctggaagatagggaccttcagtag

SEQ ID NO: 180565 - DNA, 2262 bp, Artificial Sequence
  derived and/or modified sequence
atggccgacaagcggaagctgcagggcgagatcgaccggtgcctgaagaaggtaagtgaaggtgtcgagcaattcgaagatatatggcaaaaactgcataatgccgccaacgctaaccagaaggaaaagtatgaggccgacttgaaaaaggagatcaaaaaactgcagagactgcgagaccagatcaaaacctgggtggctagtaatgaaattaaggacaaacggcagttaatagacaatcgcaagctgatcgagacacaaatggaaaggttcaaagtggttgagcgagaaacaaaaacaaaggcatactccaaggaaggccttgggctggcccaaaaggtggacccagctcagaaagagaaggaagaggtgggccaatggcttacaaataccatcgataccctgaatatgcaagttgatcaattcgaaagcgaagttgagtctttatcagtgcagacaaggaagaagaagggggacaaagacaaacaggatcgcatcgaaggactaaagagacacatcgaaaagcacagatatcacgttcgtatgctcgaaaccatactgagaatgttggataatgactctattcttgtggatgctatccgaaaaattaaggacgacgttgaatactatgtagattcctcgcaggaccccgactttgaggagaatgaattcctgtacgacgatttagaccttgaggacattccccaggctctcgtggcgacctctcccccttctcatagtcatatggaggatgaaatctttaatcagagttcttcaacaccaactagtaccacctcctcttctccaattcctcctagtcccgcgaactgcaccactgagaattctgaggacgataagaaaaggggacgaagtactgactctgaagtcagtcaaagtcccgctaagaacggctcaaaaccagtacacagtaatcagcacccacagtcaccagccgtgccccctacatatccgagtgggcctcctcctgccgccagcgctctgtccactacgcctggcaataatggcgtcccagcccctgctgccccgccctcagctctggggccaaaggcgtccccagccccatcccataatagcggtacacctgctccatacgcccaggctgtggcacccccggccccctctggcccttcaactacacagccacgcccaccatccgtgcaaccatccggggggggcgggggtgggtcaggaggtggagggagctcttctagcagcaactcaagcgcaggagggggggcgggcaaacagaacggagcgacttcttatagctctgtcgttgccgactcacctgcagaggttgccctatccagctccgggggaaataatgctagcagtcaagctctcggtcccccttctggccctcacaaccccccacccagtacaagcaaggagccaagtgcagctgccccaactggtgccggcggagtcgcacctgggagcggaaacaatagcggtgggccttcattacttgtgcctcttccggtaaatccccccagctctcccacgcccagcttttcagatgcgaaagctgcaggcgcactcttgaatggtcctcctcagttctcaactgctcccgagataaaagccccagaacctcttagttcccttaaatcaatggcagaaagagctgccatctccagcggtattgaggatcctgtgccaaccttgcatcttacggagcgggacataatcttaagctcaacctccgccccccccgctagcgcacagccaccactgcagctttcggaggtcaacatccctctgagtctgggcgtttgtccactcggcccagttcctttaacaaaagaacaactgtatcagcaagctatggaggaggccgcatggcatcacatgccacatccgtccgatagcgaacgaatccgccagtacttgccgcggaatccatgcccaacaccaccataccatcaccagatgccacccccccatagcgacaccgtcgagttttatcagcgactctccactgaaactttattcttcattttctactacctggagggcacaaaagcccagtacctggcagccaaagctctcaaaaaacagtcctggagattccacacgaaatacatgatgtggttccagcgtcacgaggaacccaaaacaattaccgatgagtttgagcaaggtacttacatttattttgactacgaaaagtggggccagcgcaagaaggaaggttttactttcgagtatcgttacttggaagatagggaccttcagtag

SEQ ID NO: 180566 - DNA, 2262 bp, Artificial Sequence
  derived and/or modified sequence
atggcagataagcgcaagttacagggggaaatcgatagatgcttaaagaaggttagtgaaggggtagaacagtttgaggatatctggcagaaactccataacgctgcgaacgctaaccagaaggagaagtacgaagccgacctgaagaaagagatcaaaaaactccaacgccttagggaccagatcaagacttgggtcgcgtccaacgagatcaaggacaagcggcagctcattgataaccgaaagctaattgaaacccagatggagcgctttaaggtggttgaacgggaaacaaagactaaggcttattcaaaggagggtctgggcttggcccagaaggtggatcccgctcagaaagaaaaagaggaagtaggtcagtggctgacaaacaccattgatactctgaatatgcaggtcgatcagtttgagtccgaggtcgaatccctgtccgtgcagacccggaagaagaagggagataaggataaacaagatcgcattgagggtcttaagcgacatatcgaaaagcatcgctatcacgttcgtatgctggagacgattctcagaatgctggacaatgatagcattctcgtggacgctatccgaaaaatcaaagacgacgtggagtattatgtggacagttctcaggaccctgatttcgaagagaatgagtttctgtacgatgacctggacctagaggacatcccccaggctttggtggctacctctccgccaagtcatagccacatggaagatgaaatcttcaatcagtcaagcagtactccaaccagcacaacgtccagcagcccaataccccctagcccagccaactgcactaccgagaattctgaagatgacaaaaagcgcggacgatccacagacagcgaggtctcccaaagccccgcaaaaaacggttccaagcccgtgcattcgaaccaacacccccagtctcctgcagtcccaccaacgtacccttctggcccacctcccgctgcctcagccttatccaccacgccagggaataacggtgtcccagccccagctgctccaccttcggctctggggcctaaggcctctcctgcacccagccacaactcaggaaccccggctccttacgcgcaggccgtcgcaccacctgccccatccgggccttctaccacccagcccaggccaccaagcgtgcagccgtccggtgggggaggaggcggatccgggggtggcggttccagtagctcatcgaattctagcgccggtggcggagctgggaagcagaacggcgcaactagttatagtagcgtcgttgctgattcgcctgcggaggtcgcactgtcctccagtgggggaaacaatgcatcttctcaggcattgggtcctccaagcggccctcataaccctccccctagcacatccaaggagcccagcgccgctgcgccaactggcgcaggcggtgtcgctcccggttctgggaataatagtggaggaccaagtttattggtccctctcccagtgaatccaccctcaagccccactccatctttctccgacgccaaggccgctggggcattgctcaatggccctcctcaattctctaccgccccagaaattaaggctcctgagccgctctcctccctgaaatctatggctgaacgcgctgctatttctagcggaatagaagacccagtccccacactccatctaaccgagcgagatattattctgtcaagtacatcagccccacccgctagtgctcaacccccactgcaactgagcgaggtgaatatccccctctctctgggtgtgtgtcctttaggccctgtgcccctgactaaggagcaactttatcaacaggctatggaagaagccgcttggcatcatatgccccaccctagcgattcagagcgtatccgacagtacctgccacgcaacccttgccccactccgccatatcaccatcagatgccccctccgcatagcgataccgttgagttctaccagcgcctatctacagagacgctctttttcatcttctactatctggaaggaacaaaggcccagtacctggcagctaaggccctcaagaagcagagctggcggtttcacaccaaatacatgatgtggttccagcgacacgaagagccgaagacaattactgatgagtttgagcaggggacttatatttattttgattacgagaagtggggccagagaaaaaaggagggatttacctttgaatatcgctatctggaggatcgggaccttcaatag

SEQ ID NO: 180567 - DNA, 2262 bp, Artificial Sequence
  derived and/or modified sequence
atggcagacaagaggaagttgcagggcgagattgatagatgcctcaagaaggtgagcgagggtgttgaacaattcgaggatatctggcaaaaattacataatgccgcaaatgctaatcagaaagagaaatacgaagccgacctcaagaaggaaatcaagaaattacagagactgagagatcagataaagacttgggtagcttcaaatgagatcaaggataagcgccaactgatagacaacaggaaactgattgaaacacagatggagagattcaaagtagtcgagagggagacaaagactaaagcatactccaaagagggtctcggcctagcccaaaaagtcgacccagctcagaaggagaaagaggaggtgggacagtggctcacaaataccatcgataccctgaatatgcaggtcgaccagtttgagagcgaggtggagtccctaagtgtgcaaactcgcaaaaagaaaggggataaagacaagcaagatagaatagagggcctgaaacgtcatattgagaaacatcgataccatgtacggatgctggagactatcctgcggatgctggataacgattcgattctcgtggatgcaatccggaagattaaagacgacgtggagtattacgtcgattctagtcaggaccctgatttcgaggagaacgagttcctgtacgatgatttagacttggaagatatcccacaggcacttgtcgctaccagccctccatcccattctcatatggaggatgagattttcaatcagagcagctcgacgcccaccagcactacgagctcgtcgcctattccaccatcacccgctaactgtacgactgagaactcggaagatgacaagaaaaggggtcggtctactgacagcgaggtctcacagagtccggcaaagaacggaagtaagcccgtgcatagtaatcagcatccacagagtcctgccgtgccgcctacctatccatcgggtcctcccccagctgcaagtgcactcagcacaacccctggtaacaacggcgtgcccgctcctgccgctcccccttcggctttggggcctaaagcaagtccagcaccctcacataattctgggactcccgcaccctatgcgcaagctgtcgctccaccggctccatcaggtcctagcacaacccagcctcgacctccaagcgtgcaaccttccggcggaggcggagggggaagtggcggtggtggatcctcttcctcgtcaaattcttcagccggaggtggcgctggaaaacaaaatggggcaacctcatactcctccgtggtggccgattctcccgcagaggtggccctgagctctagtgggggaaacaatgccagtagccaagccctagggcctccatccggaccacataaccctcctccgtctacgtcgaaggaaccatccgccgcagcaccaaccggtgccggaggtgtagcacccggatcagggaacaattcgggagggccttccctcttggtaccgttgcccgtaaatccacccagttctcccacccctagtttcagcgatgccaaggcggctggggctctgctgaacgggccaccacagttttccacagcacccgagataaaggcccctgaaccgctgtcctcattaaagagcatggctgagagagccgcaattagtagcggaattgaggaccctgtccctaccctgcacctcactgagcgagatataattctatctagcacttctgctcccccagcctccgctcaacccccacttcaactctcggaggtgaacatcccgctgagcctgggagtgtgtcccctgggacctgtgcccctaaccaaggagcagctgtaccagcaagccatggaggaggccgcttggcatcatatgccacatcccagtgacagtgagagaatacggcagtacctgcccaggaacccatgtcccactcccccataccaccaccagatgcctcctccacacagcgacacggtcgagttctatcaaaggctctctacagagactctcttcttcatcttttattacctcgaaggcacaaaagctcagtacttggccgcaaaagcgctgaaaaagcagtcctggcgcttccataccaagtacatgatgtggtttcagcgccacgaggagcctaagaccatcaccgatgagtttgagcagggaacctatatctacttcgattacgaaaagtggggacaaaggaagaaggagggtttcacatttgagtatagatatttggaggatcgtgatctgcaatag

SEQ ID NO: 180568 - DNA, 2262 bp, Artificial Sequence
  derived and/or modified sequence
atggctgataaacgcaagttgcagggagagattgacaggtgcctcaagaaggtgagcgagggggtcgagcaatttgaggacatatggcagaaactacataatgctgcgaatgcaaaccagaaagagaaatacgaggcggatctgaaaaaggagattaagaagctccagcgcctgagggaccagattaagacctgggttgcaagcaatgagattaaggataaacggcaactcatcgataaccgaaaactaattgaaacccaaatggagaggtttaaggtggttgaacgggagactaaaacaaaagcctactcaaaggagggcttaggcttagcccagaaagtcgacccagcgcagaaggagaaggaggaggtgggccagtggttaaccaatacaatagacacgttgaacatgcaggtggatcagtttgagtcggaagtggaatctctatcagttcaaacaagaaaaaagaagggtgacaaggacaagcaggatcgaatcgaaggtctgaaacggcacatcgaaaagcatcgctatcacgtccgcatgctagaaacaatcttgcgcatgcttgataacgactccatactggtggatgcgatcagaaaaatcaaagacgacgtggaatactacgtggattccagccaggatcccgactttgaagaaaatgaattcctttacgacgacctcgatctggaggacattcctcaggcactagtggctacttccccccctagccactcccacatggaagatgagatctttaaccagtcgagcagtaccccaaccagtacgacctcctcatcccctatcccaccgtccccggctaactgtacaacagagaatagtgaagatgacaaaaagagaggtcggtctactgatagtgaggtctcccagagcccagcgaagaacggctctaagccagtgcattctaatcagcacccccagtcccctgccgtgcctcctacctatccaagtgggcctcccccagcagctagcgccctttctaccaccccagggaacaatggggttccagctccggctgcgccaccatcagctctgggcccaaaggcttctcccgctccgtctcataattctgggactcccgctccctatgcccaagcggtggccccaccagcacccagcggccctagtacaactcaaccacgccctccctccgtacagccgagtggcggaggcggaggcggaagtggaggaggcggaagttcttcctcatccaatagttctgctggcggaggagcaggcaagcaaaacggcgctaccagctacagttctgtggtggccgacagccccgctgaggttgctttaagcagtagtgggggaaataacgcatcaagtcaggcgctcggaccgccttccggcccacacaacccaccaccctccacctccaaggagccctctgctgccgcaccaacaggtgccggaggcgtcgcaccaggttccggaaacaatagtggcggaccatccttgcttgtccctttaccggtcaaccctccaagttctccaacaccaagctttagcgacgcgaaagccgcaggtgcactccttaacgggcctccacagttttcgacagcgccagagattaaagctccagagcccctcagttctttgaaatctatggctgaacgggcagctatatcctccggcatcgaagatcccgtgcctacactccacctgacggagcgcgacattattctgtcctcaactagcgcgccaccagcttcggcccagcctcctttacagctctcagaggtcaatatcccgctgtcactaggggtatgcccactcggccctgtcccactgacaaaagagcagctgtatcagcaagctatggaggaggccgcttggcaccacatgccccacccgtcagatagcgagagaatcaggcagtacttgccccgaaacccctgtcctacacccccttatcaccaccagatgcctcctccccactccgacacagtggagttctatcaaagactttcaaccgagacattattcttcatattctactaccttgagggaaccaaggcacagtatctggctgccaaagccctgaaaaaacagagttggcgatttcatacaaagtatatgatgtggtttcagcggcacgaggaacctaagaccatcactgacgagtttgagcaagggacctatatctattttgactacgaaaagtggggccaacgcaaaaaggagggtttcaccttcgaatatcggtacctcgaggacagagatcttcaatag

SEQ ID NO: 180569 - DNA, 2262 bp, Artificial Sequence
  derived and/or modified sequence
atggccgacaagcgaaaactgcaaggcgaaatagatagatgcctgaaaaaggtgtccgaaggggtagaacagttcgaggacatctggcagaaactccataacgccgctaatgctaatcagaaggagaagtacgaagccgatcttaagaaagaaataaaaaaattgcaacgactcagagaccagattaaaacttgggtcgcatccaacgagattaaggacaaacggcaactgatcgataacaggaaactaatcgagacacagatggagagattcaaagtggtcgagcgggaaaccaagactaaggcctacagcaaggaagggctaggcctcgcacagaaggtggaccccgctcagaaggaaaaggaggaagttgggcagtggctgacaaacactatcgatactcttaatatgcaggtagatcagttcgaatccgaagtcgagtcgctgtccgtccaaacacgcaaaaagaagggggacaaggacaagcaggatagaatcgagggactaaaaagacacattgaaaagcaccgataccatgttaggatgctggagacaattctgaggatgctggataacgactcaattctggtggatgcaattcgcaagataaaagatgatgtagaatattatgtcgacagtagccaggaccccgactttgaggagaatgaattcctgtatgacgatttagatctggaggacattccccaggctctcgtggccacctcgccaccaagccatagccacatggaagatgaaatctttaaccagagttcctctaccccaacctcaactacatcatcctctcctatacctccttcacccgctaattgcacaacagagaatagcgaggatgacaaaaaaagagggagaagcacggattcagaagtcagccagtcgccagcgaagaacggaagcaaacccgttcattcaaaccagcacccccagagtccagctgttccgcctacgtacccctctggaccaccccctgcagcatctgccctgagcaccacccccggtaataacggcgtgcctgcccctgcggcaccaccaagtgctctcggcccaaaggcctccccagcaccctcccacaatagcgggaccccagctccctacgcccaggccgtggcccctcccgctccgagtggacctagcactacccagcctaggccgcctagtgtgcagccatccggaggtgggggagggggatccggcggtgggggatctagctcctcctccaatagttccgcaggcggaggcgctggaaagcagaacggagccacttcgtacagtagtgtggttgcagacagcccagccgaagtggccctgtcatccagcggaggtaacaatgctagtagccaagcgctcggacctccctccgggcctcacaaccctcctccatcgacaagtaaggaaccttctgccgctgcaccaacaggcgctggaggggtcgcccctgggagcggtaacaacagcggcggaccttctctgctagtgccactgccagtgaatccaccaagctcccccactccatccttctctgacgcgaaagccgcaggagcactactgaacgggccaccacaattcagtaccgccccagagatcaaggccccagaacctctgtcatctctgaagagcatggctgagagggccgcaatttcctcggggatagaggaccctgtgcccaccctccacctgaccgagcgggatatcatcctttctagcacttccgccccacctgctagcgcccagccacccttgcaactctcagaggttaacattcccctttcgctgggagtgtgcccgctcgggcctgtccccctgaccaaggaacagctgtatcagcaggctatggaggaggcagcatggcaccatatgccccatccttcggactctgaaaggatccggcaatacctccctaggaatccttgccccacccccccatatcaccaccagatgccacctccccatagcgatactgtggaattttaccagcggttatcaaccgagactctattcttcatcttttattatttagagggcaccaaagcgcagtatctggcagcgaaggcgctcaagaaacagtcctggaggtttcatactaagtatatgatgtggttccagaggcacgaggaacctaagacaataacggatgaatttgagcagggcacatatatctatttcgactatgaaaaatggggccagcgaaaaaaggaaggattcacgtttgagtataggtacttagaagacagggacctgcaatag

SEQ ID NO: 180570 - DNA, 2262 bp, Artificial Sequence
  derived and/or modified sequence
atggctgacaagcggaagctgcagggagaaatcgaccgctgtctcaagaaagtttcagagggcgtcgaacaattcgaggatatctggcagaaactacataacgcggctaacgccaaccaaaaggagaagtacgaggccgatttaaagaaggagatcaagaagctacaaaggctgagagatcaaattaagacgtgggtggcctccaacgaaatcaaggacaaacgacaactgatcgataaccgcaagctgatagaaacacagatggagcgctttaaggttgtggaacgagagaccaagaccaaggcttatagcaaagaagggttaggcttggcacagaaggttgatcccgcacagaaagagaaggaggaagtgggccagtggctcacaaacaccattgataccttgaatatgcaagtggaccagttcgagtccgaagtggaatccctctctgtacaaacacgcaaaaaaaagggagataaggataaacaggatcgtattgaaggactgaagcggcacatcgagaagcaccgataccatgtccgaatgcttgaaacaattctgcgaatgctcgacaacgattccattctggtcgacgccataaggaagatcaaagatgatgtcgagtattatgtggatagctcccaggatcctgatttcgaggaaaacgagtttctgtatgacgatctggacctggaggacatcccacaggcccttgttgccacaagcccaccaagtcatagccacatggaagacgagatctttaaccagagctcttctacaccgacctccacaacgtcctcctcccccatacccccatctccagcaaactgtaccacagaaaatagcgaggacgacaaaaaacgtgggagaagcaccgactcggaagtctcccaaagtccagccaaaaacgggtctaagcccgttcacagcaaccaacaccctcagtctcccgcagtgcccccaacttaccccagtgggccacccccagccgctagtgccctgtcaactacccctgggaataatggcgttccagcgcctgccgcacccccatcagcgttgggtcctaaagctagtccagcgccatcacacaactcaggaacccccgctccttacgctcaagcggtcgctcccccagcaccgagtggaccatcaaccacacagccacgcccaccttccgtgcagccatctgggggaggcggtggaggcagtgggggtggcggaagctcttcttctagcaattcatccgccggaggtggcgcaggtaaacagaatggcgctacaagctactccagcgttgtggctgactcgcctgccgaggtggctttaagcagctctggcggaaacaacgcttctagtcaggcactcgggccaccgtccggaccccataatccgccaccctcaacctccaaggagccgtcagccgctgccccaactggtgctggaggtgttgcccctgggtctggaaacaattccgggggtccctctctgctagtgcctctgccagtgaacccacctagctcacctacaccctccttcagtgatgcaaaggcggctggtgctctgctgaacggccctccacagttctccactgccccagagatcaaagccccagaacccctgtcatcactgaagtctatggccgagcgggctgcgatttcttcaggcatcgaggacccagtgcccactcttcacctgactgagcgcgatatcatactgagcagtactagcgccccaccagccagcgcccagcccccattgcagctcagtgaagtgaatattcccttaagccttggtgtgtgtcctctagggcctgtgcctctgacaaaagaacagctgtatcaacaggccatggaagaagccgcttggcaccatatgccccacccctccgatagcgaacgtatccgccagtatctaccaaggaatccttgtccgacgccaccttatcatcaccagatgccacccccacactctgatactgtcgaattttaccagcggctcagtactgagacactgttctttatcttctattacctggaaggaaccaaagctcagtacctcgcagccaaggcactcaaaaaacagagctggaggtttcacacaaaatacatgatgtggtttcagcgccacgaggagcccaagactatcaccgacgaattcgagcagggaacatatatttatttcgactatgagaagtggggacagaggaagaaagagggattcacattcgaatacaggtacttagaagatagggacttacagtag

SEQ ID NO: 180571 - DNA, 2262 bp, Artificial Sequence
  derived and/or modified sequence
atggctgataagcgaaagctccagggagaaatcgaccgatgcttgaagaaagttagcgagggagtggagcagttcgaggacatctggcagaaactccacaatgcagctaacgcaaatcagaaggagaagtatgaagccgacttgaagaaggagatcaaaaagctgcagcgcctacgagaccagattaagacttgggtcgctagcaacgagataaaagacaaacggcagttgatagacaatagaaagcttatcgagacacagatggaacggttcaaagtggtggagcgagagactaaaacaaaggcttattccaaggagggcctggggctcgcccagaaagttgatccagcacaaaaagagaaggaggaggttgggcagtggctaaccaacactatcgacaccctgaacatgcaggtggatcagttcgagagcgaagttgaatcactatctgttcagactaggaagaaaaagggggacaaagacaaacaggacaggatcgagggcctgaaacgccatattgagaagcataggtatcacgtccgtatgcttgaaaccattctgcgaatgctcgataacgacagtatcctggtggacgcaatccgaaagatcaaagacgatgtggagtattatgtggactcctcgcaggaccctgattttgaggagaacgagtttttgtacgacgacctcgatctcgaggatatcccccaggcactggtcgcaacctcacctccttctcacagccacatggaggacgagatcttcaaccaaagttcttcaacccctactagtaccacttcaagcagcccaattcccccttctcccgcaaattgtactacagagaacagtgaagatgacaaaaaaaggggtcgctccacagacagcgaggtatcacagtctcctgcgaaaaacggaagtaagcccgttcacagcaaccagcatccccaatccccagcagtgccacctacctacccctccggcccacctccagccgcttctgccttgtcgacgacgcctggcaataacggcgtaccagcacccgctgctcctccatctgcgctcgggccaaaagcttcacccgcaccttcgcacaactcgggcacaccagccccatatgcgcaggctgtcgctccgcctgccccatcaggccctagtacaactcaacccaggccgccatctgtgcagccttccgggggaggaggcggaggctcaggaggcggtggttccagttcgtcaagcaacagctcggccggaggcggtgcaggtaagcaaaacggggcaacgagctacagctccgtcgtagctgacagcccggctgaggtcgcattgtcaagctccggtggaaacaacgcgagcagccaggcgttaggaccaccctcagggcctcacaacccacccccatctacaagcaaagagccgtccgctgccgctccaaccggcgctgggggagtggcccctggttctgggaacaactctggcggaccctccctccttgttccgcttcccgttaacccgccttccagcccaacaccaagcttttccgatgccaaagccgcaggagccctgctgaacggtccccctcagttttccaccgccccagaaatcaaagctcccgaaccgctatcctctcttaaatccatggccgagcgagctgccattagtagtgggatagaggacccagtgccgacactccatctgactgagagggacataatcctctcatctacctcagcccctcccgcaagcgcccagccacctcttcagctgtccgaggtcaatattcctctgtcattgggcgtatgccctttgggccctgtgccactcaccaaggaacaactgtatcagcaagcaatggaagaggcagcctggcatcatatgcctcaccccagcgatagcgaaaggatccgacagtacctgcctcggaacccttgtcccacacccccttatcaccaccagatgcccccaccacatagtgacacggtcgaattctatcagagactgtcaacagaaactttatttttcatattttactacttagaggggacaaaggcccagtacctggccgctaaagcccttaagaagcaatcctggcgcttccacactaagtacatgatgtggtttcagcggcacgaggagccgaagaccattaccgacgagtttgagcaggggacgtatatctactttgactacgagaagtggggacagcggaaaaaagaagggtttaccttcgagtacagatacctcgaggaccgcgacttgcagtag

SEQ ID NO: 180572 - DNA, 2262 bp, Artificial Sequence
  derived and/or modified sequence
atggctgataagagaaagttgcagggtgaaatcgataggtgtttgaagaaggtctctgagggggtcgagcaattcgaagacatttggcaaaagttgcacaatgcggctaacgccaatcaaaaggagaaatacgaagctgacctgaaaaaagagattaaaaagcttcaaagattacgtgaccaaatcaaaacgtgggtcgcctcaaacgagatcaaggacaagcggcaactgattgataatagaaaactaatagagacccagatggaacgcttcaaggttgttgagcgggaaactaaaacgaaagcatactccaaggagggcctgggtctggctcagaaggtggatcccgcacagaaggagaaagaggaggtgggacagtggctaacaaacactatagatacgctgaacatgcaggtggatcaattcgaatctgaagtcgagagcctgtcggtgcagacaagaaaaaagaagggcgacaaggacaagcaggacagaatagagggcttgaagcgacacattgagaagcacagataccacgttaggatgttggagaccattttgaggatgctggacaatgacagcattctagtcgacgctatcaggaaaatcaaggatgatgtagagtactacgtagattctagtcaggatcccgacttcgaagagaacgagtttctgtacgacgatctcgacttggaagacattccccaagcgctagtcgctactagccctcccagccacagccacatggaggatgagatcttcaaccaaagttccagtacacctacgtccaccactagctcaagccccattcccccttcgccagccaactgtactacggagaactccgaagatgataaaaaaagagggcgttccaccgactccgaggtgagccagtccccggctaagaacgggtctaagcccgtccactcaaaccagcaccctcaatctcccgcagtgcctcccacatatcccagcgggccacccccagccgcttctgctctaagcacgacccccggtaataacggggttccagcacctgctgctcccccaagtgctctgggtcccaaggcaagtcccgctccaagccacaatagtggcacccccgctccctatgcccaggcagtcgcaccccctgccccatccggcccatcgactacccagcctcgcccaccctcagttcagccctcaggaggaggtggaggtggtagcggcggaggaggaagtagcagctcatctaattcttctgccggaggcggtgcagggaagcagaatggagcaacttcctactccagcgtggtagctgatagtcccgcagaagtggccttgtcatccagcggcggaaacaatgcaagttctcaggctctcggacctccctctgggccacacaaccctcccccatccaccagcaaggaaccatctgcagccgcaccaacaggtgctggaggcgtagcgccagggtcaggaaataatagcggcggacccagcctcctagtaccactgccggttaaccctccttcgtctccaacaccttcgtttagcgacgctaaagcagctggggctctactcaacggccctccacagttttccacagccccagagattaaagcgcctgagccactgtcatcgctgaagagcatggctgagagagccgctatctcatccggcatcgaagacccggtacctacattacacctgactgaacgggatatcatcctctcctctacgagcgcacctcccgcatccgcacagcccccacttcagctgtcagaagttaacatccccctctccttaggcgtatgtccgttgggccctgtgcccttgacgaaagaacagctctatcagcaggctatggaagaggctgcatggcaccatatgccccacccatccgactccgagaggatacgccagtacttgcctagaaacccgtgtcccacacccccttatcaccatcagatgccaccccctcacagtgatacggtcgagttttatcaaaggttaagcactgagacactgttcttcatcttctactatttagaagggactaaggcgcaatacctagccgctaaggccttgaaaaagcagtcttggaggtttcataccaagtatatgatgtggttccaacgtcacgaggagcccaaaaccattacggacgagtttgaacaggggacatacatctattttgactatgagaagtggggccaaaggaaaaaagaaggattcactttcgagtacagatatctggaggaccgggacctgcagtag

SEQ ID NO: 180573 - DNA, 2852 bp, Artificial Sequence
  derived and/or modified sequence
gaagagaggaggggaggcctcctccgccgccgccatcttggaccgggcccggtcagcttccgcggagccatcggcagacgccgcggcctcccttgagccccgacccccgtcgtcagaacaaccccgggcccactcccccaaccccacttccgcttcgcgccgctatcgcgatagcgcccgggcccggggcgcgagaaaaaggcggcgggcgctcgcctcccccgcctgtcgcgatacgctcctcagcggcggcgccagctcctgtgcgtccgtctccaagagagtatgaagagagtgcgtctgtagggcagggaagatggcggacaagcgcaaactccaaggtgagattgatcgctgcctcaagaaggtgtccgagggcgtggagcagtttgaagatatttggcagaagctccacaatgcagccaacgcgaaccagaaagaaaagtatgaggctgacctaaagaaggagattaagaagctacaacggctgagggaccaaatcaagacatgggtagcgtccaacgagatcaaggacaagaggcagcttatagacaaccgcaagctcattgagacgcaaatggaacggttcaaagttgtggaacgagagaccaaaaccaaagcttacagcaaagagggcctgggcctggcccagaaggtagatcctgcccagaaggagaaggaagaggttggccagtggctcacgaataccatcgacacgctcaacatgcaggtggaccagtttgagagtgaagtggagtcactgtcagtgcagacacgcaagaagaagggcgacaaggataagcaggaccggattgagggcttgaagcggcacatcgagaagcaccgctaccacgtgcgcatgctagagaccatcctgcgcatgctggacaatgactccatcctcgttgacgccatccgcaagatcaaggacgacgttgagtactatgttgactcatcccaggaccccgacttcgaggagaacgagtttctctacgatgacctggacctcgaggacattccacaggcgctggtcgccacctcccctcccagccacagccacatggaggatgagatcttcaaccagtccagcagcacgcccacctcaaccacctccagctctcccatcccgcccagcccagccaactgtaccacggaaaactctgaagatgataagaagaggggacgttccacagacagtgaagtcagccagtctccagccaaaaacggctccaagcctgtccacagcaaccagcaccctcagtccccagctgtgccgcccacctacccctccggccccccgcctgctgcctctgccttgagcaccactcctggcaacaatggggtccccgcccccgcagcacccccaagtgccctgggccccaaggccagtccagctcccagccacaactcgggcacccctgctccctatgcccaggctgtggccccaccagctcccagtgggcccagcacgacccagccccggccccccagcgtccagcctagcggaggcggaggcggcggcagcggaggtggagggagcagcagcagtagtaacagcagtgccggtggaggggctggcaagcagaatggcgccaccagttacagctcagttgtggcagacagcccggcagaggtggctttgagcagcagtgggggcaacaatgccagcagccaggccttgggccccccttccggcccccacaacccacctcccagcacctcgaaggaacccagtgcggcagccccaacgggggctgggggcgtggccccaggctcagggaacaactcagggggacccagcctcctggtgccactgcctgtgaatcctcccagctccccaacgcccagcttcagtgatgccaaggcagccggtgccctgctcaatgggcctccacagttcagcaccgccccagaaatcaaggcccctgagcctctgagctccttgaagtccatggcggaacgggcagccatcagctctggcattgaggaccctgtgccaacgctgcacctgaccgagcgagacatcatcctgagcagtacatcagcacctccggcctcagcccagccgcccctgcagctgtcagaggtgaacataccgctgtcgctgggtgtctgtccactgggccctgtgcccctcaccaaggagcagctctatcagcaggccatggaagaggccgcctggcaccacatgcctcacccctctgactctgagcgtattcggcagtacctcccccggaacccctgtccgacgcccccctaccaccaccagatgccacccccacactcggacactgtggaattctaccagcgcctgtcgaccgagacactcttcttcatcttctactatctggagggcactaaggcacagtatctggcagccaaggccctaaagaagcagtcatggcgattccacaccaagtacatgatgtggttccagaggcacgaggagcccaagaccatcactgacgagtttgagcagggcacctacatctactttgactacgagaagtggggccagcggaagaaggaaggcttcacctttgagtaccgctacctggaggaccgggacctccagtgacaccggcccctccctctacccacccccttcccccgcatgctgatccccctgcccaggtgagggccctgccctggaagactggagggaggccccaagccacggggcatccccctctcccaggaagcagggagggggccgggaggttttcctctcagccccaccctgggggcccgggggcgagggctgccccctcctcccctccccagtgagggacattttttggtaaacctattttcattttggaaaatatttatgaataaatagttttatatga

SEQ ID NO: 180574 - DNA, 2262 bp, Artificial Sequence
  derived and/or modified sequence
atggccgacaaacgtaagttgcagggagagattgaccgctgtctgaagaaagtgagtgaaggagtggaacagtttgaggacatctggcaaaagctacataacgcagctaacgcaaaccagaaggaaaagtacgaggccgatctgaagaaagaaatcaaaaaattacagcgcttgcgtgaccagataaagacctgggtagcttctaatgagatcaaggataagagacaattgatagataatcgtaagctgatcgagacccagatggagcgattcaaagtggtggaacgggaaacaaagacaaaggcctatagcaaggagggactggggctggctcaaaaggtggaccccgctcagaaggaaaaagaggaagtgggacagtggcttacaaacaccattgataccctgaatatgcaggtcgaccaatttgaaagcgaggtcgaatcactatcggtgcaaactaggaagaagaaaggcgataaagacaaacaggaccgcatcgaggggttgaaaaggcacatcgaaaaacatcgatatcacgtcaggatgctggaaacaatcctgcggatgctcgacaatgacagcatcctggtggacgctatcaggaaaatcaaggatgacgtcgagtattacgtggattctagccaggatccagatttcgaagagaacgaattcctctacgatgacctcgacctggaggacattccccaggcgctggttgccacctcgccacctagccacagccatatggaagacgaaatttttaaccagagtagttctacacctaccagcacaacctctagtagccctattcccccatcccccgcaaattgtacaaccgagaactcagaggatgataagaagagagggcgcagtaccgatagtgaggtgagccaatcacccgcgaagaatggatccaaacctgtccacagcaaccagcacccccaatctccagccgtccctcccacgtatccctcagggcctccgcccgcagcctccgcccttagtacaacacctggaaataacggagtgcccgctcccgccgcacctccttccgctttaggcccaaaagcatcccccgcgcctagccacaatagcggaacaccggctccttatgcccaagccgtggcccctccagcccccagcggaccttccactacacaacctcggcccccaagcgtgcagccatcgggagggggaggagggggctctggaggcggcgggtccagcagttccagcaatagctccgccggcggcggggccgggaaacaaaacggagctactagctatagcagcgttgtggccgattcacccgccgaagtagctctcagttcatcaggggggaacaacgcgagttcgcaggctctgggtccaccgtctgggccccataaccctcctccgagcacctcaaaggagcccagcgccgctgccccaaccggggcaggcggcgtagccccgggttccggtaacaactccggcgggccctccctgctggtacctctgcccgtgaatcctccctccagcccaacaccctccttcagtgatgccaaagcagccggggcactgctcaatggccccccccagttcagtacagctcctgaaattaaggccccagaacctttgtctagtttaaagtcaatggctgagcgtgcggctatctcgtccgggatcgaggacccagtgccaactctgcatctcactgaaagagacatcatcctaagcagcacttccgctccaccagctagtgctcagccaccccttcagctgagtgaagtgaacattcccctcagtttgggtgtttgtccactgggtcccgtgcctctgaccaaggaacagctctaccagcaggccatggaagaagccgcttggcaccatatgccgcatccttcagacagcgagcgcatccgtcagtatctccctcgcaacccatgtcccacacctccttatcatcaccagatgcccccaccccacagcgacacagtcgagttttaccagcgtctgtctaccgagacactattcttcattttttactatctggagggcacgaaggcacagtaccttgcagcaaaagcgctcaagaagcaatcttggcgcttccacacaaagtatatgatgtggtttcagaggcacgaggaacccaaaaccataacagacgagttcgaacaggggacatacatctattttgattacgagaagtggggacaaagaaagaaagagggtttcaccttcgaatatcgatacctggaagatagagatctgcagtag

SEQ ID NO: 180575 - DNA, 2262 bp, Artificial Sequence
  derived and/or modified sequence
atggccgacaagcggaagctgcagggcgagatcgaccggtgcctgaagaaggtgagtgaaggagtagagcagtttgaagacatctggcagaagctccataatgctgccaatgcaaatcaaaaagaaaagtatgaggccgacctcaaaaaggaaatcaaaaaactgcagcgcctgagggatcagatcaagacgtgggtggccagtaacgagatcaaagacaagcggcaactaatcgacaataggaagctcattgagactcagatggagcgctttaaggtcgtggagcgcgagacgaaaacgaaggcatatagtaaagagggtctaggcctggctcagaaagtcgaccccgcccagaaggagaaggaggaagtcggccagtggctgacaaatacaattgacacacttaatatgcaggtggatcaattcgagtctgaagtcgaatccctcagcgttcaaactaggaagaaaaaaggagacaaggacaagcaggacaggatcgagggtctcaaaagacatattgagaaacacaggtatcatgttcgaatgcttgagactatcctgcggatgctcgacaatgatagtatattggtagatgcgatcaggaagattaaagatgacgttgagtattacgtggatagtagtcaggatcccgatttcgaggagaacgagttcctctacgacgaccttgatctggaggatatcccacaggcactcgtcgctacatctcctccttcccatagccatatggaagacgaaatttttaaccagagttcctcaactccaactagcacaaccagctcctcaccaattccaccgtcccctgccaattgcaccaccgaaaacagtgaggatgacaagaaacggggcaggtccaccgactcggaagtctcccagagtccagcaaagaatggatcgaagcccgttcattctaaccagcacccccaatcgcccgccgtcccacctacttaccctagtggaccccctcctgccgcgtccgccctcagcactacaccgggaaataatggggtgcccgctccagccgccccaccatctgcattgggccctaaggcgagccctgctccttctcacaactcaggaacgcctgccccttacgctcaagcagtcgccccaccagccccatcaggcccaagcacaacacagcctcgtcccccatccgtccaaccctcaggcggaggcggcggcggcagtggtgggggtgggtcctcgagctctagcaacagttccgcaggcggcggagcagggaaacagaatggtgctacgtcctactctagcgtcgtcgctgactccccagcagaagtggccctgtcctcatcgggcgggaacaacgcatcaagtcaagcactggggccccctagcggcccacacaaccctcccccctccacatctaaggagccaagcgctgctgcaccaaccggggccgggggcgtggcacctgggagtggcaataatagcggtggcccctccctgttggtgcctttgcccgtcaaccccccatcctcaccgacaccctcctttagtgatgctaaagctgccggggccctcttaaacggtcccccgcaattttctactgcccccgaaattaaggcgccagagcccctgtccagtctgaagtcgatggcagagcgcgccgcaatttcgagtggcatcgaagaccccgtacctacgctgcacctcaccgagagggatatcatattgtccagcacttccgcacctcccgctagcgctcagccacctcttcagctctccgaggtgaatattccattaagcctcggcgtgtgtcctttgggaccggtgcccctgacaaaggagcagctgtaccagcaggctatggaggaagctgcctggcatcacatgccccacccctcggattcagagcggatcagacagtatctgccaagaaatccctgtccgacccccccttaccaccaccagatgccgccgccccacagtgacaccgttgagttctaccagagacttagtaccgaaacgctcttttttatcttttattatctggagggcaccaaagcccagtacctcgctgctaaggcactaaagaaacagtcctggaggttccataccaaatacatgatgtggttccagagacacgaggaacccaagaccatcactgatgagtttgagcagggaacatacatttacttcgactatgagaaatggggccagcgcaagaaggagggatttactttcgaataccggtacctcgaggatcgggacctgcagtag

SEQ ID NO: 180576 - DNA, 2262 bp, Artificial Sequence
  derived and/or modified sequence
atggccgacaagcgaaaattgcagggtgagattgaccgctgcctgaagaaggttagcgagggcgtcgagcaatttgaagacatttggcagaagctccacaatgccgctaatgccaatcaaaaggaaaagtacgaggccgacttaaagaaagaaatcaagaaattgcagagactgagggatcagattaagacatgggttgcctctaatgagatcaaagataagcgccagctgattgacaacagaaagttgatcgaaacacagatggagaggtttaaagtggtagaaagagagacaaagactaaggcttatagtaaagaggggcttggactggcccagaaagtggatcctgcacaaaaagaaaaagaggaagtgggccagtggttaaccaacactatagacacacttaatatgcaggtggatcagtttgaaagcgaagtcgagagtctcagcgtgcagacccgtaaaaagaaaggcgataaggataagcaggaccgaattgagggtctgaagcgccatattgagaaacatcgatatcatgtgaggatgctggaaacaatcctgcgcatgctcgacaatgactctattctggtggacgccatccggaaaatcaaggatgatgtggagtattacgtggattctagccaagatcccgactttgaagaaaacgagttcctatatgatgatctcgatctagaagacatcccgcaggccctggtggctacttctccaccctctcactcacacatggaggatgaaatctttaaccaatcatcctccactcctactagtactacatccagctcaccaattcctccctcccctgccaactgtactacagaaaactccgaagacgacaagaagcggggtcgttctacagactcggaggtcagccagtcacctgcaaaaaatggcagcaagcccgtacattcgaatcagcacccgcaaagccccgcagtcccacccacctatccttccggtcctccacctgctgcctcagctctatccactacaccgggtaacaacggggtgcctgccccagcggctccaccttccgctctgggacctaaggcatccccagccccatcacataattcagggactcctgccccatatgctcaagctgttgcccctcctgctcccagcgggccttcaactactcagcctcgaccaccttccgtgcaacccagcggcggtggcggtggagggtctggtgggggaggatcatcaagctcttctaattcttcagcaggagggggtgctggtaaacagaatggcgctacgtcttatagctcagttgtcgccgacagtccggctgaggtggcgttgtccagcagtggcggaaataatgccagttcccaggccttgggacctccatcgggaccccacaaccccccaccctctactagtaaggagccaagcgccgctgcgcctacgggggcagggggagtggcacccggaagcggcaacaactctggcggtccatcactgttggtccctctccccgtcaaccctccatctagtccaacaccgtctttctctgatgccaaggccgctggagccctgctgaatggaccaccacagttcagcaccgccccagagattaaggccccagaacccttgtccagcctgaaatccatggcagaacgagcagcaatctcttcgggaatcgaagatcccgtaccaacgctccacttaacagagagggatatcattctgtcttctacttctgctcccccagcttctgctcagccccctctacagctctccgaagtgaacataccactttcccttggagtttgcccccttggccctgtgcccctgacaaaggagcaactgtaccaacaggccatggaggaagctgcttggcaccatatgccccacccctctgattccgagcgcatcagacagtacctgccgaggaatccgtgccccacccccccatatcatcaccagatgccacccccacactcagacaccgtggaattttaccagcgcctgtcaactgagactttgttttttatattctactatctggaagggactaaggcacagtatttggccgctaaggcactcaagaagcagagctggcgtttccataccaagtacatgatgtggttccagaggcatgaggagcctaagaccatcactgatgagtttgaacagggtacatatatctacttcgactacgagaagtggggacagcggaaaaaggaaggcttcacattcgagtacagatacttagaggatcgcgatctgcagtag

SEQ ID NO: 180577 - DNA, 2570 bp, Artificial Sequence
  derived and/or modified sequence
gaggaggggaggcctcctccgccgccgccatcttggaccgggcccggtcagcttccgcggagccatcggcagacgccgcggcctcccttgagccccgacccccgtcgtcagaacaaccccgggcccactcccccaaccccacttccgcttcgcgccgctatcgcgatagcgcccgggcccggggcgcgagaaaaaggcggcgggcgctcgcctcccccgcctgtcgcgatacgctcctcagcggcggcgccagctcctgtgcgtccgtctccaagagagtatgaagagagtgcgtctgtagggcagggaagatggcggacaagcgcaaactccaaggtgagattgatcgctgcctcaagaaggtgtccgagggcgtggagcagtttgaagatatttggcagaagctccacaatgcagccaacgcgaaccagaaagaaaagtatgaggctgacctaaagaaggagattaagaagctacaacggctgagggaccaaatcaagacatgggtagcgtccaacgagatcaaggacaagaggcagcttatagacaaccgcaagctcattgagacgcaaatggaacggttcaaagttgtggaacgagagaccaaaaccaaagcttacagcaaagagggcctgggcctggcccagaaggtagatcctgcccagaaggagaaggaagaggttggccagtggctcacgaataccatcgacacgctcaacatgcaggtggaccagtttgagagtgaagtggagtcactgtcagtgcagacacgcaagaagaagggcgacaaggataagcaggaccggattgagggcttgaagcggcacatcgagaagcaccgctaccacgtgcgcatgctagagaccatcctgcgcatgctggacaatgactccatcctcgttgacgccatccgcaagatcaaggacgacgttgagtactatgttgactcatcccaggaccccgacttcgaggagaacgagtttctctacgatgacctggacctcgaggacattccacaggcgctggtcgccacctcccctcccagccacagccacatggaggatgagatcttcaaccagtccagcagcacgcccacctcaaccacctccagctctcccatcccgcccagcccagccaactgtaccacggaaaactctgaagatgataagaagaggggacgttccacagacagtgaagtcagccagtctccagccaaaaacggctccaagcctgtccacagcaaccagcaccctcagtccccagctgtgccgcccacctacccctccggccccccgcctgctgcctctgccttgagcaccactcctggcaacaatggggtccccgcccccgcagcacccccaagtgccctgggccccaaggccagtccagctcccagccacaactcgggcacccctgctccctatgcccaggctgtggccccaccagctcccagtgggcccagcacgacccagccccggccccccagcgtccagcctagcggaggcggaggcggcggcagcggaggtggagggagcagcagcagtagtaacagcagtgccggtggaggggctggcaagcagaatggcgccaccagttacagctcagttgtggcagacagcccggcagaggtggctttgagcagcagtgggggcaacaatgccagcagccaggccttgggccccccttccggcccccacaacccacctcccagcacctcgaaggaacccagtgcggcagccccaacgggggctgggggcgtggccccaggctcagggaacaactcagggggacccagcctcctggtgccactgcctgtgaatcctcccagctccccaacgcccagcttcagtgatgccaaggcagccggtgccctgctcaatgggcctccacagttcagcaccgccccagaaatcaaggcccctgagcctctgagctccttgaagtccatggcggaacgggcagccatcagctctggcattgaggaccctgtgccaacgctgcacctgaccgagcgagacatcatcctgagcagtacatcagcacctccggcctcagcccagccgcccctgcagctgtcagaggtgaacataccgctgtcgctgggtgtctgtccactgggccctgtgcccctcaccaaggagcagctctatcagcaggccatggaagaggccgcctggcaccacatgcctcacccctctgactctgagcgtattcggcagtacctcccccggaacccctgtccgacgcccccctaccaccaccagatgccacccccacactcggacactgtggaattctaccagcgcctgtcgaccgagacactcttcttcatcttctactatctggagcccagagatgttagaactgcttgggttgacagcgaggctggtccactgaggcacacctcagccccgcttccagttgcccactggctcacccgcggcccctccccagccctgctccagcagccccagtctaggccgaccccactctgctcatcggcacattctcaggcctccctggagaccactggggagctgtccagccccctcccaaccccacttctctga

SEQ ID NO: 180578 - DNA, 4138 bp, Artificial Sequence
  derived and/or modified sequence
aaattctccctgggggtaaggtaccagccctgtcctttatgggcttcttgttctaaagcatatccgtcccatatggttgctgctagtcacatgtggtgattagtaactagttaaaaatgaaaaattcagttcctccattacacttgccacatttcagatgttcagtggccaacagatatgcgcaaatagagtgtttccagcattgcaaagttctgttggatagcactgtttgccagatgttcccttctttgtgggtgaggactcttttggtgtgacttccctctgtattgaggctcttgttcctcagtatggggctgtttctgtctttacagtaagtgactactccagggttccctgccctgcacacgtagagtgggagcggcccgtggatcccagggaactgtgcttttcattgtaggccccctccctggaggggaagagggcaatctccgctggtatctcagaagtcttcttctgaggcataagcctctcttcccagggctcccctggtctcgctgtcaggccctaaggtatgtcttcccttggactaaagctccttggaactcccttttgacctcagtcttctctgggttccaggtaacttcctttaaaataaagacgctcctctcttgaagttttgggttcctgccctgatggtctatgtctccctgactctaaattaccaatccacttgctatgggattcctccatgagtgcagatcggctccctcacagctgcggtacctttgcaccctcttatcttagtaagatttctgtcttctcccaggtctctcttgggtactgccttctgcccccaaatctctaagccttcttggtattagcttctttgggttaggagtgttatttccttttggtttaaggatcctgctctggaataaatgtcttggtggtttgagtcccttctacttggcattcagccctgtctgcatgagcgggttcagctcttcacagctttcggcatctctgctcgccgtcgttttcccccacccccaatctttcttctcctacctacagcttacacacacacacacacacacacacacacacacacacacgcccttctctgtgagctgccagtttcatttgtctcctgacttgtctgagggatgacctctcctagccacctctgcccagcccctctgagtaggaagtgtgatttccagggctaatgcctccatcccagtcatcagctgtgtgcagcatgactgtcctgctctgaaaaacctttttgagtgtattctggggagaaggtactccatgctctaggaattttccacttcctgagtcagaggcacacaaaaaagtatgtaacttttcttgtttcaacaaacttatggggtcccctgttggccagacactatgctgggcagtcaagcgagcatcaggagaactggggctggtctcttgtcagatagcaaatgcttcttctctttaccagtcccacctacctcactatgctgactaggtccatgtctctgggtttttaccagccagggaatacgtgttaattcctctccaatctctcctagcagcgtccgtctccaagagagtatgaagagagtgcgtctgtagggcagggaagatggcggacaagcgcaaactccaaggtgagattgatcgctgcctcaagaaggtgtccgagggcgtggagcagtttgaagatatttggcagaagctccacaatgcagccaacgcgaaccagaaagaaaagtatgaggctgacctaaagaaggagattaagaagctacaacggctgagggaccaaatcaagacatgggtagcgtccaacgagatcaaggacaagaggcagcttatagacaaccgcaagctcattgagacgcaaatggaacggttcaaagttgtggaacgagagaccaaaaccaaagcttacagcaaagagggcctgggcctggcccagaaggtagatcctgcccagaaggagaaggaagaggttggccagtggctcacgaataccatcgacacgctcaacatgcaggtggaccagtttgagagtgaagtggagtcactgtcagtgcagacacgcaagaagaagggcgacaaggataagcaggaccggattgagggcttgaagcggcacatcgagaagcaccgctaccacgtgcgcatgctagagaccatcctgcgcatgctggacaatgactccatcctcgttgacgccatccgcaagatcaaggacgacgttgagtactatgttgactcatcccaggaccccgacttcgaggagaacgagtttctctacgatgacctggacctcgaggacattccacaggcgctggtcgccacctcccctcccagccacagccacatggaggatgagatcttcaaccagtccagcagcacgcccacctcaaccacctccagctctcccatcccgcccagcccagccaactgtaccacggaaaactctgaagatgataagaagaggggacgttccacagacagtgaagtcagccagtctccagccaaaaacggctccaagcctgtccacagcaaccagcaccctcagtccccagctgtgccgcccacctacccctccggccccccgcctgctgcctctgccttgagcaccactcctggcaacaatggggtccccgcccccgcagcacccccaagtgccctgggccccaaggccagtccagctcccagccacaactcgggcacccctgctccctatgcccaggctgtggccccaccagctcccagtgggcccagcacgacccagccccggccccccagcgtccagcctagcggaggcggaggcggcggcagcggaggtggagggagcagcagcagtagtaacagcagtgccggtggaggggctggcaagcagaatggcgccaccagttacagctcagttgtggcagacagcccggcagaggtggctttgagcagcagtgggggcaacaatgccagcagccaggccttgggccccccttccggcccccacaacccacctcccagcacctcgaaggaacccagtgcggcagccccaacgggggctgggggcgtggccccaggctcagggaacaactcagggggacccagcctcctggtgccactgcctgtgaatcctcccagctccccaacgcccagcttcagtgatgccaaggcagccggtgccctgctcaatgggcctccacagttcagcaccgccccagaaatcaaggcccctgagcctctgagctccttgaagtccatggcggaacgggcagccatcagctctggcattgaggaccctgtgccaacgctgcacctgaccgagcgagacatcatcctgagcagtacatcagcacctccggcctcagcccagccgcccctgcagctgtcagaggtgaacataccgctgtcgctgggtgtctgtccactgggccctgtgcccctcaccaaggagcagctctatcagcaggccatggaagaggccgcctggcaccacatgcctcacccctctgactctgagcgtattcggcagtacctcccccggaacccctgtccgacgcccccctaccaccaccagatgccacccccacactcggacactgtggaattctaccagcgcctgtcgaccgagacactcttcttcatcttctactatctggagggcactaaggcacagtatctggcagccaaggccctaaagaagcagtcatggcgattccacaccaagtacatgatgtggttccagaggcacgaggagcccaagaccatcactgacgagtttgagcagggcacctacatctactttgactacgagaagtggggccagcggaagaaggaaggcttcacctttgagtaccgctacctggaggaccgggacctccagtgacaccggcccctccctctacccacccccttcccccgcatgctgatccccctgcccaggtgagggccctgccctggaagactggagggaggccccaagccacggggcatccccctctcccaggaagcagggagggggccgggaggttttcctctcagccccaccctgggggcccgggggcgagggctgccccctcctcccctccccagtgagggacattttttggtaaacctattttcattttggaaaatatttatgaataaatagttttatatg

SEQ ID NO: 180579 - protein, 1328 aa, Artificial Sequence
  derived and/or modified sequence
MESRDPAQPMSPGEATQSGARPADRYGLLKHSREFLDFFWDIAKPEQETRLAATEKLLEYLRGRPKGSEMKYALKRLITGLGVGRETARPCYSLALAQLLQSFEDLPLCSILQQIQEKYDLHQVKKAMLRPALFANLFGVLALFQSGRLVKDQEALMKSVKLLQALAQYQNHLQEQPRKALVDILSEVSKATLQEILPEVLKADLNIILSSPEQLELFLLAQQKVPSKLKKLVGSVNLFSDENVPRLVNVLKMAASSVKKDRKLPAIALDLLRLALKEDKFPRFWKEVVEQGLLKMQFWPASYLCFRLLGAALPLLTKEQLHLVMQGDVIRHYGEHVCTAKLPKQFKFAPEMDDYVGTFLEGCQDDPERQLAVLVAFSSVTNQGLPVTPTFWRVVRFLSPPALQGYVAWLRAMFLQPDLDSLVDFSTNNQKKAQDSSLHMPERAVFRLRKWIIFRLVSIVDSLHLEMEEALTEQVARFCLFHSFFVTKKPTSQIPETKHPFSFPLENQAREAVSSAFFSLLQTLSTQFKQAPGQTQGGQPWTYHLVQFADLLLNHSHNVTTVTPFTAQQRQAWDRMLQTLKELEAHSAEARAAAFQHLLLLVGIHLLKSPAESCDLLGDIQTCIRKSLGEKPRRSRTKTIDPQEPPWVEVLVEILLALLAQPSHLMRQVARSVFGHICSHLTPRALQLILDVLNPETSEDENDRVVVTDDSDERRLKGAEDKSEEGEDNRSSESEEESEGEESEEEERDGDVDQGFREQLMTVLQAGKALGGEDSENEEELGDEAMMALDQSLASLFAEQKLRIQARRDEKNKLQKEKALRRDFQIRVLDLVEVLVTKQPENALVLELLEPLLSIIRRSLRSSSSKQEQDLLHKTARIFTHHLCRARRYCHDLGERAGALHAQVERLVQQAGRQPDSPTALYHFNASLYLLRVLKGNTAEGCVHETQEKQKAGTDPSHMPTGPQAASCLDLNLVTRVYSTALSSFLTKRNSPLTVPMFLSLFSRHPVLCQSLLPILVQHITGPVRPRHQACLLLQKTLSMREVRSCFEDPEWKQLMGQVLAKVTENLRVLGEAQTKAQHQQALSSLELLNVLFRTCKHEKLTLDLTVLLGVLQGQQQSLQQGAHSTGSSRLHDLYWQAMKTLGVQRPKLEKKDAKEIPSATQSPISKKRKKKGFLPETKKRKKRKSEDGTPAEDGTPAATGGSQPPSMGRKKRNRTKAKVPAQANGTPTTKSPAPGAPTRSPSTPAKSPKLQKKNQKPSQVNGAPGSPTEPAGQKQHQKALPKKGVLGKSPLSALARKKARLSLVIRSPSLLQSGAKKKAQVRKAGKP

SEQ ID NO: 180580 - DNA, 4585 bp, Artificial Sequence
  derived and/or modified sequence
ctgacctggaagcggctggggccggagcacacgtgtttcgtgtttcggtgagtgtggcggagatggagagccgggatcccgcccagccgatgtcgcctggagaagcgacgcagagtggcgcccggcctgccgaccgctatggcctattgaagcacagtcgcgagttcttggacttcttctgggacattgcgaagcctgagcaggagacgcgacttgcggccacggagaagctgctggagtatctgcgtggcaggccgaaggggtccgagatgaaatatgccctgaagcgtctaatcacgggactcggggtcgggcgagaaacagcccggccctgctacagtttggccctggcacagctgttacagtcttttgaagacctccccttgtgcagcatcctgcagcagatacaagaaaaatatgacctgcatcaggtgaagaaggcaatgctgagacctgctctctttgcaaacctgtttggagtgctcgccctctttcagtcaggtcggctggtgaaggaccaggaggcactgatgaagtcggtgaagctgctgcaggccctggcccagtaccaaaaccacttgcaggagcagccccggaaggccctggtggacatcctctccgaggtctcgaaggccacattgcaggagatcctgccggaggtcctcaaagccgacttgaatataatactcagctcccctgaacagctagagctcttcctcctggcccagcagaaggtgccctccaagctcaagaagctggtgggatccgtgaacctattctcagatgagaatgtccccaggctggtgaatgtgctgaagatggccgcctcctctgtgaagaaggaccgcaagctgcccgccattgctctggacctgctccgcctggcactcaaggaagacaagttcccacggttctggaaggaggtggtggaacaagggctgctgaagatgcagttctggccagccagctacctgtgtttccgcctgctgggcgcggccctgcccctgctgaccaaggagcagctgcacctggtgatgcagggagacgtgatccgccattacggggagcacgtgtgcactgctaagctcccaaagcagttcaagtttgccccagagatggacgattacgtgggcaccttcctagaggggtgccaggatgaccctgagcggcagctggccgtgctagtggccttctcatctgtcaccaaccaaggcctccctgtcacgcctactttctggcgggtcgtgcggttcctgagccctccggccctgcagggctatgtggcctggctgcgggccatgtttctccagccagacctggactccttggttgacttcagcaccaacaaccagaagaaagcccaggattcatcgctccacatgcctgagcgagctgtgttccggctgaggaaatggatcatctttcgattggtgagcattgtggacagcctgcacctggagatggaggaggccttgactgagcaggtggccaggttttgtttgttccactcgttctttgtcacaaagaagcccacatcccagatccctgagacaaagcacccgttctccttccctttggaaaaccaggcccgagaggctgtcagcagtgccttcttcagtctgttgcagaccctcagcacgcagttcaagcaggcaccgggccagacccagggtgggcagccctggacctaccacctggtgcagttcgcagacctcctgttgaatcacagccacaacgtgaccaccgtgacacccttcactgcgcagcagcgccaggcctgggaccggatgctgcagactctgaaggagctggaggcccactccgcagaggccagggctgctgccttccagcaccttctgctcctcgtgggcatccacctcctcaagtcccctgcagagagctgtgacctgctgggtgacatccagacctgcatcaggaaaagtctgggagagaagccccgccggagccgcaccaagaccatcgacccccaggaacccccgtgggtagaggtgctggtggagatcttgctggccctgttggcccagcccagccacctcatgcgccaggtggcccggagcgtgtttggccacatctgctcccacctgaccccgcgtgccctgcagctaattctggatgtgctgaaccccgagaccagtgaggatgagaatgaccgtgtggtggtgacggacgattctgatgagcggcggctgaagggtgcagaggacaagagcgaggaaggtgaggacaacagaagctcagagagtgaagaggagagcgagggggaggagagcgaggaggaggagcgcgacggggacgtggatcagggcttccgggaacagctgatgaccgtgctgcaggctgggaaggcgctgggtggagaggacagtgagaacgaggaggagctgggggatgaggccatgatggccctggaccagagcctcgccagcctctttgccgagcagaagctgcgtatccaggcccggcgagacgagaagaacaagctgcagaaggagaaggctctgcggcgcgacttccagatccgggtgctggacctggtggaggtgctagtgaccaagcagcccgagaatgccctggtcctggagctgctggagccgctgctgagcatcatccggcgcagcctgcgcagcagcagctccaaacaggagcaggaccttctgcacaagacggcgcgcatcttcacgcaccacctgtgccgtgcccggcgctactgccacgacttgggtgagcgcgcaggggccctgcacgcccaggtggagcggttggtgcagcaggctggccgccagcccgactcccccaccgccctctaccacttcaacgcctctctctacctgctccgggtcttgaagggcaacactgctgagggctgcgtgcatgagacacaggagaagcagaaagctggcactgaccccagccacatgcccacgggcccgcaggctgccagctgcttggacttgaacctggtgacccgggtgtactcgacagcactgagctccttcctgaccaagcgcaacagccccctcacagttcccatgttcctcagcctcttctcccggcacccggtgctctgtcagagcctgctccccatcctggtccagcatatcacgggcccggtgcggccccgtcatcaggcctgcctgctgctccagaagaccctgtccatgcgggaggtgaggtcgtgctttgaggaccccgagtggaagcagctgatgggccaggtcctagcaaaggtcaccgagaacttgcgcgtgctgggggaggcgcagaccaaggcgcagcatcagcaggcactgtcctccctggagctgctcaacgttctcttcaggacctgcaaacatgagaagctgaccttggacctgacggtgctcctgggtgtgctgcaggggcaacagcagagcctacagcagggggcacactccaccggctccagccgcctgcacgacctctactggcaggccatgaaaaccctgggagtccagcgccccaagttggagaagaaggatgccaaggagatccccagtgccacccagagccccatcagtaagaagcggaagaaaaagggattcttgccagagacgaagaagcgcaagaaacgcaagtcagaggatggcacgccagcggaggatggcacacctgcagccaccggcgggagccagccccccagcatgggcaggaagaagaggaacaggacaaaggctaaggtcccagcccaggcaaacgggacgccaaccaccaagagtccagcccctggcgcccccacccggagccccagcacccctgccaaatccccaaaactgcagaagaaaaaccagaagccgtcccaggtgaatggagctcccgggtcccccacggaacctgcaggccaaaagcagcatcagaaggctcttcccaaaaagggggtcttgggcaaatcaccactgtccgcgctggcacggaaaaaggcaaggctgtctttggtcatcaggagtcccagcctgcttcagagtggggccaagaagaaagcacaggtgaggaaggcagggaagccctgagcacaggtacgggcccccctcagcccctgcctccatctgcctgagacgcctattttttttttttttttttaaaccatgattttaatacgcaagctgtttctaaggcgctgccactggggagggtggctgttgccgcctgcccgggcatcctgctctggcaagcacagcctgagccattcctgcaggggtcccagggtgcagagacctccccacccccggttctgggctgggaccctggctccagggccatgtccagggctctggtgtttgcctgggttggtgcaggttgatgtgctggctgcaggcaggtgtgaccatctctcgtgcctgccacctctttgcccccaggcttttttgctgtgagggagccaccagggggtgatttaaataggtttatttcttcatttacaagaggaatatatttggcttctctcttaagactctgagattcacaatcagcagctctaaaaaataaaggagcagtttggcttccggaaggaagaggaggcaacactcggaaaaaaaaaaaaaaaaaa

SEQ ID NO: 180581 - DNA, 3987 bp, Artificial Sequence
  derived and/or modified sequence
atggagtccagagatcctgcacagcccatgtcacctggcgaagcaactcaatccggggccagacctgccgacagatacggattgctgaaacatagtagagagtttttggatttcttctgggatattgctaagccggaacaggagacccggttagccgctactgaaaagctcctggagtatttacgtggaagacctaagggctccgagatgaaatacgcattgaaaaggctgatcaccgggctcggcgtgggccgggagacagcacggccttgctactcactggccctggcccaactgctccagagttttgaggatttacccctgtgcagcatcctgcaacaaattcaggagaagtatgatctgcaccaggtgaagaaggccatgctccgcccggccctctttgccaatctattcggggtactggctcttttccagtctggtaggctggtgaaggaccaggaagcccttatgaaatctgtgaaattacttcaagcgctcgcgcagtaccagaatcatctccaggaacaacccaggaaggctctcgtggacattctgagtgaggtgtcgaaggccaccctccaggaaatcctgccagaagtcctgaaagccgatctgaacatcatcttatcatcacccgaacaactggaactgttcttactggctcaacaaaaagtaccctcaaaactgaagaaactggtcgggtcagtgaacctgttcagcgatgaaaatgttccccgactcgtcaatgttttgaaaatggcggctagttcagtgaagaaggacaggaagctaccagccattgcgctagacctcctacgcctagctctgaaagaggacaaatttcccaggttttggaaagaggttgtggagcaggggctcctcaaaatgcaattctggccagcgtcatatctgtgctttcggctgctcggagccgccctacccctcttgaccaaggaacagctgcatctagtaatgcagggtgatgtgatcaggcactacggggagcatgtgtgcactgcaaagttacccaagcagttcaaatttgctccagaaatggatgattacgtcggtaccttcctggaggggtgccaggacgatccagaacgtcagttagccgtgttggtggccttctcttccgtgaccaatcagggcctgcctgtgactcctacattctggagagtcgtcaggttcctctcccccccagccttgcaaggctatgtggcatggttgagggcgatgtttctgcaacccgatttagatagcttagttgatttttctactaataatcagaagaaagcccaggactcctcactgcatatgccagagcgagctgtctttagactgcgcaagtggataatcttcaggctggtgtcaatcgtggactctcttcacttggagatggaggaggctttgacagagcaggtggccagattctgtctgttccatagcttcttcgtgacaaagaagccaacctcacaaatccctgagaccaagcatcctttcagtttcccattggaaaatcaagcaagagaggcggtgagctcagcgttcttcagcctgctgcaaacattgagcactcagtttaaacaggccccgggacagacccagggtgggcagccatggacataccacctcgttcagtttgctgacctgttactgaaccattcccataatgttacaacagttactcccttcaccgcccagcaaaggcaggcatgggatcgaatgctacagaccttgaaagaattagaggcgcactctgctgaggcccgggctgctgcattccaacatctgttgctgctggtgggaatccacctgctgaaaagtcctgcagagtcctgcgacctactcggcgatattcaaacatgcatcagaaagagtttaggcgaaaaacctagacgctctagaacaaagactatcgacccccaggaacctccttgggtggaggtgttggtggaaatcctgctggcgcttctggctcagccgagtcatctgatgcgccaggttgcacggtcagtgttcggccatatctgcagccatcttacccctcgagcactccagttgattctcgatgtgctaaaccctgaaaccagcgaagacgaaaacgaccgggtggtggtaactgatgactccgatgaaaggcggttaaagggagcagaagacaaaagcgaggagggcgaagacaaccggtcgtccgagtctgaagaagagtctgagggggaggagtcagaggaggaagaacgagatggcgacgtcgatcagggtttccgcgagcagctgatgacagtgttgcaagcaggcaaggctctgggaggcgaagactcagagaacgaggaggaactcggtgacgaagcaatgatggcccttgaccagagccttgcaagcctttttgctgaacagaaactccgcatccaggctcgtcgcgacgagaaaaataaacttcaaaaggaaaaagccctaaggcgcgattttcaaatccgagtgcttgatttggtggaggtgttggtgactaagcagcccgaaaacgccctggtcctggagctgttggaaccactactctccataataagaaggtctcttaggagctccagcagcaagcaggagcaggatctgctgcataagacagctaggattttcactcatcacctgtgtagagcccgacgctattgccacgacctgggggagagagcaggggcactgcacgcgcaagtggagaggctagtgcagcaggcaggtcggcagcctgactcaccaacggctctctatcactttaacgcctcactgtatctgcttcgcgtgctgaaaggcaatactgcggaaggctgcgttcacgagacccaggaaaaacagaaggccggtaccgaccctagccatatgcccacaggccctcaagcagcatcctgcctcgatctgaacctggtgacccgagtgtattccacagccctgagttcatttctgacaaagaggaacagcccccttacagtccccatgttcctgtccttgttctcaagacatccagtgctgtgtcaaagtctcctgcccattttagtgcagcacatcaccgggccagtacgtcccagacatcaggcttgcttgttgttgcaaaaaaccctctcaatgcgagaggtgagatcctgctttgaggaccccgagtggaagcaactcatggggcaggtgctggcaaaggttaccgaaaatttgcgagttctcggagaagctcagaccaaagcacagcaccagcaggcgctctcttctctcgaactgctgaacgtgctgttcagaacctgcaaacatgaaaagttgactctggacttaacagtcctactgggcgtgctgcagggccagcagcagtccttgcaacagggcgctcacagcactggcagttcccgccttcatgatctgtattggcaggccatgaagactcttggggtgcagcgtcccaagctggagaaaaaggatgcaaaagagatcccaagcgcgacacagtctccaatatcgaagaagcggaaaaagaagggattcctcccagaaacgaagaaaaggaagaaacgaaaatccgaagatgggactccagcagaagatggaactcctgccgccaccggtggctcacagcccccaagtatggggagaaagaaacgaaaccggaccaaagctaaggtgccggcgcaagccaacgggacacccacaacgaagagtccagctccaggagcgccaacccgctctccttcaacacccgctaagagccctaaactgcagaagaagaaccagaaaccatcacaagttaacggtgccccaggttcacctacagagcctgcaggccagaaacaacaccagaaagcactgcctaagaaaggggtcctgggaaagagtcctctgagcgcactggccaggaagaaggcacgactcagtcttgtcatcaggtctccgtctctgttgcagtccggcgcaaagaaaaaagcccaagtgaggaaggctggtaagccgtag

SEQ ID NO: 180582 - DNA, 3987 bp, Artificial Sequence
  derived and/or modified sequence
atggagagccgggaccctgcccagcccatgagccctggagaggccacccagagcggggcccggcctgctgacagatatggcctgctgaagcacagccgggagttcctggacttcttctgggacatcgccaagccagagcaggagacccggctggccgccacagagaagctgctggagtacctgcggggccggcccaagggcagcgagatgaagtatgccctgaagaggctcatcaccggcctgggcgtgggccgggagacagcccggccctgctacagcctggccctggcccagctgctgcagagctttgaggacctgcccctgtgcagcatcctgcagcagatccaggagaagtatgacctgcaccaggtgaagaaggccatgctgcggcctgccctgtttgccaacctgtttggagtgctggccctcttccagagcggccgcctggtgaaggaccaggaggccctgatgaagtctgtgaagctgctgcaggccctggcccagtaccagaaccacctgcaggagcagcccaggaaggccctggtggacatcctgtctgaggtgtccaaggccaccctgcaggagatcctgcctgaggtgctgaaggctgacctgaacatcatcctgagcagccctgagcagctggagctgttcctgctggcccagcagaaggtgcccagcaagctgaagaagctggtgggctctgtgaacctcttcagtgatgaaaatgtgccccggctggtgaatgtgctgaagatggccgccagctctgtgaagaaggacaggaagctgcctgccatcgccctggacctgctgcggctggccctgaaggaggacaagttcccccgcttctggaaggaggtggtggagcagggcctgctgaagatgcagttctggccagccagctacctgtgcttccggctgctgggcgccgccctgcccctgctgaccaaggagcagctgcacctggtgatgcagggagatgtgatccgccactatggagagcacgtgtgcacagccaagctgcccaagcagttcaagtttgcccctgagatggatgattatgtgggcaccttcctggagggctgccaggatgatcctgagcggcagctggccgtgctggtggccttcagctctgtgaccaaccagggcctgcctgtgacccccaccttctggagggtggtgcgcttcctgagccccccagccctgcagggctacgtggcctggctgcgggccatgttcctgcagcctgacctggacagcctggtggacttcagcaccaacaaccagaagaaggcccaggacagcagcctgcacatgcctgagagagctgtgttccggctgaggaagtggatcatcttccggctggtgtccatcgtggacagcctgcacctggagatggaggaggccctgacagagcaggtggcccgcttctgcctcttccacagcttctttgtgaccaagaagcccaccagccagatccctgagaccaagcaccccttctccttccccctggagaaccaggcccgggaggccgtgtcctctgccttcttcagcctgctgcagaccctgagcacccagttcaagcaggcccctggccagacccagggcggccagccctggacctaccacctggtgcagtttgctgacctgctgctgaaccacagccacaacgtgaccaccgtgacccccttcaccgcccagcagaggcaggcctgggacaggatgctgcagaccctgaaggagctggaggcccacagcgctgaggcccgggctgctgccttccagcacctgctgctgctggtgggcatccacctgctgaagagccctgctgagagctgtgacctgctgggggacatccagacctgcatcaggaagagcctgggggagaagcccaggaggagcaggaccaagaccatcgacccccaggagcccccctgggtggaggtgctggtggagatcctgctggccctgctggcccagcccagccacctgatgaggcaggtggcccggtctgtgtttggccacatctgcagccacctgaccccccgggccctgcagctgatcctggatgtgctgaaccctgagaccagtgaagatgaaaatgacagagtggtggtgacagatgacagtgatgagcggcggctgaagggagctgaggacaagtctgaggagggggaggacaacagaagcagcgagagcgaggaggagagcgagggggaggagagcgaggaggaggagagagatggagatgtggaccagggcttccgggagcagctgatgacagtgctgcaggccggcaaggccctgggcggagaagattctgaaaatgaggaggagctgggagatgaggccatgatggccctggaccagagcctggccagcctgtttgctgagcagaagctgcgcatccaggccaggagagatgagaagaacaagctgcagaaggagaaggccctgcggcgggacttccagatccgggtgctggacctggtggaggtgctggtgaccaagcagccagaaaatgccctggtgctggagctgctggagcccctgctgagcatcatcagaagaagcctgcggagcagcagcagcaagcaggagcaggacctgctgcacaagacagcccgcatcttcacccaccacctgtgccgggcccggcgctactgccacgacctgggggagagagctggggccctgcacgcccaggtggagcggctggtgcagcaggccggccggcagcctgacagccccacagccctgtaccacttcaatgccagcctgtacctgctgcgggtgctgaagggcaacacagctgagggctgtgtgcatgagacccaggagaagcagaaggccggcacagaccccagccacatgcccaccggcccccaggccgccagctgcctggacctgaacctggtgaccagggtgtacagcacagccctgagcagcttcctgaccaagaggaacagccccctgactgtgcccatgttcctgagcctcttcagccgccaccctgtgctgtgccagagcctgctgcccatcctggtgcagcacatcactggacctgtgcggcccaggcaccaggcctgcctgctgctgcagaagaccctgtccatgagggaggtgcgcagctgctttgaggaccctgagtggaagcagctgatgggccaggtgctggccaaggtgacagagaacctgcgggtgctgggggaggcccagaccaaggcccagcaccagcaggccctgagcagcctggagctgctgaatgtgctcttccgcacctgcaagcatgagaagctgaccctggacctgactgtgctgctgggcgtgctgcagggccagcagcagagcctgcagcagggcgcccacagcacaggcagcagccggctgcatgacctgtactggcaggccatgaagaccctgggcgtgcagaggcccaagctggagaagaaggatgccaaggagatccccagcgccacccagagccccatcagcaagaagaggaagaagaagggcttcctgcctgagaccaagaagaggaagaagaggaagtcagaagatggcaccccagcagaagatggcaccccagctgccaccggcggcagccagcccccatccatgggcaggaagaagaggaacagaaccaaggccaaggtgcctgcccaggccaacggcacccccaccaccaagagccctgcccctggggcccccaccaggagccccagcaccccagccaagagccccaagctgcagaagaagaaccagaagcccagccaggtgaatggagcccctggcagccccacagagcccgccggccagaagcagcaccagaaggccctgcccaagaagggcgtgctgggcaagagccccctgagcgccctggccaggaagaaggcccggctgagcctggtgatccgcagccccagcctgctgcagagcggggccaagaagaaggcccaggtgaggaaggccggcaagccctag

SEQ ID NO: 180583 - DNA, 4558 bp, Artificial Sequence
  derived and/or modified sequence
gacctggaagcggctggggccggagcacacgtgtttcgtgtttcggtgagtgtggcggagatggagagccgggatcccgcccagccgatgtcgcctggagaagcgacgcagagtggcgcccggcctgccgaccgctatggcctattgaagcacagtcgcgagttcttggacttcttctgggacattgcgaagcctgagcaggagacgcgacttgcggccacggagaagctgctggagtatctgcgtggcaggccgaaggggtccgagatgaaatatgccctgaagcgtctaatcacgggactcggggtcgggcgagaaacagcccggccctgctacagtttggccctggcacagctgttacagtcttttgaagacctccccttgtgcagcatcctgcagcagatacaagaaaaatatgacctgcatcaggtgaagaaggcaatgctgagacctgctctctttgcaaacctgtttggagtgctcgccctctttcagtcaggtcggctggtgaaggaccaggaggcactgatgaagtcggtgaagctgctgcaggccctggcccagtaccaaaaccacttgcaggagcagccccggaaggccctggtggacatcctctccgaggtctcgaaggccacattgcaggagatcctgccggaggtcctcaaagccgacttgaatataatactcagctcccctgaacagctagagctcttcctcctggcccagcagaaggtgccctccaagctcaagaagctggtgggatccgtgaacctattctcagatgagaatgtccccaggctggtgaatgtgctgaagatggccgcctcctctgtgaagaaggaccgcaagctgcccgccattgctctggacctgctccgcctggcactcaaggaagacaagttcccacggttctggaaggaggtggtggaacaagggctgctgaagatgcagttctggccagccagctacctgtgtttccgcctgctgggcgcggccctgcccctgctgaccaaggagcagctgcacctggtgatgcagggagacgtgatccgccattacggggagcacgtgtgcactgctaagctcccaaagcagttcaagtttgccccagagatggacgattacgtgggcaccttcctagaggggtgccaggatgaccctgagcggcagctggccgtgctagtggccttctcatctgtcaccaaccaaggcctccctgtcacgcctactttctggcgggtcgtgcggttcctgagccctccggccctgcagggctatgtggcctggctgcgggccatgtttctccagccagacctggactccttggttgacttcagcaccaacaaccagaagaaagcccaggattcatcgctccacatgcctgagcgagctgtgttccggctgaggaaatggatcatctttcgattggtgagcattgtggacagcctgcacctggagatggaggaggccttgactgagcaggtggccaggttttgtttgttccactcgttctttgtcacaaagaagcccacatcccagatccctgagacaaagcacccgttctccttccctttggaaaaccaggcccgagaggctgtcagcagtgccttcttcagtctgttgcagaccctcagcacgcagttcaagcaggcaccgggccagacccagggtgggcagccctggacctaccacctggtgcagttcgcagacctcctgttgaatcacagccacaacgtgaccaccgtgacacccttcactgcgcagcagcgccaggcctgggaccggatgctgcagactctgaaggagctggaggcccactccgcagaggccagggctgctgccttccagcaccttctgctcctcgtgggcatccacctcctcaagtcccctgcagagagctgtgacctgctgggtgacatccagacctgcatcaggaaaagtctgggagagaagccccgccggagccgcaccaagaccatcgacccccaggaacccccgtgggtagaggtgctggtggagatcttgctggccctgttggcccagcccagccacctcatgcgccaggtggcccggagcgtgtttggccacatctgctcccacctgaccccgcgtgccctgcagctaattctggatgtgctgaaccccgagaccagtgaggatgagaatgaccgtgtggtggtgacggacgattctgatgagcggcggctgaagggtgcagaggacaagagcgaggaaggtgaggacaacagaagctcagagagtgaagaggagagcgagggggaggagagcgaggaggaggagcgcgacggggacgtggatcagggcttccgggaacagctgatgaccgtgctgcaggctgggaaggcgctgggtggagaggacagtgagaacgaggaggagctgggggatgaggccatgatggccctggaccagagcctcgccagcctctttgccgagcagaagctgcgtatccaggcccggcgagacgagaagaacaagctgcagaaggagaaggctctgcggcgcgacttccagatccgggtgctggacctggtggaggtgctagtgaccaagcagcccgagaatgccctggtcctggagctgctggagccgctgctgagcatcatccggcgcagcctgcgcagcagcagctccaaacaggagcaggaccttctgcacaagacggcgcgcatcttcacgcaccacctgtgccgtgcccggcgctactgccacgacttgggtgagcgcgcaggggccctgcacgcccaggtggagcggttggtgcagcaggctggccgccagcccgactcccccaccgccctctaccacttcaacgcctctctctacctgctccgggtcttgaagggcaacactgctgagggctgcgtgcatgagacacaggagaagcagaaagctggcactgaccccagccacatgcccacgggcccgcaggctgccagctgcttggacttgaacctggtgacccgggtgtactcgacagcactgagctccttcctgaccaagcgcaacagccccctcacagttcccatgttcctcagcctcttctcccggcacccggtgctctgtcagagcctgctccccatcctggtccagcatatcacgggcccggtgcggccccgtcatcaggcctgcctgctgctccagaagaccctgtccatgcgggaggtgaggtcgtgctttgaggaccccgagtggaagcagctgatgggccaggtcctagcaaaggtcaccgagaacttgcgcgtgctgggggaggcgcagaccaaggcgcagcatcagcaggcactgtcctccctggagctgctcaacgttctcttcaggacctgcaaacatgagaagctgaccttggacctgacggtgctcctgggtgtgctgcaggggcaacagcagagcctacagcagggggcacactccaccggctccagccgcctgcacgacctctactggcaggccatgaaaaccctgggagtccagcgccccaagttggagaagaaggatgccaaggagatccccagtgccacccagagccccatcagtaagaagcggaagaaaaagggattcttgccagagacgaagaagcgcaagaaacgcaagtcagaggatggcacgccagcggaggatggcacacctgcagccaccggcgggagccagccccccagcatgggcaggaagaagaggaacaggacaaaggctaaggtcccagcccaggcaaacgggacgccaaccaccaagagtccagcccctggcgcccccacccggagccccagcacccctgccaaatccccaaaactgcagaagaaaaaccagaagccgtcccaggtgaatggagctcccgggtcccccacggaacctgcaggccaaaagcagcatcagaaggctcttcccaaaaagggggtcttgggcaaatcaccactgtccgcgctggcacggaaaaaggcaaggctgtctttggtcatcaggagtcccagcctgcttcagagtggggccaagaagaaagcacaggtgaggaaggcagggaagccctgagcacaggtacgggcccccctcagcccctgcctccatctgcctgagacgcctattttttttttttttttttaaaccatgattttaatacgcaagctgtttctaaggcgctgccactggggagggtggctgttgccgcctgcccgggcatcctgctctggcaagcacagcctgagccattcctgcaggggtcccagggtgcagagacctccccacccccggttctgggctgggaccctggctccagggccatgtccagggctctggtgtttgcctgggttggtgcaggttgatgtgctggctgcaggcaggtgtgaccatctctcgtgcctgccacctctttgcccccaggcttttttgctgtgagggagccaccagggggtgatttaaataggtttatttcttcatttacaagaggaatatatttggcttctctcttaagactctgagattcacaatcagcagctctaaaaaataaaggagcagtttggcttccggaaggaagaggaggcaa

SEQ ID NO: 180584 - DNA, 3987 bp, Artificial Sequence
  derived and/or modified sequence
atggagagccgggaccccgcccagcccatgagccccggcgaggccacccaatctggcgccaggccggccgatcgctatggacttctcaagcacagtcgagagtttttggactttttttgggacatagcgaagcccgaacaagagacaagattggcagccaccgagaagctcttagaatatctgcgcggccgccccaaaggatccgaaatgaaatacgcactgaaacgactcattaccggccttggagtgggccgcgaaaccgcccgtccttgctattctctggctctggctcagctgctgcagtcattcgaagacctgccgctgtgttcgatactgcaacagatacaggagaaatatgacctgcatcaggtgaagaaagcaatgcttcggcccgcactgttcgccaacttgttcggcgtgctcgccttgtttcagtcaggaagactcgttaaggaccaggaggcccttatgaaatcggtcaaattactccaagcactggcccaataccagaatcacctacaagaacaaccaagaaaggctctcgtagacatcctatccgaagttagcaaggccaccctgcaggaaattctgcccgaggtgttaaaagcagacctgaacattatcctgtcttcccctgaacagttggagctctttcttcttgcccagcagaaagtgccatcaaaactgaagaagttggtaggctcagtaaacctgttctcagacgaaaatgtccctaggttagtcaatgttctcaagatggctgcttcaagtgtgaagaaggaccgtaaactccctgcaatcgctcttgacctccttaggttagccctaaaggaagataaatttccgcgtttttggaaagaagttgttgaacagggccttttgaaaatgcagttctggcccgctagctacctgtgtttcaggctcctaggcgcggccctgcccctgcttaccaaagagcaattgcacctggtcatgcagggagatgtaatacggcattacggtgaacacgtctgtacggcgaagctgccaaagcaatttaaatttgcgcctgagatggatgattacgtcggtacttttctcgagggatgtcaagacgaccctgagcgacagctagcggtcttagtggccttcagctcagttaccaaccaggggctgcctgtaacccctacattctggcgcgttgtgaggtttctatcccctccagccttacagggttacgtcgcgtggctccgcgccatgttcctgcaaccggacctggattctctggtagattttagcactaacaatcagaaaaaagcacaagacagctctctgcatatgcctgagcgcgctgtgtttcggctgcggaagtggatcatcttcaggctggttagtatagtggacagcctgcatttggagatggaggaagccctcacagagcaggttgccaggttctgcctgtttcattcctttttcgtcactaagaagcccacttcccagattccggaaaccaagcacccttttagctttcctctggagaaccaggccagggaggccgttagcagtgcctttttctccctgcttcagacactgagtacacaatttaaacaggcaccaggccaaacacaggggggacagccctggacctaccacctcgtgcagtttgccgacctcctgctcaaccatagtcacaatgtgacaaccgtgactccattcacagcccaacaaagacaagcctgggaccggatgctacagacactcaaggagcttgaagctcatagcgcggaagctcgcgccgccgcctttcagcaccttctgctgctagtgggaatccatcttctgaaatcccctgcagaatcatgtgatttactcggggacatccagacatgtataaggaaatctctcggagaaaagccacggcgctcacgtactaagaccattgatcctcaggagcctccctgggtcgaagttctagtggaaattctcctggcactcctggcacagccttcccacctcatgagacaggtggcaaggagcgtgttcggccacatttgctcccatttgactccaagagcactccaactgatcttggatgtgcttaaccctgagaccagtgaggatgaaaatgaccgtgttgtggtgacagatgacagcgacgaacgcagactgaagggagctgaggacaaatccgaagaaggtgaggacaaccgaagtagtgagagcgaggaggagtccgaaggggaagaaagcgaggaagaagaaagggatggggatgtagaccagggctttcgggagcagctcatgactgtgctgcaggctgggaaagccctgggaggggaggatagcgaaaatgaagaggagctcggcgacgaagccatgatggctctggatcagtctctggcctctctgttcgccgagcagaagctgaggatccaggcgcgacgcgatgaaaagaacaaactccaaaaggagaaagccctgaggagagatttccagattagggtgttagatctggtggaggttctggtcaccaagcagccggagaatgctctggtactggagttgctggaacctttgctgtctattatcaggcgatccctgagatcttcgtcttctaagcaagagcaggacctcctgcacaagactgccagaattttcactcaccacctttgccgtgccagaaggtactgccacgatttgggcgagcgcgcgggcgccctgcatgcccaggttgaacggctcgttcagcaagccggacgccaacccgactcccctaccgctctctaccatttcaatgccagcctctacttgctgcgagtgctgaaggggaacaccgcggaaggatgtgttcacgagactcaagagaagcaaaaggctgggactgatcctagccacatgccaacaggcccacaggctgcaagttgtctagacctgaacctcgtcacacgcgtgtattcaactgccttgagctctttcctaactaagaggaattcacctctcaccgtacccatgttcctgagcttattttccaggcacccagtgctgtgtcagtccctcctacctatccttgtgcagcatatcactggccctgttcgacccaggcatcaggcatgtctgttgctgcaaaaaacattaagtatgagggaggtgcgaagctgctttgaggaccccgagtggaaacagctgatggggcaagtcttggccaaggttactgagaatctgcgcgttctcggcgaggcccagactaaagcccaacaccaacaggcattgtcatcactcgagctgctgaacgtgctgttccgcacctgtaaacacgagaagttaacgctcgacctcacagtgctgctcggcgtgctgcaggggcaacaacagtctttgcaacagggtgcccactcaactggctcatctcgacttcatgacctctattggcaagctatgaagaccctcggggtccagcgcccaaagcttgagaagaaggacgccaaggagattccctcagccacacagagccccatctctaaaaagcgtaagaagaaagggttcctccccgagaccaagaaaaggaagaagcgcaagtctgaagacggaacccctgcggaagacgggacaccagcggccacaggcggatcccaaccgccatccatgggccgaaagaagaggaaccgaacaaaggccaaagttcctgcccaggccaatggcaccccaacaacgaagagcccagctcccggagcccccacacggagcccttcaaccccggccaagagcccaaagctgcagaaaaaaaaccaaaagccttcccaagtgaacggcgctccgggcagccctaccgaacccgccggccagaagcaacatcagaaagccctgccgaagaaaggggtgctagggaagtcgcctctcagcgcactcgcccgcaaaaaggcaagactgagcttggtcataaggtcccctagcctcctacagagcggtgctaaaaagaaggcccaagtgagaaaagccgggaagccttag

SEQ ID NO: 180585 - DNA, 3987 bp, Artificial Sequence
  derived and/or modified sequence
atggagagcagagaccccgctcagcctatgagccccggtgaagcaacccagtcgggagcgaggccggctgataggtatggattacttaagcattctagagagtttctcgacttcttctgggatattgcgaagcccgaacaggagactagactggccgctacagagaagctgctggaatacttacgaggcaggcctaagggatctgagatgaaatatgcactaaagcgcctgatcacagggctgggcgtcggcagggagacagcacggccttgctattcactcgcactggcacagctgctgcagtcgtttgaggacctgcctctatgtagtatcctgcagcagattcaggagaaatatgacctgcatcaagtgaaaaaagcgatgctgagaccagcacttttcgccaacttgtttggggtgttggcactctttcaaagtggtcgcctggtcaaggaccaggaagcactgatgaagtccgtgaagctgctccaggctcttgctcagtaccaaaaccatctgcaggagcagccccgaaaggcccttgtggacatcctttcagaagtgagcaaggccaccttgcaggagatcctgccagaggttctgaaagcagacctcaacatcatcctttcttcacccgagcaactagaactcttcctgctggcacagcagaaggtgccaagcaaactgaagaaacttgtggggagcgtcaacctgttcagcgatgagaatgtcccccgtctggtgaatgtgcttaagatggcggcaagctctgttaagaaagatcggaagctgcctgccattgcactggacctgctgcgcctggcactgaaggaggacaagtttcccagattctggaaagaggttgttgaacaaggcttactcaaaatgcagttttggccagcgagctatttgtgcttccgcctattgggcgcagcactccctctcttgactaaggagcagctgcacctggtgatgcagggcgatgttattaggcactatggggagcatgtttgcaccgcaaagttgcctaagcaatttaaattcgctcctgaaatggacgactacgtgggaacctttctcgaagggtgccaagacgatcctgaaaggcaactcgctgtgctcgtggctttctctagtgtgacaaaccagggactgccggtgacgccgacattctggcgcgtggtgcggttcctatccccacccgcactgcagggatacgtggcctggctgcgcgctatgttcttacagcccgatctcgactcactcgtagacttctctacgaataaccagaagaaggctcaggatagctcacttcatatgccagaaagagccgtattccgcttacgaaagtggattattttccgacttgtgagcatagtcgacagccttcacctggaaatggaggaggctttaactgagcaggtcgccaggttttgtctcttccactcgttcttcgtgaccaagaaacctacaagccagatacctgaaaccaagcatcctttcagtttccctcttgagaatcaggcaagagaagccgtttcgagtgccttctttagcctgctacagacattaagcacacagtttaaacaggccccaggacagacccagggaggccagccttggacctatcacctggttcaattcgcggacctgctcttgaatcatagtcacaatgttactacggtgaccccgttcaccgcccaacagagacaggcctgggatcgaatgcttcaaacgctaaaagagctggaggcccattctgcggaagccagagcggcagctttccagcatttactgttgctcgtaggtattcacttgctgaagtccccagcagaaagctgcgacttgctgggggatattcagacttgcatccgtaaaagtcttggcgaaaagcctagacgaagtcgcaccaaaacaatcgatccacaggagcccccttgggtggaggttctggtcgagattctgctggccctacttgcccagccctcccacctcatgaggcaggttgcacgctcagtgtttggacatatttgtagccacctgaccccaagggccctgcaacttattttggatgtgctgaatccggagactagtgaagacgaaaacgaccgcgtagtggtgaccgacgattccgacgaaaggcgtctgaagggtgccgaggacaaaagcgaagagggagaggacaataggtcatccgaaagcgaggaagagtctgagggagaggagtcagaagaggaagaacgggacggtgacgtggatcagggtttccgagaacaactgatgaccgtattacaggccggaaaggctctgggaggggaggattcagaaaatgaggaagagctgggagatgaggcgatgatggctttagatcagtctcttgcctctctgtttgctgagcaaaagttaaggatacaggctcgccgagacgaaaagaataaactgcagaaggagaaggccctgcggcgagatttccagatcagggtccttgacttagtcgaggtcctcgtgaccaaacaaccagagaacgcacttgtgcttgagctgctggaacccctcttgagtatcatcagaaggagcctgcgatcttcctcgtccaagcaggagcaggacctgttgcacaaaactgccagaatcttcactcatcatctgtgtagggccaggcggtattgccatgacttgggcgaacgcgctggggcactccatgcacaggtcgagagactggtgcagcaagcaggtaggcagcctgactcaccaactgctctctaccacttcaatgcatctctgtacctcttgagggtgctgaaggggaatacggccgagggctgtgtgcacgaaacccaggaaaagcaaaaggctggcaccgacccctcgcatatgccaaccgggcctcaggccgcttcctgtctcgatctcaatctggtgacccgggtatacagcactgccctgagcagctttctcacaaagcgcaacagcccactcacggttccgatgtttctgtcactgttctcccgccaccctgttctctgccaaagccttctgccaattttggtccaacacataaccggcccagtgcgtcctaggcaccaagcgtgcctcttactgcagaaaacactcagcatgcgcgaggtacggtcttgtttcgaagacccagaatggaagcagttaatgggacaggtgctggctaaagtgacggagaacctcagagtcttaggggaggctcagacaaaggcgcagcaccagcaggcccttagcagtctggaactgctgaatgtcctatttcggacctgcaaacacgagaagctgacccttgacctgacggttctgttaggcgtgttgcaaggtcagcagcagagcctgcagcaaggggcacattccacggggagtagccgactccatgacctgtattggcaggccatgaaaacgcttggggtacagcgcccaaagcttgaaaagaaggatgccaaggaaattccttccgctactcaaagcccaataagcaaaaagaggaagaagaaggggtttctccccgaaaccaagaagcgtaagaaacgaaaaagcgaggacggcacccctgcggaggatggcacacccgctgcaacggggggaagtcagcccccttccatgggcaggaaaaaacgcaacaggactaaagcaaaggttccagctcaggccaacggcacccctacaacaaagagcccggctcctggcgctccaacacggagccctagcaccccggctaagtcccctaagctccagaaaaaaaatcagaagccttcacaggtgaacggtgcacctggcagtcctacagaaccggctgggcagaagcaacaccagaaagcgttgcccaaaaaaggtgtactgggcaagagtcctctctccgctttggcacggaaaaaggcaagactgtctctcgtgatcagaagtccatctctcttgcaaagtggcgctaaaaaaaaggcccaagttaggaaagccggaaaaccgtag

SEQ ID NO: 180586 - DNA, 3987 bp, Artificial Sequence
  derived and/or modified sequence
atggagagcagagaccccgcccagcccatgagccccggcgaggccacccagagcggcgccagacccgccgacagatacggcctgctgaagcacagcagagagttcctggacttcttctgggacatcgccaagcccgagcaggagaccagactggccgccaccgagaagctgctggagtacctgagaggcagacccaagggcagcgagatgaagtacgccctgaagagactgatcaccggcctgggcgtgggcagagagaccgccagaccctgctacagcctggccctggcccagctgctgcagagcttcgaggacctgcccctgtgcagcatcctgcagcagatccaggagaagtacgacctgcaccaggtgaagaaggccatgctgagacccgccctgttcgccaacctgttcggcgtgctggccctgttccagagcggcagactggtgaaggaccaggaggccctgatgaagagcgtgaagctgctgcaggccctggcccagtaccagaaccacctgcaggagcagcccagaaaggccctggtggacatcctgagcgaggtgagcaaggccaccctgcaggagatcctgcccgaggtgctgaaggccgacctgaacatcatcctgagcagccccgagcagctggagctgttcctgctggcccagcagaaggtgcccagcaagctgaagaagctggtgggcagcgtgaacctgttcagcgacgagaacgtgcccagactggtgaacgtgctgaagatggccgccagcagcgtgaagaaggacagaaagctgcccgccatcgccctggacctgctgagactggccctgaaggaggacaagttccccagattctggaaggaggtggtggagcagggcctgctgaagatgcagttctggcccgccagctacctgtgcttcagactgctgggcgccgccctgcccctgctgaccaaggagcagctgcacctggtgatgcagggcgacgtgatcagacactacggcgagcacgtgtgcaccgccaagctgcccaagcagttcaagttcgcccccgagatggacgactacgtgggcaccttcctggagggctgccaggacgaccccgagagacagctggccgtgctggtggccttcagcagcgtgaccaaccagggcctgcccgtgacccccaccttctggagagtggtgagattcctgagcccccccgccctgcagggctacgtggcctggctgagagccatgttcctgcagcccgacctggacagcctggtggacttcagcaccaacaaccagaagaaggcccaggacagcagcctgcacatgcccgagagagccgtgttcagactgagaaagtggatcatcttcagactggtgagcatcgtggacagcctgcacctggagatggaggaggccctgaccgagcaggtggccagattctgcctgttccacagcttcttcgtgaccaagaagcccaccagccagatccccgagaccaagcaccccttcagcttccccctggagaaccaggccagagaggccgtgagcagcgccttcttcagcctgctgcagaccctgagcacccagttcaagcaggcccccggccagacccagggcggccagccctggacctaccacctggtgcagttcgccgacctgctgctgaaccacagccacaacgtgaccaccgtgacccccttcaccgcccagcagagacaggcctgggacagaatgctgcagaccctgaaggagctggaggcccacagcgccgaggccagagccgccgccttccagcacctgctgctgctggtgggcatccacctgctgaagagccccgccgagagctgcgacctgctgggcgacatccagacctgcatcagaaagagcctgggcgagaagcccagaagaagcagaaccaagaccatcgacccccaggagcccccctgggtggaggtgctggtggagatcctgctggccctgctggcccagcccagccacctgatgagacaggtggccagaagcgtgttcggccacatctgcagccacctgacccccagagccctgcagctgatcctggacgtgctgaaccccgagaccagcgaggacgagaacgacagagtggtggtgaccgacgacagcgacgagagaagactgaagggcgccgaggacaagagcgaggagggcgaggacaacagaagcagcgagagcgaggaggagagcgagggcgaggagagcgaggaggaggagagagacggcgacgtggaccagggcttcagagagcagctgatgaccgtgctgcaggccggcaaggccctgggcggcgaggacagcgagaacgaggaggagctgggcgacgaggccatgatggccctggaccagagcctggccagcctgttcgccgagcagaagctgagaatccaggccagaagagacgagaagaacaagctgcagaaggagaaggccctgagaagagacttccagatcagagtgctggacctggtggaggtgctggtgaccaagcagcccgagaacgccctggtgctggagctgctggagcccctgctgagcatcatcagaagaagcctgagaagcagcagcagcaagcaggagcaggacctgctgcacaagaccgccagaatcttcacccaccacctgtgcagagccagaagatactgccacgacctgggcgagagagccggcgccctgcacgcccaggtggagagactggtgcagcaggccggcagacagcccgacagccccaccgccctgtaccacttcaacgccagcctgtacctgctgagagtgctgaagggcaacaccgccgagggctgcgtgcacgagacccaggagaagcagaaggccggcaccgaccccagccacatgcccaccggcccccaggccgccagctgcctggacctgaacctggtgaccagagtgtacagcaccgccctgagcagcttcctgaccaagagaaacagccccctgaccgtgcccatgttcctgagcctgttcagcagacaccccgtgctgtgccagagcctgctgcccatcctggtgcagcacatcaccggccccgtgagacccagacaccaggcctgcctgctgctgcagaagaccctgagcatgagagaggtgagaagctgcttcgaggaccccgagtggaagcagctgatgggccaggtgctggccaaggtgaccgagaacctgagagtgctgggcgaggcccagaccaaggcccagcaccagcaggccctgagcagcctggagctgctgaacgtgctgttcagaacctgcaagcacgagaagctgaccctggacctgaccgtgctgctgggcgtgctgcagggccagcagcagagcctgcagcagggcgcccacagcaccggcagcagcagactgcacgacctgtactggcaggccatgaagaccctgggcgtgcagagacccaagctggagaagaaggacgccaaggagatccccagcgccacccagagccccatcagcaagaagagaaagaagaagggcttcctgcccgagaccaagaagagaaagaagagaaagagcgaggacggcacccccgccgaggacggcacccccgccgccaccggcggcagccagccccccagcatgggcagaaagaagagaaacagaaccaaggccaaggtgcccgcccaggccaacggcacccccaccaccaagagccccgcccccggcgcccccaccagaagccccagcacccccgccaagagccccaagctgcagaagaagaaccagaagcccagccaggtgaacggcgcccccggcagccccaccgagcccgccggccagaagcagcaccagaaggccctgcccaagaagggcgtgctgggcaagagccccctgagcgccctggccagaaagaaggccagactgagcctggtgatcagaagccccagcctgctgcagagcggcgccaagaagaaggcccaggtgagaaaggccggcaagccctag

SEQ ID NO: 180587 - protein, 352 aa, Artificial Sequence
  derived and/or modified sequence
MALPFRKDLEKYKDLDEDELLGNLSETELKQLETVLDDLDPENALLPAGFRQKNQTSKSTTGPFDREHLLSYLEKEALEHKDREDYVPYTGEKKGKIFIPKQKPVQTFTEEKVSLDPELEEALTSASDTELCDLAAILGMHNLITNTKFCNIMGSSNGVDQEHFSNVVKGEKILPVFDEPPNPTNVEESLKRTKENDAHLVEVNLNNIKNIPIPTLKDFAKALETNTHVKCFSLAATRSNDPVATAFAEMLKVNKTLKSLNVESNFITGVGILALIDALRDNETLAELKIDNQRQQLGTAVELEMAKMLEENTNILKFGYQFTQQGPRTRAANAITKNNDLVRKRRVEGDHQ

SEQ ID NO: 180588 - protein, 33 aa, Artificial Sequence
  derived and/or modified sequence
MALPFRKDLEKYKDLDEDELLGNLSETELKQLE

SEQ ID NO: 180589 - DNA, 1059 bp, Artificial Sequence
  derived and/or modified sequence
atggccctgcccttcagaaaggacctggagaagtacaaggacctggacgaggacgagctgctgggcaacctgagcgagaccgagctgaagcagctggagaccgtgctggacgacctggaccccgagaacgccctgctgcccgccggcttcagacagaagaaccagaccagcaagagcaccaccggccccttcgacagagagcacctgctgagctacctggagaaggaggccctggagcacaaggacagagaggactacgtgccctacaccggcgagaagaagggcaagatcttcatccccaagcagaagcccgtgcagaccttcaccgaggagaaggtgagcctggaccccgagctggaggaggccctgaccagcgccagcgacaccgagctgtgcgacctggccgccatcctgggcatgcacaacctgatcaccaacaccaagttctgcaacatcatgggcagcagcaacggcgtggaccaggagcacttcagcaacgtggtgaagggcgagaagatcctgcccgtgttcgacgagccccccaaccccaccaacgtggaggagagcctgaagagaaccaaggagaacgacgcccacctggtggaggtgaacctgaacaacatcaagaacatccccatccccaccctgaaggacttcgccaaggccctggagaccaacacccacgtgaagtgcttcagcctggccgccaccagaagcaacgaccccgtggccaccgccttcgccgagatgctgaaggtgaacaagaccctgaagagcctgaacgtggagagcaacttcatcaccggcgtgggcatcctggccctgatcgacgccctgagagacaacgagaccctggccgagctgaagatcgacaaccagagacagcagctgggcaccgccgtggagctggagatggccaagatgctggaggagaacaccaacatcctgaagttcggctaccagttcacccagcagggccccagaaccagagccgccaacgccatcaccaagaacaacgacctggtgagaaagagaagagtggagggcgaccaccagtag

SEQ ID NO: 180590 - DNA, 102 bp, Artificial Sequence
  derived and/or modified sequence
atggccctgcccttcagaaaggacctggagaagtacaaggacctggacgaggacgagctgctgggcaacctgagcgagaccgagctgaagcagctggagtag

SEQ ID NO: 180591 - DNA, 1059 bp, Artificial Sequence
  derived and/or modified sequence
atggcgttaccatttcgtaaggacctcgaaaagtataaggatctagacgaagacgaactgctaggaaaccttagtgaaaccgagttaaaacagctggagacagtgcttgacgacctagaccccgagaacgcactcctccctgcagggttccggcagaagaaccagaccagcaagtctacaactgggccattcgacagagaacaccttctgtcttacctggaaaaggaagctctggagcacaaggacagggaagattatgtcccatatactggggaaaagaagggcaaaatcttcattccgaagcagaagcccgtgcagacgttcaccgaggaaaaagttagtctggacccagagctggaggaagctcttacttctgcgtcagataccgagctatgcgaccttgccgccatcctgggtatgcacaatctgattaccaacacaaagttctgcaacatcatgggatcatctaatggggtagatcaagagcacttcagtaatgtggtgaaaggggagaagatcctgccagtgtttgacgagccaccgaatccaactaatgtcgaggagtccctcaaaagaacaaaggaaaacgacgcccacctggtcgaggtaaatctcaacaacatcaaaaatatacccatcccaacattgaaagactttgctaaagctctggaaactaatactcacgttaagtgcttcagtctggctgctacccgaagtaacgaccctgtagcaacagctttcgcagagatgctaaaggtcaacaagacgctcaagtctctgaatgtggaatcaaacttcattacgggcgtcggtattctggccttgattgacgcactacgagataacgaaacccttgctgagctgaaaatcgataaccagagacagcagctaggcacggcagtggaattggagatggctaagatgcttgaagaaaataccaacatcctgaaattcggttaccagtttactcaacagggaccacgcaccagggcggccaacgcgatcacgaaaaataatgacttagtcagaaagcgccgtgtcgagggtgatcaccagtag

SEQ ID NO: 180592 - DNA, 1059 bp, Artificial Sequence
  derived and/or modified sequence
atggccttacccttccggaaggacctggagaagtacaaagacctggacgaagacgagctcctcggaaacctctccgagaccgagttaaagcagttggaaacggtccttgacgatctggatcctgagaatgcactgcttcccgccggttttcggcaaaagaaccagacctctaaaagtaccactggaccattcgacagggagcacttgctgtcctatttggagaaagaagcgttagaacacaaagatagagaagattacgtcccttatacgggcgagaagaagggcaagatatttatccctaagcagaaaccagtgcagacttttactgaagagaaagtgagtctcgatccagagctggaagaagccctaacctccgcttccgacaccgaattgtgcgacttggctgccatcctgggaatgcacaacttaattaccaacacgaaattttgcaacatcatggggtcctctaatggagtcgatcaggagcacttcagcaacgtggtgaagggtgagaagatcctgccagtgtttgatgaacctccgaaccccaccaacgttgaggaatctcttaagagaaccaaggagaatgatgcacatttagtggaagttaatcttaataacattaaaaacattccaatacccacattgaaggacttcgccaaggccctggaaaccaatacacacgtgaaatgcttctcactggccgcgacacgtagcaatgacccagtggcaacggccttcgccgaaatgctgaaggtgaataagacgctgaaatctttgaatgtagaatcaaatttcatcaccggggtaggcattctcgccctgatcgatgccttgcgagataatgaaaccctcgccgaactgaagattgataaccagcggcagcaactaggtacagccgtggagctcgaaatggcaaagatgctggaagaaaatacgaatatactcaagttcgggtatcagttcacacagcaggggccccgaacaagggccgcgaacgccatcacaaagaacaatgacctagtacggaagaggcgggtcgaaggggaccatcagtag

SEQ ID NO: 180593 - DNA, 102 bp, Artificial Sequence
  derived and/or modified sequence
atggccttaccattcaggaaagacctcgagaagtataaagaccttgatgaagacgaactgctggggaatttgtctgagacagaactaaaacagctcgagtag

SEQ ID NO: 180594 - DNA, 1059 bp, Artificial Sequence
  derived and/or modified sequence
atggccctgcccttcaggaaggacctggagaagtacaaggacctggatgaagatgagctgctgggcaacctgtctgaaacagagctgaagcagctggagaccgtgctggatgacctggaccctgaaaatgccctgctgcctgctggcttccggcagaagaaccagaccagcaagagcaccaccggcccctttgaccgggagcacctgctgagctacctggagaaggaggccctggagcacaaggaccgggaggactatgtgccctacaccggggagaagaagggcaagatcttcatccccaagcagaagcctgtgcagaccttcacagaggagaaggtgtccctggaccctgagctggaggaggccctgaccagcgccagtgacacagagctgtgtgacctggccgccatcctgggcatgcacaacctgatcaccaacaccaagttctgcaacatcatgggcagcagcaatggagtggaccaggagcacttcagcaatgtggtgaagggggagaagatcctgcctgtgtttgatgagccccccaaccccaccaacgtggaggagagcctgaagaggaccaaggaaaatgatgcccacctggtggaggtgaacctgaacaacatcaagaacatccccatccccaccctgaaggactttgccaaggccctggagaccaacacccacgtgaagtgcttcagcctggccgccaccaggagcaatgaccctgtggccacagcctttgctgagatgctgaaggtgaacaagaccctgaagagcctgaatgtggagagcaacttcatcaccggggtgggcatcctggccctgattgatgccctgcgggacaatgagaccctggccgagctgaagattgacaaccagaggcagcagctgggcacagctgtggagctggagatggccaagatgctggaggagaacaccaacatcctgaagtttggctaccagttcacccagcagggccccaggaccagggctgccaatgccatcaccaagaacaatgacctggtgaggaagagaagagtggagggggaccaccagtag

SEQ ID NO: 180595 - DNA, 102 bp, Artificial Sequence
  derived and/or modified sequence
atggccctgcccttcaggaaggacctggagaagtacaaggacctggatgaagatgagctgctgggcaacctgtctgaaacagagctgaagcagctggagtag

SEQ ID NO: 180596 - DNA, 1059 bp, Artificial Sequence
  derived and/or modified sequence
atggccctgcccttccggaaggacctggagaagtacaaggacctggacgaggacgaattgctgggaaacctatccgagacagagctcaaacagctggagactgttctagatgatctggatcccgagaacgcactcctgccggcggggtttcggcaaaaaaatcagacatccaagtctacaactgggcccttcgaccgagaacacttactgtcttacctggaaaaggaggctcttgagcacaaggaccgcgaggattacgtgccctacaccggcgagaagaagggcaaaatctttatcccgaagcagaagcccgtacagaccttcactgaggaaaaggtgagtcttgacccggaactcgaggaggccctgacttccgcctcggataccgaactgtgcgatctggctgccattttaggcatgcataacctgattaccaatacaaagttctgcaatatcatgggatctagcaatggagtggatcaggagcacttcagtaatgttgtcaaaggcgagaaaattctgccagtttttgacgagccaccaaacccaacaaacgtggaggagagcctgaaacgcaccaaggagaacgacgcccaccttgtggaagtcaacctcaacaacatcaagaatatacccatccctacactaaaggatttcgctaaagcactggaaacgaacacacacgtgaagtgtttcagcctcgcagccaccagaagtaacgaccctgtggcaacagcttttgcagaaatgttgaaggtgaacaagaccttaaagtcactgaacgttgaatccaacttcattactggcgttggaattctggcgctgatcgacgctctgagagataacgagacattagccgaactgaaaatcgacaatcaacgccaacagcttggaacggccgttgaactggagatggctaaaatgttggaagaaaacacaaacatcctgaaatttgggtaccaattcacccagcagggtcctaggacccgcgctgccaatgccattacaaagaacaacgatctggttagaaaaaggcgggtggagggggaccaccagtag

SEQ ID NO: 180597 - DNA, 1059 bp, Artificial Sequence
  derived and/or modified sequence
atggccctgcccttccggaaggacctggagaagtacaaggacctggatgaggatgagctcctgggaaacttatctgaaactgagctcaaacagctcgagaccgtgctggacgatctggatcctgaaaacgcacttctccccgccggctttcgtcagaaaaaccagacctcaaaatcaacaaccggcccttttgatagagaacatctgttgtcctatctggaaaaggaggctctcgagcacaaggaccgtgaagattacgtgccgtatacaggtgaaaagaaaggaaaaatctttattcctaagcagaagccagtacagacattcactgaggaaaaagtgtccctagacccggagctggaagaagccttgacgtctgccagcgacacggagctgtgcgatctggcggctatactgggcatgcacaatctgatcacaaacactaaattctgcaatatcatggggtcttcaaacggcgttgaccaagaacacttcagcaacgtagtgaagggcgagaaaattctacctgtgttcgatgagccccctaacccaacaaacgtagaggagagcttaaaaagaacaaaggaaaacgacgcccacctagtagaggtgaacctgaataacatcaaaaatattcccatacctaccttaaaggatttcgccaaggcactggagaccaacacccatgttaaatgcttcagtttggccgccactcgaagtaatgaccccgtggctactgcattcgcagaaatgctgaaagtcaacaaaactctgaagtctctgaatgtggagagtaacttcattacaggggttggtatcctcgctttaattgatgctctgagggataacgagacactggccgagctgaaaatcgacaatcagcggcagcagctaggaactgccgtggaactggaaatggctaagatgttggaggaaaacaccaacatcttgaagttcggataccaatttactcagcagggaccacgcacacgtgcagctaacgccatcacaaaaaacaatgatttggtcaggaaacgcagagtggaaggcgatcaccaatag

SEQ ID NO: 180598 - DNA, 102 bp, Artificial Sequence
  derived and/or modified sequence
atggccctgcccttccggaaggacctggagaagtacaaggacctggacgaagacgaactgctaggtaatctgtctgaaactgaactcaagcagctggagtag

SEQ ID NO: 180599 - DNA, 1059 bp, Artificial Sequence
  derived and/or modified sequence
atggcgctaccatttcgtaaagatcttgaaaaatataaggatctggatgaggatgaacttctcgggaacctgtcagaaacagagctaaagcaacttgaaacggtccttgacgacctggaccccgaaaacgccttactacctgcaggctttcggcaaaagaatcaaacgtctaagagcacaactgggccattcgaccgagaacatctgcttagctatctcgagaaggaagcactcgaacacaaggacagggaagattacgtcccgtacactggtgaaaaaaagggaaagatatttatccctaaacagaagccagtgcaaacattcacagaggagaaagtatctctggaccccgagctggaggaagcattgaccagcgcctctgacacagagctatgcgacctcgctgccatcctgggcatgcacaatctgataactaacactaaattttgtaatattatgggaagtagcaatggagtcgaccaggaacacttttctaacgtggtgaagggagagaaaattctcccggtgttcgacgagcccccaaaccctacaaacgttgaggagtctctcaagagaacgaaagaaaacgatgcccacttagtcgaagtgaaccttaacaatattaaaaatatccctatccccacgctgaaagatttcgccaaggcactcgagaccaatacacatgtaaagtgcttctccctggccgcaacccgatctaacgaccctgtcgcgactgcattcgctgaaatgctcaaggtgaacaagacgctgaagagtctcaacgtggaaagcaatttcatcacaggcgttggcatcctggccctgatcgatgcacttcgcgacaacgaaacccttgctgaactcaagattgataaccagcgccaacaacttggtactgcggtggagctggaaatggcaaagatgctggaagagaacaccaacattctgaagtttggataccagttcacccagcaggggcctagaacgcgtgctgccaacgcaataactaagaacaatgacctggtgcgcaagcgccgagtagagggggatcaccagtag

SEQ ID NO: 180600 - DNA, 1059 bp, Artificial Sequence
  derived and/or modified sequence
atggcattgccatttcggaaagatctcgaaaagtataaagacctagacgaagatgaactgctcgggaacctgtctgagacagaactgaagcagctggagacggttctagacgatttagatccagaaaacgctcttctgccagcaggcttccgccagaagaatcaaacatcaaagtcaacaacaggcccttttgaccgggagcacttgctgtcttacctggagaaggaggcgctggagcacaaggaccgagaagattatgtgccatacaccggggagaagaaaggaaagattttcatccccaaacaaaaaccggtgcagacatttacggaggagaaagtttccctggaccctgagctggaggaagctctaaccagcgcgtctgataccgaactgtgtgacctggccgcaatcctgggaatgcacaacttaataactaataccaagttctgtaatataatggggagtagtaacggagtagaccaggagcatttctccaacgtagtcaaaggcgagaaaattctgcctgtgttcgatgaacccccaaaccccacaaacgtggaggagtccctaaagcgaacaaaggaaaatgatgctcaccttgtggaagtgaatcttaacaacatcaagaatatccccatccccacccttaaggatttcgcgaaagcacttgagaccaatacccacgtgaagtgttttagtctggcagctactcgctcaaatgacccagtagcaacagcttttgcggagatgctcaaagtgaataagacgctaaagtctctgaacgtggaatctaacttcattacgggcgtcggcatcctggcactcatcgatgcactgcgggacaatgaaactctggcagagctcaagatcgacaatcagcggcagcaattggggaccgccgtagaactggagatggctaagatgctcgaggagaacaccaacatcctgaaattcggatatcagttcactcaacagggacccagaacccgcgcagccaatgctataacaaaaaataacgacctggttcgtaaacgtcgcgtcgaaggcgatcaccagtag

SEQ ID NO: 180601 - DNA, 102 bp, Artificial Sequence
  derived and/or modified sequence
atggcgctgccattccggaaagatttggagaaatataaagatttggacgaggatgaactcctagggaatctctcagaaacggagcttaagcagcttgaatag

SEQ ID NO: 180602 - DNA, 4668 bp, Artificial Sequence
  derived and/or modified sequence
gagtgcgcacgcgcgtcggaggcgaaggaggaacccaccgcacctacagggcggtcgagtgagggagctgctggcgggtgggtctggcaactctttgggaggccgacgcgggcggaccggcgggtgctgggaaccgagcctcggcttgcggccggcagtttccgtgggtctgtgaagaggtcggcggcccctgcgggcgccagtcagctttaagaaaaagtagagatcacttctgactgtactgaacagcaaaaattaagtgacttgctgccctgcacatcatggcactgccattccgtaaggacttagaaaagtacaaagaccttgatgaagatgagctccttgggaatctgtcagaaacagaactgaaacaactggaaactgttttggatgatcttgaccccgagaatgcccttctgcctgcagggttccggcagaagaaccagacatcaaagtccaccacagggccatttgatagagagcatctcctttcatatctggagaaagaagcattggagcataaagacagggaagactatgtgccctacactggagaaaaaaaagggaaaatatttatccccaaacagaaacctgtacagacttttacagaagaaaaagtgtctcttgatccagaattagaagaagctttgacaagtgcttctgatacagaattgtgtgacctcgcagcaattcttgggatgcacaatttgataacgaatacaaagttctgtaatataatgggaagtagtaatggtgttgaccaagaacatttttcaaatgtggtcaaaggtgaaaagattcttccggtatttgatgagccaccaaatccaaccaatgtagaagagagtttgaagagaactaaagaaaacgatgctcatcttgttgaagttaatttgaataatataaagaatatcccaattccaaccctaaaagattttgcaaaggctttggaaaccaacacacatgtgaaatgtttcagtcttgcagccacccggagcaatgaccctgttgctactgcttttgcagaaatgctgaaagtgaacaaaactttgaagagcttaaatgtggagtccaactttatcacgggagttgggattctggcactgattgatgcgttaagagataatgaaaccctggcagagctcaagattgacaatcagaggcagcagttggggacagctgtagaattggaaatggccaagatgcttgaggaaaatacaaatatccttaaatttggatatcagtttacacagcagggaccacgaaccagagcagctaatgctataacaaaaaacaatgacttagtgcgtaagagacgagttgaaggagatcaccagtaagtctgcaaaggtgtaatctttggaagacttcagaagatcaccaagggctcatgttggtgacatcatgtaaaattttcctgggtagaagggaaaagactggaaaaatttttttagtgacatgcattttttttttagttgttatcaaattgtaaaatcagtaatgtgatattttatattctgaaacatttctactttctgctaaaatcaattttaatttagtttaattgaatgatttatgatgaatcttgggcaaaaaaatacaactgtaaaaaatttcacaggtcatttgtgtagaataatttgaacattgtgaggaccaatcttttttaaatcaaaagggatgttgctggtatcagaattgttattgcttcatttagacataaaacacttaagtgttttcttcactccgtgacctggagagttttccattttttaaaatacatgaacttggcaagggtgtgatttttctttatcaagagaacaaaatgccagaatgttaaaacagttaactcaaaatctagtcatctgtgtaggagctaaagcaggtctccagggagagagggtggtcgtctgtgcattccaggttactgcacttgtctgatgtgacgtagcaacacccaggtcttcttaaaacaaagtcatcagctttgccaggttacatactttatttaaaagtatagtgaggtcgaagttcattccagtgtttcattttaataatgtgggcattattaaatttttgtggaagctaatagtaaaaaataaaagctgttttcaccacctccctccccaccccccaaaaaaggcgtacagccaactcttagttatttagggtaagagaaaaaagaaaactgttaaacaatgaaatcaaagataataaatatgatagatttccagtatgaggcacttgcaaaacagtcatttaaactgatggttactgtaagtcagttggaagctggcatgtatgtaaattacttggtgttacaccatatccgaagaagttcctatgtgcagtgcagaattgcataaacagtatttaatcactgctacaaatcttccaaccaagaaggaaaactgctattcttcataaatctaatttttagtatatgcttcctttcatcttatacttttatcaatatttataaaagtcatttctataataaaagcagtctttcttgctcaaagtattaaggtgaacaattgaatagagtactgtggtcgggagactgatttgagactgcagagctgatgctgggtagagggtctggacttgtattcatgttctgtctcagggcagcccctggagcaggagatggcagaggcatttacagctgcagaaaacagggaggaatggaatctgaggtagccctggcctcaaaattcaggcctggctgtatcatttacagagatttttctggagggaaaagtctcatttctgaggaaggcaaggtggctaatcattattaattttttttaaactttttgggccgggcgcagtggctcacgcctgtaatcccagcacttttgggaagccaaagtgggtggatcacttaaggtcaggagttcaagaccagcctggccaacatggtgaaaccctgtctctactaaaaatcaaaaaagtagccgggtgtggtggtgcacacctgtaatcccagctactcaggaggctgaggcaggagaattgcttgaacctgggagatggagattgcagtgagctgagatcgtaccactgcactgcagtctgggtgacaaagcaagactctgtctcaaaaaacaaacaaacaaacaaactttttgaaattgaattgcaatatgtctgctactttggcttgggctggacagtttatctaataagcaaggcagcttcttgtgtgctatggtaataagccttcttaacaggctaagcttccctcataagaactgtggtgtttctctttttttttttttgttttggtttgttttggttttttggttttgttttgttttgttttttaaatcagtatccaatgttttataggggccaaaggttaactttgcactattccctgtcagttaaaggccactgatatttttctaagttagcaaggctcacttgcttgctttcttgcctcccttgcctccatccctctcccttcctaccttctctatttacctatttctctccctccctctcttctcctctctttttttttccccgcatatgcagctttttgattgtacttgattttatagagactgcacagttccagcaagattgggagtcaggcatggagcaggcatctcaggctaccagaaagaattggtcacctagactttcagtcaggcatcctcgtttgcattgtcctgtaagtcaattagttgataaatagttcccccttcatcccttaagttttgtttttgtttttgtttttaatataggtaagtgggactctacctaaaattttgcatcatacttatgggtaatatctttttcatatattatttatcaaagtatgaagttgagtattttgcttgtaccatttcaattctgcattatagtagttcattgtataactgaaagaaatgatttcttcataagtgacattaaatatgaacattcatccaattgaatttacaaaatctttccaaaattataagggagaaaaatcgggtttacttcaatctttaaaaatctggcacctcttagtaactttcagtatttctaaattgctctaaaattttataataaatagattagggttttgcaatagtcttaatttttaagccaaaggttttctgagaccttaggttttgtagtctaaccagcttatgtggttatttaaaagaatattctttgtgtttttaaattgctatttttaaaaaagctttttattacccattttataaaatgttatactcatatttgtctgaatttttccagtattcctacatgaaattgtatgtattaaaaactcaatattagtggcaaatattaatactattaaaatggattttggtgctatattcttgtagctaaagcctagtagaattctcaagaataggtgaaatacactttcaaagttgcctgtcatttaaaagaccaaataagcattttgtattaaataaattagcagatggttagagacttcaaggagagttagcttggtcatttaattgcgacttcatgttatttgattgaaataacccacatccttgctttgtataagatattcgctctggagaagttacatgtaaatagaattctataaattgttttccagttgaccgagtatctgttgtgtttttgtttaaaaagaggattccatgacataataaaaattattttaaaaaa

SEQ ID NO: 180603 - DNA, 2054 bp, Artificial Sequence
  derived and/or modified sequence
gactgtactgaacagcaaaaattaagtgacttgctgccctgcacatcatggcactgccattccgtaaggacttagaaaagtacaaagaccttgatgaagatgagctccttgggaatctgtcagaaacagaactgaaacaactggaaactgttttggatgatcttgaccccgagaatgcccttctgcctgcagggttccggcagaagaaccagacatcaaagtccaccacagggccatttgatagagagcatctcctttcatatctggagaaagaagcattggagcataaagacagggaagactatgtgccctacactggagaaaaaaaagggaaaatatttatccccaaacagaaacctgtacagacttttacagaagaaaaagtgtctcttgatccagaattagaagaagctttgacaagtgcttctgatacagaattgtgtgacctcgcagcaattcttgggatgcacaatttgataacgaatacaaagttctgtaatataatgggaagtagtaatggtgttgaccaagaacatttttcaaatgtggtcaaaggtgaaaagattcttccggtatttgatgagccaccaaatccaaccaatgtagaagagagtttgaagagaactaaagaaaacgatgctcatcttgttgaagttaatttgaataatataaagaatatcccaattccaaccctaaaagattttgcaaaggctttggaaaccaacacacatgtgaaatgtttcagtcttgcagccacccggagcaatgaccctgttgctactgcttttgcagaaatgctgaaagtgaacaaaactttgaagagcttaaatgtggagtccaactttatcacgggagttgggattctggcactgattgatgcgttaagagataatgaaaccctggcagagctcaagattgacaatcagaggcagcagttggggacagctgtagaattggaaatggccaagatgcttgaggaaaatacaaatatccttaaatttggatatcagtttacacagcagggaccacgaaccagagcagctaatgctataacaaaaaacaatgacttagtgcgtaagagacgagttgaaggagatcaccagtaagtctgcaaaggtgtaatctttggaagacttcagaagatcaccaagggctcatgttggtgacatcatgtaaaattttcctgggtagaagggaaaagactggaaaaatttttttagtgacatgcattttttttttagttgttatcaaattgtaaaatcagtaatgtgatattttatattctgaaacatttctactttctgctaaaatcaattttaatttagtttaattgaatgatttatgatgaatcttgggcaaaaaaatacaactgtaaaaaatttcacaggtcatttgtgtagaataatttgaacattgtgaggaccaatcttttttaaatcaaaagggatgttgctggtatcagaattgttattgcttcatttagacataaaacacttaagtgttttcttcactccgtgacctggagagttttccattttttaaaatacatgaacttggcaagggtgtgatttttctttatcaagagaacaaaatgccagaatgttaaaacagttaactcaaaatctagtcatctgtgtaggagctaaagcaggtctccctccccaccccccaaaaaaggcgtacagccaactcttagttatttagggtaagagaaaaaagaaaactgttaaacaatgaaatcaaagataataaatatgatagatttccagtatgaggcacttgcaaaacagtcatttaaactgatggttactgtaagtcagttggaagctggcatgtatgtaaattacttggtgttacaccatatccgaagaagttcctatgtgcagtgcagaattgcataaacagtatttaatcactgctacaaatcttccaaccaagaaggaaaactgctattcttcataaatctaatttttagtatatgcttcctttcatcttatacttttatcaatatttataaaagtcatttctataataaaagcagtctttcttgctca

SEQ ID NO: 180604 - DNA, 447 bp, Artificial Sequence
  derived and/or modified sequence
gggagtgcgcacgcgcgtcggaggcgaaggaggaacccaccgcacctacagggcggtcgagtgagggagctgctggcgggtgggtctggcaactctttgggaggccgacgcgggcggaccggcgggtgctgggaaccgagcctcggcttgcggccggcagtttccgtgggtctgtgaagaggtcggcggcccctgcgggcgccagtcagattgggacttgactgagattgatccagggctagttaccatgtatttcctgatggaagaatgttaactttaagaaaaagtagagatcacttctgactgtactgaacagcaaaaattaagtgacttgctgccctgcacatcatggcactgccattccgtaaggacttagaaaagtacaaagaccttgatgaagatgagctccttgggaatctgtcagaaacagaactgaaacaactggaa

SEQ ID NO: 180605 - protein, 351 aa, Artificial Sequence
  derived and/or modified sequence
MALPFQKELEKYKNIDEDELLGKLSEEELKQLENVLDDLDPESAMLPAGFRQKDQTQKAATGPFDREHLLMYLEKEALEQKDREDFVPFTGEKKGRVFIPKEKPIETRKEEKVTLDPELEEALASASDTELYDLAAVLGVHNLLNNPKFDEETANNKGGKGPVRNVVKGEKVKPVFEEPPNPTNVEISLQQMKANDPSLQEVNLNNIKNIPIPTLREFAKALETNTHVKKFSLAATRSNDPVAIAFADMLKVNKTLTSLNIESNFITGTGILALVEALKENDTLTEIKIDNQRQQLGTAVEMEIAQMLEENSRILKFGYQFTKQGPRTRVAAAITKNNDLVRKKRVEADRR

SEQ ID NO: 180606 - DNA, 1056 bp, Artificial Sequence
  derived and/or modified sequence
atggccctgcccttccagaaggagctggagaagtacaagaacatcgacgaggacgagctgctgggcaagctgagcgaggaggagctgaagcagctggagaacgtgctggacgacctggaccccgagagcgccatgctgcccgccggcttcagacagaaggaccagacccagaaggccgccaccggccccttcgacagagagcacctgctgatgtacctggagaaggaggccctggagcagaaggacagagaggacttcgtgcccttcaccggcgagaagaagggcagagtgttcatccccaaggagaagcccatcgagaccagaaaggaggagaaggtgaccctggaccccgagctggaggaggccctggccagcgccagcgacaccgagctgtacgacctggccgccgtgctgggcgtgcacaacctgctgaacaaccccaagttcgacgaggagaccgccaacaacaagggcggcaagggccccgtgagaaacgtggtgaagggcgagaaggtgaagcccgtgttcgaggagccccccaaccccaccaacgtggagatcagcctgcagcagatgaaggccaacgaccccagcctgcaggaggtgaacctgaacaacatcaagaacatccccatccccaccctgagagagttcgccaaggccctggagaccaacacccacgtgaagaagttcagcctggccgccaccagaagcaacgaccccgtggccatcgccttcgccgacatgctgaaggtgaacaagaccctgaccagcctgaacatcgagagcaacttcatcaccggcaccggcatcctggccctggtggaggccctgaaggagaacgacaccctgaccgagatcaagatcgacaaccagagacagcagctgggcaccgccgtggagatggagatcgcccagatgctggaggagaacagcagaatcctgaagttcggctaccagttcaccaagcagggccccagaaccagagtggccgccgccatcaccaagaacaacgacctggtgagaaagaagagagtggaggccgacagaagatag

SEQ ID NO: 180607 - DNA, 1056 bp, Artificial Sequence
  derived and/or modified sequence
atggcattgccctttcaaaaggaacttgaaaagtataagaatattgacgaggacgagcttttgggcaaactgagcgaagaagagctcaaacagctggagaatgtcctagacgatttggaccccgaatccgctatgctacccgcaggcttccgtcagaaggaccagactcagaaagctgctacagggccttttgaccgtgagcatctgctgatgtatctggagaaggaggcgctagaacagaaagatagagaggacttcgtccccttcaccggggagaaaaaagggagggtctttatccctaaggagaagcctattgaaaccaggaaggaggagaaagtaaccttggacccggagctggaagaggctctggcttctgcaagcgatacagagctgtatgacttggccgcagtgttaggcgttcacaatctgctgaataaccctaagtttgatgaggagacagcaaacaacaagggaggtaagggccctgtgcgcaacgtcgttaagggtgagaaggtgaaaccagtgtttgaggagcctccaaatccaactaacgtcgaaatatccttgcaacagatgaaggcaaatgacccctcacttcaggaagtgaatcttaacaacatcaagaatatcccgatccccaccttacgggagttcgctaaggccctggaaacgaacacacacgtgaagaagttttctcttgctgcaacgcggagcaacgaccccgtcgctattgctttcgctgacatgttgaaggtgaataagactttgacttccctgaatatcgaatccaattttattactggcactgggattttggcgctagtggaggctctcaaggagaatgacactctgactgagataaagatcgacaatcaacgccagcagctcggcaccgccgtggaaatggagattgcccaaatgctcgaggagaactccagaatattgaaattcgggtatcagttcacaaagcaaggtccccggacccgagttgctgcagccatcaccaagaacaatgacctcgtgcgtaaaaaaagggttgaggctgacagacggtag

SEQ ID NO: 180608 - DNA, 1056 bp, Artificial Sequence
  derived and/or modified sequence
atggccctgcccttccagaaggagctggagaagtacaagaacattgatgaagatgagctgctgggcaagctgtctgaggaggagctgaagcagctggagaatgtgctggatgacctggaccctgagagcgccatgctgcctgctggcttccggcagaaggaccagacccagaaggccgccaccggcccctttgaccgggagcacctgctgatgtacctggagaaggaggccctggagcagaaggaccgggaggactttgtgcccttcaccggggagaagaagggccgggtcttcatccccaaggagaagcccatcgagaccaggaaggaggagaaggtgaccctggaccctgagctggaggaggccctggccagcgccagtgacacagagctgtatgacctggccgctgtgctgggcgtgcacaacctgctgaacaaccccaagtttgatgaggagacagccaacaacaagggcggcaagggccctgtgagaaatgtggtgaagggggagaaggtgaagcctgtgtttgaggagccccccaaccccaccaacgtggagatcagcctgcagcagatgaaggccaatgaccccagcctgcaggaggtgaacctgaacaacatcaagaacatccccatccccaccctgcgggagtttgccaaggccctggagaccaacacccacgtgaagaagttcagcctggccgccaccaggagcaatgaccctgtggccatcgcctttgctgacatgctgaaggtgaacaagaccctgaccagcctgaacatcgagagcaacttcatcactggaacaggcatcctggccctggtggaggccctgaaggaaaatgacaccctgacagagatcaagattgacaaccagaggcagcagctgggcacagctgtggagatggagatcgcccagatgctggaggagaacagccgcatcctgaagtttggctaccagttcaccaagcagggccccaggaccagggtggccgccgccatcaccaagaacaatgacctggtgaggaagaagagggtggaggccgacagaagatag

SEQ ID NO: 180609 - DNA, 1056 bp, Artificial Sequence
  derived and/or modified sequence
atggccctgcccttccagaaggagctggagaagtacaagaacatcgatgaagacgaactactagggaagctgtccgaagaagaattgaagcagttagagaacgtccttgatgacctcgatcctgaatccgccatgttacctgcagggttccggcaaaaggaccaaacccagaaggctgcaaccgggccattcgacagagagcacctcctgatgtacttggagaaagaggcacttgagcagaaggacagggaggatttcgtcccatttactggagagaaaaagggtcgggtgtttatcccaaaggaaaaacctattgagactagaaaggaggaaaaagtgacgctggatccagagctggaggaggcactagcttctgcttccgacacagaactatacgacctagccgccgtgctcggagtgcacaatctactgaataatccaaaattcgatgaagagactgcaaacaataaggggggaaaggggcctgtccggaacgtagtgaagggggaaaaagttaagccggtatttgaagagccacccaacccaaccaacgtggagattagtctgcaacagatgaaagccaacgatcctagcctccaggaagtaaacttaaataatattaagaatattccgattcccacgttgcgcgaatttgcgaaagctctggaaaccaacacgcacgtcaagaagttcagcttggccgcaacccgctcgaacgatcccgtagccatagcgtttgccgacatgctgaaggtgaacaagacactgacctcattgaatattgaatctaatttcattactggcacgggtattcttgccctggtggaagctctaaaagagaatgacacactgactgagattaagatcgacaaccaacgccaacagcttggtaccgcagtggaaatggagatagcccaaatgctggaagagaattctcgtatcctcaaattcgggtaccagtttactaagcaggggccccgcacacgagtggccgccgcgattaccaaaaataacgatctcgtgcgcaaaaaaagagttgaggctgatcggcggtag

SEQ ID NO: 180610 - DNA, 1056 bp, Artificial Sequence
  derived and/or modified sequence
atggctctgcctttccaaaaggaacttgagaaatataagaatattgacgaagatgaattactaggaaagctgagcgaggaagagcttaagcagctcgagaacgtcctggatgacctcgaccctgagagcgccatgttgcctgctggctttcgacagaaagaccagactcagaaggccgctaccggacccttcgaccgcgaacaccttttgatgtacctggagaaagaggccctcgagcagaaggacagagaggattttgttcctttcaccggagagaagaagggaagggtgtttattcccaaagagaagcctattgagacaaggaaggaggaaaaagtgacactcgaccccgaactagaagaagcacttgcttcagcctctgatacagaactctacgaccttgccgcagtcttgggggttcacaacctactgaacaaccctaaattcgacgaggagaccgctaacaataagggaggtaagggtcctgtgaggaacgtagtgaaaggggaaaaggtgaagccagtatttgaggagcccccaaatcccaccaatgtggagatctcattgcagcaaatgaaggctaatgatccatcactccaagaagtgaacctgaataatatcaaaaacatccctatccctactctccgcgagtttgccaaagcattggagacaaatacccacgtgaaaaaattcagtctcgcagccacgagaagcaatgatccagtggcaatcgcattcgcggatatgttgaaggttaacaaaaccctcacgtccttgaacattgaatccaacttcatcacagggaccggtatacttgccctcgttgaggctctgaaagagaacgatactctgacagagatcaagatcgacaatcagcgacagcagctgggcactgcagtcgagatggaaattgcccagatgcttgaagagaactctcgcattctgaaattcggttaccagtttactaaacagggaccccgtacacgggttgctgctgccattaccaagaataacgacctggttagaaaaaagagggtcgaggctgaccgacgttag

SEQ ID NO: 180611 - DNA, 9191 bp, Artificial Sequence
  derived and/or modified sequence
gcgcgccccggcgccgcgcccggccgggagccgcctgttgatcgccgcgctcgccccggccacggcgccgcccctgttctcccggccccgctccaccggggctgacggactgacggccagcacagccggctccgggatgagcgcacggacggtattctgaagtctcaggaaactggaccatttaaatgtgcatggcccatgagaaaggcttataagaagccatggcactcccctttcaaaaagagctggagaaatacaagaacattgatgaagatgagcttcttggcaaactctcagaagaggaactgaaacagttggaaaatgttctagatgacctagatcctgagagtgccatgctgccagctggatttcgacagaaagaccagacacagaaggcagccaccggcccctttgaccgcgagcacctcctcatgtacctggagaaggaggctttggaacagaaagacagagaggactttgtgcccttcactggagaaaagaaagggagagtctttatccctaaagaaaagcctatagaaactcgtaaagaagaaaaagtgacccttgacccagaactggaagaagctttggccagtgcctctgacaccgaactctatgatcttgcagctgtccttggagtacacaatttgctcaacaatccaaagttcgatgaagaaacagccaacaataaaggtggcaaaggacctgtcagaaatgttgtcaaaggtgaaaaagtaaagccagtatttgaggaaccaccaaatcccacaaatgtggaaataagcctgcagcagatgaaagccaatgatcctagcttgcaagaagtcaacctcaacaacattaagaacattccaattccaaccctgagggaatttgcaaaggctctggagaccaacactcacgtgaagaagttcagcctggccgcaactcgcagcaatgaccctgtggccattgcttttgcagacatgctgaaagtaaacaagaccttgacaagtctaaacatagaatccaattttatcactggaactgggatcctggccctggtagaggcactgaaagaaaatgacaccttgacagaaatcaagattgacaaccagaggcagcagttgggaacagctgtagagatggaaattgcccagatgctggaggagaattcaaggatcctcaagtttggataccagtttaccaagcaagggccacgaacaagggtggcagctgccatcacaaagaataatgacctggttcgtaagaagagagttgaagcagaccgaaggtaaacttccttgaggagaagtgaagtttcactgtggtatggccattgaaaaacaaaaactcttcttcttccccatcaggaccattttatcaaagttcgttcatttccgttaaccacataactaataatttaattgttattcttttttagcactacttatttatcttggattttgtaatatatgcaattgttttatttgctcatgggcacttctggcaacttgacaaatggaccgatgcagattttagagagtgacgacatggaaaatgaatttaaccactttcttattgggttgtcttgctttcttacatgaacttgtttttttaatcactgaaaggaatttagtgtataatatgtgtttgtaactgtgattatgatagaggcctatctctgtttacatgcatagctttgagttaggctaaatacatcagaagtgttctactgaccacataagaagttagtattgccaatctttcactgcatgtgaaaatgtgaccaatttagcacaaattctctcttagttccagaaaaatcagtaaatgcacatgccctgttgattggagatcagtagtgtcatcttcataaagcaagacaacattatgacactttaaaacagtagcaaagaagtctatttattaacccacaaatgtagcatcaagccagactcacaggtagcaaaatgaattacacacctacttttactgactattcaacataaattgaatctttaacatgactttaaaggctatttacaaagctgttttaaagtttttcaaacatgatagaaattttctaaattttagtaagagagaagcttttaaaacagtacattcctgaataaaacaacaatattgtatcttaatcaaggctgtctgatgcagatgattgcattttttggcaaattttagaagcatttattgctttgtctttagtgtaacaagatcactggattaaatataaacattcaggttaattatctagatttttgtccacagtatatgatccatccagacatttgcaaacgtcaggagaaaaatgtgaattatttatccagatgcatgtcatctcaaggacaaagcctgtgaaagtacaagtgagatggttgcattgtagtatgcattaatctttcaatgtagtggtgtaaaaatgcagtgctaaactaatgaagcaggtgactgcagcctttggctcaagctcacaactctgataactgtcagtgcctgaggttgtgattggtgacattctgacactgcccaaggcaactcaccctctattcctcctttctcccctccctttcttccaattcattgtcttttttttcctcttttctctgtaatttgttactaaacaaattccagaatttgtttagtagctgagtgttcctgagttgcctagtagcaataaaacaagtgaataggaaaataattaatatattattctatttagcttgtaaaacacatggaatctgtttaagatagcccttgtaaaattgaacatttacctgtattgtaagtacccacatctgtgtctctgaagtcctttgaaacatctcattatcttgaaatttttttaatgtttgagaacaccataagcagaatattctaacacctttggcccctgaaaatcctttaattagtttatggcttcatctccttatctatttaaaaaacatagtaaataatgtttatggttttcagtctgatttttccttccctttcacccatttaggtgtgatgtgttggagtcaacttgtacaggcttgccaactgttatattttcaagaattttgcaaactggttgttcaatacagccattatttaaaattaaatgatgtgcacttacaactgaatgaattatattaaggacagaagtaacaaatactgtactcaaaaatcttacattttactattttctaacctcttagattatttacatctagtaggtatgtatgtagaaatattaccaaacagtatgctactgaacgtatcctctcaactccatgttcactaccttcttgttactacagtggcttgaaattggccatggtagaaatatttacaccacagaaattagcaatatgtaagaaattggggttttctccctctccagattgctggttgataaacattcatcagcacaccactgggtgaaattatacatttttttatacatatgtttcgcttatcatgttgccgaagggaagaacatttctcttagatgtcttttctcctctttggatttgttacaaacctgtttaagtgctgagtccctgacctgcctctccaagtaagcctttttcctttttttttttttttttcttactctcattcttgccttgactcttaaaatcctggaccctatagagcattccttgcagccccacagtgctgtgggctgggggctaaagcagttcttggcaaactctggcagaaagcaagaaaaaaagaatcagaattcaatcatggctgtttcttttgtacaagcagttgttgatagtattaaagcaagataatgggacattatcaaaaatatagcactgtttttaccttatgaaatagttgggttgcatgcaacagagtctatgaaatcaaatgttttttactaatcagtttgttttcttattacctgtgtttttaaagtggcttgaaaggtggcatttccatgagtgtgcacatattgatgataacccttagaaaaacatacacttgaggagcctatccatcatttaattagcctaggacttcatctccctctctgcccaaagtgtggaagtggtagctctttcatgatcatgggcacagttaatcctttgctatccattgtgatggggcataatgtatataaaatatttttctatgtatttgttctgccagatactgtgttgagatatttggcaatatctggataactgactgaagggagataacttctccccaggcctatctccctcccccttttagagttgtgcaggtccactttaagtgtaaaatcactcacctggacttgtgggcttgtatcaccaacatctattatggcacatgtagatgacatttaggagaaaaaccttagaagtctagaaatcatatgattagttcagcactgcagctccccatctgcttatagtgtataactggaagctctttcatcctcatcagcatgattaaatgacttcgtttctttcatctttggagggtataatgtaaataagtgtcgtgtgtgtatgtgtgtgtgtactgtcagatatctaactaggtatttggctacatctggacaactgattgaagggagatgctctctccccagtcctcttcccttgtcctttttagaattgctgcaggcccaggttaaatatgaaattactccctaggctttgcagtttatgttaccaaccaccacattttatagctatgtagaggatgactcttaggaaataaatattagaagcctagaaatcatttagttgttctagcaccaaatctatccatttgcctaatgtatttaacattccatcctcatcaacatgatgaagcccctttcttccatctttgtagggcacattgtatataaatattttgtacataaagatcatcaaataccataatggggtatttggcttcatctggaaaattgactggagggagatgctgtctcccagccctgcttccctcgtccctgtccaagttgctgcaggcccaggttagaagattaccaacctggaggggcatgcagttcatcttacaataaaagcccattcatttaaaaactcagaaatcatcccagtgcctgtactcctcaaaccaatttccctaagggaagactggcacaccagcccaaagagcaggtgcttctcttccaacagaaacatggcccctgacagggcaccagcattagggaaaccaatgtcctccgaatagctgccatgagaacatttcagatgctcaaactgaaaattcttaaaaccaatattaagcatcagcatgctttaagtgtaagatagccctttggaatttacaaacacatgtgcagctatttccttcttcacagatatgatgtactcagccccctcctaggcactacgaagaagacagaggaagcataaaaattctggactaatataattttatatgtgtttctgagattggggagtagactgagtgccttttttacaaagaagatcccatatttaattcaagtatttatagcatcagcaaaaatgggcagagggcgggaagttgagaacactaggttctgtgctatgttacctgtattcagtagaagtgtttctggagtcaggttttaagtcatgatcctgaagcttccttcccctcttccactaatgatgcaataatagctgttttcattttaacgagcagagaactaagaggaaaggtcctagctctgccttccacttgcagcttccctttacctcctcttattgctttcatctcaaatatccctgctactcaaccaatcctaaagctaaagtactgagatgcacacaaaggaaaggtgtgagagtgcttggaagcatccagctgagcccactggatgaaaatcagacgatagggcctcctgttgtaatatactagccagagaaaagcgccaagaacttcagggatattattcactgctttattgctccctaaccctagatcagattggattttactttgtagttcaggagttaagaagtcaaattgctgaccgaggtggggaaggatgatggaaattaaaggtttacatttgtttaatggcagaactgagatttgctcagcttatctctttcccatctgtctgtaatagcaatgactgaataatcagtagaccaatggaagaggagttgcaagtttaaatttgtaacctgactctgggttctgttctaggaatagtgcatgttttagaggctttgccagttgggatacattgttgacttgggggaggatgaaggagagaactgatgacctagacatagaaaagagtagttaactaactagatgttcttctgatctcttccatggtagacattctgagcacattggcccagttagttggtatggtgaaggggcaccgtactaacagatttggagactgaaacctaatcccatcaccaacacttagcaggtatatgatcatgggcaattcattcaattgcctgccaattatagactatatagggggaagagcactggatttggagtcaagaaacctggacacttggctccacacttccttagctgggtaactttgggcaaaccgcttggtctctcaagcctaaggttcttcagctataaaatgggaataatacttcactaactacctcacagagttgtggtaagaatataatcagataactggataaaaacactatataaactggaaagcgccgtacaaatgtgagagatcagttttattatcaaatcactgttttccactgcctcttgaatcggctttattctaaccaaccattacatctttctcatcttttggagtatgggtaattgaggcttgggtgtgtcatcagggactggagttatttcagctcccatgtagaggtgggagaggtggttgatggggcagtggaagttagataccagcgatgtatatggtaggacattttcctgggtcactttgacagtaccttgggaaattgtcagtccttgcagagggcctaggctgggcacaagggagaaagcgaacagttgactaagaattgaggggagggtctggagcgctactgccctcctgtcattgctgtgggtgggagaggctaagacttcaggtttgactggaggcctaggagagaagagtgtccttagggtttcaagaattttaatgcctagcagctgagtaacaggcattagttctgatagatagtgaaggggagaaagtgccacctgttgtgagatcacctctccagggcagcagctgccttgttatcaccagcaaccttagccctggtcagtaatatttctgctaagaaaggttttgaagcatggcctccaatgactttcataagcccttggaggcaggactgtgtctcatccatctttgtatcttcagtaccatcttgtaaggtgccttgtacatagtaggtgcttaatgaacaaatgttgcttgaatttagctgtcgtccagccccacagagttatgctccatttgccaccatgtgatatttttgagaaacaatagtgatttggatgccagctctatgtgactttgggcaagactctccatctatcttgtcttcatttcatctgtaaaatgaagtgagtagattcaatgctccctaaggtcccttccagctccaatacttgacaagcttgtgattctaaatcgtttccgttgcctctgaacatgggtgagtaatgcctccactgcagctgtttctctccaggaggctttgttcagaggaggtctgactattgcacagccagttttttcttcctcttcagcagttctttactgtcttcagaatggttctggataagcggccttttctgaaaggatatttaaaaatatatactatttaggctgggcccagtggctcatgcctgtaatcccagcactttgggaggtgaaggtgggtggatcacctgaggtcaggagttcaagaccagcctggccaacatggtgaaaccccgtctctactaaaaatacagaaattagctgggccctgtggcaagagcctgttatcccagctactggggaggctgaggcaggaaaatcgcttgaacccaggaggtggaggttgtagtgagccgagatcacaccactgcactccagcctgggtgacaagaacgaaactccatctcaaaaaataaaataaaatatatactatcttgctcctcagaaccagtggggaagaagagggaaggcaaagaaagaaactgagcatagtaaacacagcatttttttgtaggctcttatttaaaatgtgtgtgtgtgtgtgtatgtgtgtgtttctgagtaagtattgactgggaaaaagagagaagtcaatcaaaagtatactgtgcaattgagagaggctggcccaagatttaaaacttcctgtgggtaatctaactgtgagtagataggaatcggccatatgacgaaatgagatcaataggaaatgtgctttttgaggaaattttattttagtaccaaatgttgccagtgacaatcttcagttaagaagtaagttattctgacctaaaattcttatctctgccactttggtttaaaaacaaaaacccttatatacatggaatagttatattttaattaagcatttattttagttgttttcatccattcaagcaaaatgaataagcagcatttttcattgcacttaaaaatgtaaaatacctgcatgccactaatctgtaacattttaccagttcagatgcctgtaatgtgtgactttatgtgtgtctgtgttgttttgaagagaataaaggaaataatactttgcaaactgtttaaacaagtgtttaaacttctattggcaacatttattgggctaagcagttattgaaaactccgcatagttttattttccatttgaaacttcaatcaaatcaagactattatattcattagggaattaaagactaatttgctttttaaatgtgaagttgaacactgtgtggaaagtaaatgtgtgatgaagcaaaatgtataaagtatgaaatattatacttttaccctggataattattcaggaccccagttggcccaaataggtgcaatttttaatcctttgaaattagccagccagacctaatgctaaggtaaatgtaaactgttttaattaattaagatctttctgctttcgaaggtataatgtatctatttctgtcaggaatgatatttccaaatgaaaatgtaaagaacattgggaaataataaactttcctttcaaagtaaaagtaaa

SEQ ID NO: 180612 - protein, 1032 aa, Artificial Sequence
  derived and/or modified sequence
MPGRAEAGEAEEEAGAGSGSEAEEDALWERIEGVRHRLARALNPAKLTPYLRQCRVIDEQDEEEVLSTYRFPCRVNRTGRLMDILRCRGKRGYEAFLEALEFYYPEHFTLLTGQEPAQRCSMILDEEGPEGLTQFLMTEVRRLREARKSQLQREQQLQARGRVLEEERAGLEQRLRDQQQAQERCQRLREDWEAGSLELLRLKDENYMIAMRLAQLSEEKNSAVLRSRDLQLAVDQLKLKVSRLEEECALLRRARGPPPGAEEKEKEKEKEKEPDNVDLVSELRAENQRLTASLRELQEGLQQEASRPGAPGSERILLDILEHDWREAQDSRQELCQKLHAVQGELQWAEELRDQYLQEMEDLRLKHRTLQKDCDLYKHRMATVLAQLEEIEKERDQAIQSRDRIQLQYSQSLIEKDQYRKQVRGLEAERDELLTTLTSLEGTKALLEVQLQRAQGGTCLKACASSHSLCSNLSSTWSLSEFPSPLGGPEATGEAAVMGGPEPHNSEEATDSEKEINRLSILPFPPSAGSILRRQREEDPAPPKRSFSSMSDITGSVTLKPWSPGLSSSSSSDSVWPLGKPEGLLARGCGLDFLNRSLAIRVSGRSPPGGPEPQDKGPDGLSFYGDRWSGAVVRRVLSGPGSARMEPREQRVEAAGLEGACLEAEAQQRTLLWNQGSTLPSLMDSKACQSFHEALEAWAKGPGAEPFYIRANLTLPERADPHALCVKAQEILRLVDSAYKRRQEWFCTRVDPLTLRDLDRGTVPNYQRAQQLLEVQEKCLPSSRHRGPRSNLKKRALDQLRLVRPKPVGAPAGDSPDQLLLEPCAEPERSLRPYSLVRPLLVSALRPVVLLPECLAPRLIRNLLDLPSSRLDFQVCPAESLSGEELCPSSAPGAPKAQPATPGLGSRIRAIQESVGKKHCLLELGARGVRELVQNEIYPIVIHVEVTEKNVREVRGLLGRPGWRDSELLRQCRGSEQVLWGLPCSWVQVPAHEWGHAEELAKVVRGRILQEQARLVWVECGSSRGCPSSSEA

SEQ ID NO: 180613 - protein, 746 aa, Artificial Sequence
  derived and/or modified sequence
MGVGVGLGNGLRLLPWMEASRPGAPGSERILLDILEHDWREAQDSRQELCQKLHAVQGELQWAEELRDQYLQEMEDLRLKHRTLQKDCDLYKHRMATVLAQLEEIEKERDQAIQSRDRIQLQYSQSLIEKDQYRKQVRGLEAERDELLTTLTSLEGTKALLEVQLQRAQGGTCLKACASSHSLCSNLSSTWSLSEFPSPLGGPEATGEAAVMGGPEPHNSEEATDSEKEINRLSILPFPPSAGSILRRQREEDPAPPKRSFSSMSDITGSVTLKPWSPGLSSSSSSDSVWPLGKPEGLLARGCGLDFLNRSLAIRVSGRSPPGGPEPQDKGPDGLSFYGDRWSGAVVRRVLSGPGSARMEPREQRVEAAGLEGACLEAEAQQRTLLWNQGSTLPSLMDSKACQSFHEALEAWAKGPGAEPFYIRANLTLPERADPHALCVKAQEILRLVDSAYKRRQEWFCTRVDPLTLRDLDRGTVPNYQRAQQLLEVQEKCLPSSRHRGPRSNLKKRALDQLRLVRPKPVGAPAGDSPDQLLLEPCAEPERSLRPYSLVRPLLVSALRPVVLLPECLAPRLIRNLLDLPSSRLDFQVCPAESLSGEELCPSSAPGAPKAQPATPGLGSRIRAIQESVGKKHCLLELGARGVRELVQNEIYPIVIHVEVTEKNVREVRGLLGRPGWRDSELLRQCRGSEQVLWGLPCSWVQVPAHEWGHAEELAKVVRGRILQEQARLVWVECGSSRGCPSSSEA

SEQ ID NO: 180614 - protein, 480 aa, Artificial Sequence
  derived and/or modified sequence
MEDLRLKHRTLQKDCDLYKHRMATVLAQLEEIEKERDQAIQSRDRIQLQYSQSLIEKDQYRKQVRGLEAERDELLTTLTSLEGTKALLEVQLQRAQGGTCLKACASSHSLCSNLSSTWSLSEFPSPLGGPEATGEAAVMGGPEPHNSEEATDSEKEINRLSILPFPPSAGSILRRQREEDPAPPKRSFSSMSDITGSVTLKPWSPGLSSSSSSDSVWPLGKPEGLLARGCGLDFLNRSLAIRVSGRSPPGGPEPQDKGPDGLSFYGDRWSGAVVRRVLSGPGSARMEPREQRVEAAGLEGACLEAEAQQRTLLWNQGSTLPSLMDSKACQSFHEALEAWAKGPGAEPFYIRANLTLPERADPHALCVKAQEILRLVDSAYKRRQEWFCTRVDPLTLRDLDRGTVPNYQRAQQLLEVQEKCLPSSRHRGPRSNLKKRALDQLRLVRPKPVGAPAGDSPDQLLLEPCAEPERSLRPYSLVRP

SEQ ID NO: 180615 - DNA, 3099 bp, Artificial Sequence
  derived and/or modified sequence
atgcccggcagagcggaggccggcgaagctgaggaggaggctggcgctgggagcgggtcagaagctgaggaagacgcgctgtgggagcgtattgagggtgtgcgccaccggctggcaagagctctgaatcctgccaagctgaccccttatctgaggcagtgtcgggtgatcgacgagcaggatgaagaggaggtgttgtccacatatagattcccctgccgggtcaaccgaaccggacggctgatggatattcttaggtgccgcggcaagcgaggatatgaggctttcttagaggctctggagttctattaccctgagcactttactctgctgaccggccaagaacctgcccagaggtgctccatgatcctggacgaggagggtccggagggcctgactcagtttttaatgaccgaagtgcgcaggctccgggaggccaggaagtctcaactgcagcgggaacagcaactccaggccagagggcgggtgctggaagaggagagggccggcctggagcagcgtctgagggaccagcagcaggcccaggagcgctgtcagaggttgagagaagattgggaggccggcagcctggaactcctgagacttaaggacgaaaattacatgattgccatgaggttggctcaactcagcgaagaaaagaatagtgccgttttaagatcacgtgatctgcagcttgccgtcgatcaacttaaactgaaggtttctcgactcgaggaggaatgcgctttactaagaagagccagaggtccccccccgggcgcagaagagaaagagaaagagaaggagaaagaaaaggaaccagacaacgtggatcttgtgagtgaattgagagccgaaaatcagaggctgactgccagcctgagggagctgcaggagggattgcaacaggaagcctcccggcccggggcccctgggtcagaacggatcctgttggatattctggaacatgactggcgggaggcgcaagattcccgacaggagttgtgccagaaactgcacgcagttcagggagagcttcaatgggctgaggagctgcgggatcagtatctccaggagatggaggatctccgcctgaagcaccgcacactgcagaaggattgcgacctgtataaacaccggatggctaccgtactggcacagctggaggagatcgagaaggaaagagaccaggctatccagagcagagataggatccaacttcagtacagccagagcctgattgagaaagatcagtaccgtaagcaagtgcgggggcttgaggcggagcgtgacgagctgctaacaactctgacaagcctagagggaactaaggcgttactagaggtccagctgcagagagcccagggcggcacctgtcttaaggcctgcgccagttcacattccctatgttccaacctctctagtacatggtccctatcggagtttcccagtcccctggggggccccgaggccactggagaagccgctgtgatgggaggaccagagcctcataactctgaggaggcaactgactctgagaaggaaataaatcgactttctattctcccattcccgcctagcgccggaagtatcttaagaaggcagcgggaggaagaccctgcgccccccaagcgctcattctcctctatgagtgacatcaccggatccgttactcttaagccctggagcccaggtctgagcagttcctcctcaagcgatagtgtgtggcctctgggcaagccagaaggcttattggctaggggatgtggcctggattttctcaacaggagcttggctataagagtctccggaagatcgccacctggcggcccggagccacaggataagggccctgacggattgagtttttatggggatcgttggtccggtgcagtggttcgtcgggtgctgagtgggcccgggtccgcgcggatggagccccgggaacaaagggttgaggctgcaggactggaaggagcctgccttgaagctgaagcccagcagagaacattgctctggaaccagggttcaacattgccctctctcatggactccaaagcatgccaatctttccacgaagccttggaagcttgggcaaagggtcccggggcggagccattctatatccgcgccaacctgacattacctgagcgcgctgacccacatgcgctctgcgtgaaggcccaggaaattctacggctggtcgattcagcctataagcggagacaggagtggttttgtacccgtgtcgaccctcttaccctccgtgatcttgacagaggcacggtgcccaactaccaacgggcgcaacagctgctcgaagtgcaggaaaaatgccttcccagttcccggcatcgcggccctcgcagcaatctcaaaaagcgcgccttggaccagctgaggctggtccgcccgaagccggtcggggctccggcgggtgacagtccagatcagctcctcctggagccgtgtgcagagccggagagaagtctgcgtccttactctctggtacgacccctcctggtgagcgctctgcggcccgtcgtgctgttaccggagtgcctagcccccaggcttatccgaaatctcctagatctgccctcttcccggttggacttccaagtttgccccgcggaatctctgtccggggaggagctttgtccgtcctccgcccccggcgctcctaaggcccagccagctacccccgggctgggcagcagaattagagctattcaggagtccgtgggcaagaaacactgcctcctggaacttggtgctcggggggtccgcgagctggtgcagaatgaaatctacccaatagtcatacatgtggaagttaccgagaaaaacgtgcgcgaggtcaggggactgttgggacggcccgggtggcgagatagcgagcttcttcgccaatgtaggggtagtgagcaggtcctttggggtcttccttgtagctgggttcaagtgccagcacatgagtggggccatgcagaggaacttgcgaaagtggtccgcgggcgcattcttcaggagcaagctagactcgtgtgggtcgagtgtgggtctagtcgtggttgtcccagcagctccgaagcttag

SEQ ID NO: 180616 - DNA, 3099 bp, Artificial Sequence
  derived and/or modified sequence
atgccaggacgcgcagaagccggcgaggcagaggaggaggcaggggccggttcagggagcgaggcagaggaggatgcgttgtgggaacggatcgagggggtgaggcacagactggcaagagctctgaatcctgcaaaactgactccatatctgcggcaatgccgtgtgatcgacgagcaggacgaagaagaagttctttcaacgtatagattcccatgcagagtgaatcggacaggccgcctgatggacattttgaggtgtcgcgggaagcgaggatacgaagcattcctggaagccttggaattttactaccctgagcattttacactgcttaccggtcaggagcccgcacaacgatgtagcatgatcttggatgaagagggacctgagggtctcacgcaatttctgatgactgaggtgagaagactgagagaggcaagaaagtcccaactacagagagagcaacaactgcaagcccggggaagagtcctggaagaagagcgggccgggctggagcagcgcttacgcgaccaacagcaggcacaggagaggtgccagcgtttgcgggaagattgggaggctggaagcctggagctgctgcggctaaaagatgagaattacatgatcgccatgcgccttgcacaactctctgaggaaaaaaacagcgcggtgctgagatcccgagacctgcagctggcagttgatcaactcaaattgaaggtgtcgaggctggaggaagagtgtgcattgctccgccgcgcaagagggccaccgcccggcgccgaggaaaaagaaaaggaaaaggagaaggagaaagagccagataacgtggatcttgtttccgaactgagggcggagaatcaaaggctgactgcttcactccgggagctgcaggaaggattgcaacaagaagcctcaaggcccggcgcgcctggtagcgagagaattttactcgacattctagaacacgattggagggaagcccaggactcacgtcaggaactgtgccagaaacttcacgcagtccagggtgagcttcaatgggcagaggaactgcgggatcagtacctgcaggaaatggaagacctacgcctgaaacacaggactctgcagaaagactgtgacctgtataagcatagaatggcgacagtgctggcacagctagaggaaatcgagaaggagagggaccaagcgattcagagcagggataggatccaactgcaatattcacagagcctgattgagaaagaccagtaccgaaaacaagtgcgggggctcgaggccgagagggacgagttactcaccacactaacatctctggaaggcactaaggccctgctcgaggtgcaattgcaaagagctcagggggggacctgtctgaaggcatgtgcttcttcccactccttgtgctccaatctgtcctccacatggtcgctttccgaatttccaagccccctgggcggtcccgaggctacgggagaagccgccgtcatgggaggtccagaacctcacaattctgaggaggctaccgactccgagaaggagattaatcggctgtccattctgcctttccccccttccgcgggcagtatactgcggaggcagcgtgaagaagatcctgctccacctaagagaagcttctcctccatgtctgatataacaggctcagtcaccctcaaaccttggagcccagggctctccagctcgtctagtagcgactcagtttggccactggggaagcccgaaggtctgcttgcccgcgggtgcggactcgactttctcaaccgatctttggctatccgtgtctccggaagatcacccccaggaggcccggaaccgcaggacaagggccctgacggcctgtctttttatggagacagatggtctggtgcagttgtcagaagagtcctgagtgggcccggctctgcccggatggaaccacgagagcagcgggttgaggcagcaggactggagggggcatgtctagaggcagaggcgcagcagaggacactgttgtggaatcagggatctacactgccgagcctcatggattcaaaagcctgtcagtctttccacgaagctctcgaagcttgggcgaagggcccaggcgccgagcctttttatatcagggccaacctcacactgcccgaacgggccgaccctcatgccctgtgcgtaaaggctcaagagatcttgagactggtggactccgcatacaagaggagacaggaatggttctgtacccgagtggatccccttaccctgcgggacttagatagaggcaccgttcccaattaccagcgcgcccaacagttactggaggtacaggaaaagtgcctgccatcttcccgccaccggggtcccagaagtaatcttaagaagagagccctcgaccagctacggcttgttagaccaaagcccgttggggctccagctggggattctcccgaccaactcctcttggaaccatgcgctgaaccagagagatccctgcgcccctatagtcttgtgcggccactgctcgtaagcgcactgcgcccagtggtgctcttgcctgaatgtctcgctccgcgcctgattaggaacctgcttgacctgccgtcgtcaaggctagatttccaggtttgtcctgccgaaagcctcagcggggaagagctgtgcccctcttcagctcccggcgctccgaaagcacagcccgcgacccccgggctggggtcgagaatcagagctatccaggaaagcgttgggaagaagcattgtctattggaattgggagccagaggcgtgcgcgaacttgtgcagaacgagatctacccgatcgttatacacgtcgaggtgactgaaaagaatgtgcgcgaggtaagaggcctgctgggtcggcccggttggcgagattccgaactgttacgacagtgtaggggtagtgaacaagtcctttgggggctgccctgctcctgggtacaggtcccagctcacgagtgggggcatgccgaggagctcgccaaagttgtgcggggtcggatcctgcaggaacaggccagactagtgtgggtggagtgcggctcttccagagggtgccccagctcaagtgaggcttag

SEQ ID NO: 180617 - DNA, 2241 bp, Artificial Sequence
  derived and/or modified sequence
atgggtgttggcgttggactcggaaacggcctgagactgctgccttggatggaggccagtcgccccggcgcccctggaagcgaaagaattctgctggatatactcgagcacgattggagggaggcccaagattcccgtcaggagctttgccaaaagttacacgcagtgcaaggggagttacaatgggcagaagagctgcgggatcagtatttgcaggagatggaggacctccgactgaagcatcggacattgcagaaggactgtgacctgtataagcacaggatggccaccgtgttggcccagctagaagaaatagagaaagaacgggatcaggccatccagtcacgggatcggatccagctacaatatagtcaatctcttattgagaaagaccaatatcggaagcaggtaagagggctggaggccgaaagggacgagctgctcaccacactgactagcctggaaggtactaaggccctgctggaggtgcagttacagcgggctcagggaggcacttgtttgaaggcctgtgccagctcacattccttatgctccaatctgtccagcacctggtcactttccgagtttccatcccctttaggcggccctgaagccaccggcgaggcggcggttatgggcggaccagagccacataacagcgaggaggcaaccgactcagagaaagaaattaaccggctgtccattctgcctttccctcccagtgccggttcaattttgcgacgtcagagggaagaagaccccgcccccccaaagaggtcctttagctctatgtccgacatcactgggagtgttaccctgaaaccttggagccctggcctatcatcaagttcaagttctgacagcgtctggcctctggggaaaccagaaggcctgctggccagaggatgtgggctcgattttttaaatcggagtctggccatacgggtgtcgggccggtctccacctggcggccccgagccgcaggataaggggcctgatggcctgagcttttatggagaccgctggtccggagcggtggtgcgcagagtactgagcggacctggctcggcaaggatggaaccgagggagcagagggtagaggctgccggccttgagggagcatgtctagaggctgaggctcagcaaaggactctgttgtggaaccagggtagcactctcccctcccttatggattctaaagcctgtcagagctttcacgaggctctggaggcatgggcaaaaggaccaggcgctgaacccttctatattagagccaatctcacgctgcctgaaagagctgatcctcacgccttgtgtgtgaaggcccaggaaatcttgaggctagtcgactccgcctataaaaggagacaggagtggttctgtactagagtggatccgctcactttgcgcgacctggatcgcggcaccgtgcccaactatcagagagcgcagcaattactggaggtgcaagagaaatgcttgccatctagcagacaccgcggtcccagaagtaacctgaagaaacgagcactggatcagctgcgattagtacggcctaagcctgtaggagcacctgccggagactcacctgatcagcttttgctggaaccttgtgccgagcctgaacgctcactccggccatactctttagtccggcctttgctggtctccgctttgcgcccagtcgtgctactgcccgaatgtttagcacctcggctaatccgtaacctcctggacttgcccagtagccgcctggattttcaggtgtgccccgcagagtctctgagtggggaagaactgtgccctagcagtgcacctggcgcccctaaagcccaacccgccacccccgggttgggctcaaggatccgcgccattcaggagagcgtcggcaaaaaacactgtctgctggaacttggcgcgcgcggagtgcgggagttggtgcaaaacgagatttacccaatcgttatccatgtagaagtgactgagaaaaatgtgcgcgaggtcagggggcttctgggacggccaggctggcgcgactctgaactgcttagacagtgccggggtagcgagcaggtgttatggggtctgccatgcagttgggttcaggtccctgcgcacgagtggggacatgccgaagaattggcaaaggtcgtgcgcggtcgtatactgcaggagcaagccaggctggtatgggtggaatgtggaagttctagaggatgtcccagtagcagcgaagcttag

SEQ ID NO: 180618 - DNA, 1443 bp, Artificial Sequence
  derived and/or modified sequence
atggaagatctccggcttaagcaccgtaccctgcagaaggactgtgacctttacaagcatagaatggcaacggttttagctcagcttgaagagattgaaaaggaacgggaccaagccatccagagtagggacaggattcagctgcagtactcccagtcgttaattgaaaaggatcagtacaggaagcaggtgcgaggcctggaagctgaacgagacgaactattgaccacactcacttcactggagggaacaaaggctctcctcgaagtgcagctccagagggcgcagggtggcacctgcctaaaggcctgtgcaagcagccactcgctatgcagcaacctgagtagcacatggagcctgtccgaatttccatctcccctgggcggacccgaggccaccggggaagctgcagtcatggggggcccagagcctcacaatagcgaagaagccactgattccgaaaaggagattaatagattaagcattctgccatttccaccgagcgctggctccatcctccgacgccaacgcgaggaggatccagcccctcccaagcgcagttttagctcaatgagtgatattaccggatctgtcacactgaagccctggtctccaggcttgtcctcaagctcgagtagtgactctgtgtggccacttggcaaaccagaaggacttcttgctcgcggctgtggcctggacttcctcaaccgctcccttgctattagagtgtcagggcggagcccgcctgggggcccagaaccacaggataaaggacctgacggcctttcattctatggtgatagatggtcaggagccgtggtcagacgtgtgctatccggtccaggtagcgcgagaatggagcctcgagagcaaagagtggaagctgctggattagaaggcgcctgtcttgaagctgaagcccaacagaggacattgctgtggaatcagggcagcactctgccaagtctgatggactcaaaagcctgccagagcttccacgaagccctagaggcctgggctaaaggaccgggtgccgaacctttctatattcgggcaaacctgactctgccagaacgggctgacccccacgcactttgtgtgaaagcacaagagattctacggctcgtggattctgcgtataagaggcggcaagaatggttttgtacccgcgtggatcccctgaccttaagagacctcgaccgtggcacagtcccgaactaccagcgggcacagcaattgctggaagtgcaggagaagtgtttaccctccagcagacataggggaccacgcagtaacctgaaaaagagagctctggatcagctgcgcctggtacggccaaagccagtgggggctccggccggagactcacccgaccagctcctactggagccatgtgctgagcctgagcgcagcctgagaccctattccctggtcaggccctag

SEQ ID NO: 180619 - DNA, 3099 bp, Artificial Sequence
  derived and/or modified sequence
atgcctggccgggcagaggccggggaggccgaggaggaggccggggccggcagcggcagcgaggccgaggaggatgccctgtgggagagaattgaaggagtgcgccaccggctggcccgggccctgaacccagccaagctgaccccctacctgcggcagtgccgggtgattgatgagcaggatgaggaggaggtgctgagcacctaccgcttcccctgccgggtgaacagaacaggccgcctgatggacatcctgcgctgccggggcaagaggggctatgaggccttcctggaggccctggagttctactacccagagcacttcaccctgctgaccggccaggagcccgcccagcgctgcagcatgatcctggatgaggagggccctgagggcctgacccagttcctgatgacagaggtgcggcggctgcgggaggccaggaagagccagctgcagcgggagcagcagctgcaggcccggggccgggtgctggaggaggagagagctggcctggagcagaggctgcgggaccagcagcaggcccaggagcgctgccagaggctgcgggaggactgggaggccggcagcctggagctgctgcggctgaaggatgagaactacatgattgccatgaggctggcccagctgtctgaggagaagaacagcgctgtgctgcggagccgggacctgcagctggccgtggaccagctgaagctgaaggtgtcccggctggaggaggagtgtgccctgctgcggcgggcccggggccccccacctggagctgaggagaaggagaaggagaaggagaaggagaaggagccagacaacgtggacctggtgtctgagctgcgggcagagaaccagaggctgacagccagcctgcgggagctgcaggagggcctgcagcaggaggccagcaggcctggggcccctggcagcgagcgcatcctgctggacatcctggagcatgactggagggaggcccaggacagccggcaggagctgtgccagaagctgcatgctgtgcagggcgagctgcagtgggccgaggagctgcgggaccagtacctgcaggagatggaggacctgcggctgaagcacaggaccctgcagaaggactgtgacctgtacaagcacaggatggccaccgtgctggcccagctggaggagattgagaaggagcgggaccaggccatccagagccgggaccgcatccagctgcagtacagccagagcctcatcgagaaggaccagtacaggaagcaggtgcggggcctggaggccgagagagatgagctgctgaccaccctgaccagcctggagggcaccaaggccctgctggaggtgcagctgcagagggcccagggcggcacctgcctgaaggcctgtgccagcagccacagcctgtgcagcaacctgagcagcacctggagcctgtctgagttccccagccccctgggcggccctgaggccaccggggaggccgctgtgatgggcggccctgagccccacaacagcgaggaggccacagacagcgagaaggagatcaaccggctgagcatcctgcccttccccccatctgctggcagcatcctgcggcggcagcgggaggaggaccctgccccacccaagaggagcttcagctccatgtctgacatcaccggctctgtgaccctgaagccctggagccctggcctgagcagcagcagcagcagtgacagcgtgtggcccctgggcaagccagagggcctgctggcccggggctgcggcctggacttcctgaacagaagcctggccatccgggtgtctggccgcagccccccaggcggccctgagccccaggacaagggcccagatggcctgtccttctacggggaccgctggagcggggctgtggtgcggcgggtgctgagcggccctggcagcgccaggatggagccccgggagcagagggtggaggccgccggcctggagggcgcctgcctggaggccgaggcccagcagaggaccctgctgtggaaccagggcagcaccctgcccagcctgatggacagcaaggcctgccagagcttccacgaggccctggaggcctgggccaagggccctggagctgagcccttctacatccgggccaacctgaccctgcctgagagagctgacccccacgccctgtgtgtgaaggcccaggagatcctgcggctggtggacagcgcctacaagaggcggcaggagtggttctgcaccagggtggaccccctgaccctgcgggacctggaccggggcaccgtgcccaactaccagagggcccagcagctgctggaggtgcaggagaagtgcctgcccagcagccgccaccggggccccaggagcaacctgaagaagagggccctggaccagctgcggctggtgcggcccaagcctgtgggcgccccagctggggacagcccagaccagctgctgctggagccctgtgccgagcctgagaggagcctgcggccctacagcctggtgcggcccctgctggtgtctgccctgcggcctgtggtgctgctgcctgaatgtctggcccccaggctcatccggaacctgctggacctgcccagcagccggctggacttccaggtgtgcccagctgagagcctgagcggggaggagctgtgccccagcagcgcccctggggcccccaaggcccagcctgccaccccaggcctgggcagccgcatccgggccatccaggagagcgtgggcaagaagcactgcctgctggagctgggcgcccggggcgtgcgggagctggtgcagaatgagatctaccccatcgtcatccacgtggaggtgacagagaagaatgtgcgggaggtgcggggcctgctgggccggcccggctggagggacagcgagctgctgcggcagtgccggggcagcgagcaggtgctgtggggcctgccctgctcctgggtgcaggtgcctgcccacgagtggggccatgctgaggagctggccaaggtggtgcggggccgcatcctgcaggagcaggcccggctggtgtgggtggagtgtggcagcagccggggctgccccagcagcagcgaggcctag

SEQ ID NO: 180620 - DNA, 2241 bp, Artificial Sequence
  derived and/or modified sequence
atgggcgtgggcgtgggcctgggcaatggcctgcggctgctgccctggatggaggccagcaggcctggggcccctggcagcgagcgcatcctgctggacatcctggagcatgactggagggaggcccaggacagccggcaggagctgtgccagaagctgcatgctgtgcagggcgagctgcagtgggccgaggagctgcgggaccagtacctgcaggagatggaggacctgcggctgaagcacaggaccctgcagaaggactgtgacctgtacaagcacaggatggccaccgtgctggcccagctggaggagattgagaaggagcgggaccaggccatccagagccgggaccgcatccagctgcagtacagccagagcctcatcgagaaggaccagtacaggaagcaggtgcggggcctggaggccgagagagatgagctgctgaccaccctgaccagcctggagggcaccaaggccctgctggaggtgcagctgcagagggcccagggcggcacctgcctgaaggcctgtgccagcagccacagcctgtgcagcaacctgagcagcacctggagcctgtctgagttccccagccccctgggcggccctgaggccaccggggaggccgctgtgatgggcggccctgagccccacaacagcgaggaggccacagacagcgagaaggagatcaaccggctgagcatcctgcccttccccccatctgctggcagcatcctgcggcggcagcgggaggaggaccctgccccacccaagaggagcttcagctccatgtctgacatcaccggctctgtgaccctgaagccctggagccctggcctgagcagcagcagcagcagtgacagcgtgtggcccctgggcaagccagagggcctgctggcccggggctgcggcctggacttcctgaacagaagcctggccatccgggtgtctggccgcagccccccaggcggccctgagccccaggacaagggcccagatggcctgtccttctacggggaccgctggagcggggctgtggtgcggcgggtgctgagcggccctggcagcgccaggatggagccccgggagcagagggtggaggccgccggcctggagggcgcctgcctggaggccgaggcccagcagaggaccctgctgtggaaccagggcagcaccctgcccagcctgatggacagcaaggcctgccagagcttccacgaggccctggaggcctgggccaagggccctggagctgagcccttctacatccgggccaacctgaccctgcctgagagagctgacccccacgccctgtgtgtgaaggcccaggagatcctgcggctggtggacagcgcctacaagaggcggcaggagtggttctgcaccagggtggaccccctgaccctgcgggacctggaccggggcaccgtgcccaactaccagagggcccagcagctgctggaggtgcaggagaagtgcctgcccagcagccgccaccggggccccaggagcaacctgaagaagagggccctggaccagctgcggctggtgcggcccaagcctgtgggcgccccagctggggacagcccagaccagctgctgctggagccctgtgccgagcctgagaggagcctgcggccctacagcctggtgcggcccctgctggtgtctgccctgcggcctgtggtgctgctgcctgaatgtctggcccccaggctcatccggaacctgctggacctgcccagcagccggctggacttccaggtgtgcccagctgagagcctgagcggggaggagctgtgccccagcagcgcccctggggcccccaaggcccagcctgccaccccaggcctgggcagccgcatccgggccatccaggagagcgtgggcaagaagcactgcctgctggagctgggcgcccggggcgtgcgggagctggtgcagaatgagatctaccccatcgtcatccacgtggaggtgacagagaagaatgtgcgggaggtgcggggcctgctgggccggcccggctggagggacagcgagctgctgcggcagtgccggggcagcgagcaggtgctgtggggcctgccctgctcctgggtgcaggtgcctgcccacgagtggggccatgctgaggagctggccaaggtggtgcggggccgcatcctgcaggagcaggcccggctggtgtgggtggagtgtggcagcagccggggctgccccagcagcagcgaggcctag

SEQ ID NO: 180621 - DNA, 1443 bp, Artificial Sequence
  derived and/or modified sequence
atggaggacctgcggctgaagcacaggaccctgcagaaggactgtgacctgtacaagcacaggatggccaccgtgctggcccagctggaggagattgagaaggagcgggaccaggccatccagagccgggaccgcatccagctgcagtacagccagagcctgattgagaaggaccagtacaggaagcaggtgcggggcctggaggccgagagagatgagctgctgaccaccctgaccagcctggagggcaccaaggccctgctggaggtgcagctgcagagggcccagggcggcacctgcctgaaggcctgtgccagcagccacagcctgtgcagcaacctgagcagcacctggagcctgtctgagttccccagccccctgggcggccctgaggccactggagaggccgctgtgatgggcggccctgagccccacaacagcgaggaggccacagattctgagaaggagatcaaccggctgagcatcctgcccttcccccccagcgctggcagcatcctgcggcggcagcgggaggaggaccctgccccacccaagaggagcttcagctccatgtctgacatcactggatctgtgaccctgaagccctggagccctggcctgagcagcagcagcagcagtgacagcgtgtggcccctgggcaagccagagggcctgctggcccggggctgcggcctggacttcctgaacagaagcctggccatccgggtgtctggccgcagccccccaggcggccctgagccccaggacaagggcccagatggcctgtccttctatggagaccgctggagcggggctgtggtgagaagagtgctgagcggccctggcagcgccaggatggagccccgggagcagagggtggaggccgccggcctggagggcgcctgcctggaggccgaggcccagcagaggaccctgctgtggaaccagggcagcaccctgcccagcctgatggacagcaaggcctgccagagcttccacgaggccctggaggcctgggccaagggccctggagctgagcccttctacatccgggccaacctgaccctgcctgagagagctgacccccacgccctgtgtgtgaaggcccaggagatcctgcggctggtggacagcgcctacaagaggcggcaggagtggttctgcaccagggtggaccccctgaccctgcgggacctggaccggggcaccgtgcccaactaccagagggcccagcagctgctggaggtgcaggagaagtgcctgcccagcagccgccaccggggccccaggagcaacctgaagaagagggccctggaccagctgcggctggtgcggcccaagcctgtgggcgccccagctggggacagcccagaccagctgctgctggagccctgtgccgagcctgagaggagcctgcggccctacagcctggtgcggccctag

SEQ ID NO: 180622 - DNA, 3099 bp, Artificial Sequence
  derived and/or modified sequence
atgcccggccgggccgaggccggcgaggccgaggaggaggccggcgccggaagcggctcagaggccgaggaagacgcactttgggaacggattgagggcgtgcggcacagattggctcgagcattaaatcccgcaaaactgactccttaccttaggcagtgtagggtgatagatgaacaggatgaggaagaagtgctgagtacataccggttcccctgtagggtcaatcggaccggcaggctcatggatatactgcgatgccggggaaaacggggctatgaggccttcctggaagcccttgagttctactaccccgagcactttacactccttacagggcaggagccagcgcaacgttgttcaatgatcttagacgaggaaggtcccgaggggctgacgcagtttctcatgactgaagtccgacgtcttcgagaagccagaaaatcccagctccagagggagcagcagctccaggccaggggcagagtgctcgaggaagaaagggccggcctcgaacagcgtctgagggaccaacagcaggcccaggagaggtgtcaacgtttgcgggaagattgggaagcggggagcctggagctccttaggctaaaggacgagaactatatgatcgccatgcgcttggcacagttatctgaagagaagaacagtgctgtgctacgctcaagagatcttcagcttgctgtggatcagttgaaactgaaggtttctcggctggaggaggagtgcgcgctgttacgtagagcaagaggaccaccacctggcgctgaagaaaaggaaaaagagaaagagaaggagaaggagccagataacgtcgaccttgtaagcgaactccgcgccgagaaccaacgtctcaccgctagtttgcgggaactgcaggaaggcctgcagcaagaagccagccggcctggtgctcctggaagcgagcgcattctgttggacattctagaacacgattggagggaggcccaggatagtcgccaggagctgtgccagaagctgcacgccgttcagggcgagctgcagtgggcggaagagctccgggaccagtatttgcaagagatggaggatttgagattgaaacaccgtacattgcagaaagactgtgatctctataagcacaggatggcaacagtgctggctcaactggaagaaatcgagaaggagcgtgaccaggccatccaaagccgggaccggattcaactgcagtattcgcagtcattgatcgagaaggaccagtatcgtaagcaagttcgcggcttggaggccgaacgcgacgaattactcactacccttacctccttagaaggaaccaaagccttgctggaagtccagctgcagagagctcaggggggtacatgcctgaaagcttgtgcatccagccattccctctgcagcaacttaagttctacatggtctctcagcgaatttcctagtccactgggcggccccgaggccactggcgaggcggctgtaatgggaggaccagaacctcataatagcgaagaggccacggactccgagaaggaaataaatcgactttccatcttaccattccctccatccgccggttcaatactgagacgtcagcgtgaggaggaccccgctccccctaaaaggtccttcagctctatgtctgacatcacaggctccgtgactctgaaaccctggagccctggcctcagttcctcctcctcttccgacagcgtttggccactgggcaaacctgagggtctgctggcaagagggtgtggattggattttctcaataggagcttagccattcgcgttagcgggcgaagtcctccagggggtccagaacctcaggacaagggccccgatggactgtcattttacggtgataggtggagcggagctgtggtgcgtcgggtgctctcgggacccgggtctgcccgcatggagccgcgggaacagcgggtggaagccgcaggcctcgagggagcttgcctggaggccgaggctcagcagagaaccctgctctggaaccaggggagcactctgccatctttgatggacagcaaggcttgtcagtcattccacgaggctctcgaggcctgggccaagggcccaggggccgagcctttttacatccgggcgaatctgacgctgccagaacgcgcagatccacacgccctgtgtgtgaaggcacaggagattctgcgactagttgactctgcatacaaacggagacaagagtggttttgcacgagagtcgaccccttgaccctgagagatctagatagaggtaccgtgccgaattaccagagagcgcagcagcttttggaagtgcaggagaaatgtctgccatcttcacggcatcgcgggcctagatcaaacctgaagaaacgcgccctggaccagctacgactggtgagacctaaaccagtgggtgctccagctggcgatagccctgatcaactgctcctggaaccatgcgccgagcctgagagaagcctgcggccctattctctggtgcggcctctgcttgtgtccgccctcagacctgttgtgcttctgccagaatgcctggcccctaggcttattaggaacctcttggacctgccctcctctaggctggatttccaagtgtgtccagccgagtccttatctggggaggaactgtgcccatcttctgctccaggggcccctaaggcccagcccgccacacccggactgggatcaaggattagggccattcaggaatctgtcggtaaaaagcattgccttcttgagctcggagcccggggggtacgcgagctcgtgcaaaacgagatataccccatcgttattcacgtggaagttacagaaaaaaacgttagagaggttcgaggactgctgggcagaccaggttggcgtgattcggaattattgcgacagtgtcggggctctgagcaggtactgtggggccttccttgttcttgggtgcaggtacctgcccatgaatggggccatgctgaggagcttgctaaagtggtgagggggaggatcttacaggagcaggcacgcctcgtttgggtggaatgtggaagctctaggggctgcccatcttccagcgaggcgtag

SEQ ID NO: 180623 - DNA, 3099 bp, Artificial Sequence
  derived and/or modified sequence
atgcccggccgggccgaggccggcgaggccgaggaggaggccggcgctggttcgggttccgaagccgaagaagatgcactctgggaaaggatcgagggagtgcgacatcggctggcgcgagccctgaacccagctaagcttactccttacctcagacaatgtcgagtcatcgatgagcaggacgaggaggaagtactgtccacttataggttcccctgcagggtcaacagaactggccgactgatggacatcctccgttgcaggggcaagcggggctatgaagccttcctggaagccctggaattctactatccggagcattttactctgctgaccggacaggagccggcgcagcgctgcagtatgattctagacgaggagggacctgaaggattgactcagtttttaatgacagaagtgcgcagattgcgagaagcacggaagagccagttgcagcgggagcaacagcttcaggcgcggggcagggtcctcgaggaggagcgcgctggccttgaacagcgccttcgggatcaacagcaagctcaggaaagatgtcagcgcttgagagaggactgggaagccggctctcttgagctgctgcgccttaaagatgagaattacatgatcgctatgcggctggcacagctgtccgaagaaaagaactcagccgtattgagatccagggacctgcagctagccgtggatcagctgaagctcaaagtgtcgcgcttggaagaagagtgtgccctgctgcggagagctcgcgggcccccacctggggctgaagagaaagaaaaggaaaaggagaaagaaaaagagcccgataacgttgatctggtcagcgagctgcgagctgagaaccagcgtctaactgcttccctgcgcgagttacaggaggggctgcaacaggaggcatctcggcccggcgccccagggagcgagcgtatacttctagacatcctagaacatgactggagggaggctcaggacagtcgacaggagttgtgccaaaagctgcacgccgttcagggtgaactgcaatgggctgaggaactgagggatcagtacctgcaggaaatggaagatctcaggctgaagcaccggaccctacaaaaggactgtgatctgtacaagcacaggatggctacagttctggcgcagctcgaggagatcgagaaagagagggatcaagccatccagtctcgggaccgaatacagctccagtacagccagtctctgattgagaaagaccaatacagaaagcaggtaagaggcctcgaagccgagcgcgacgaacttcttacaacacttaccagccttgagggcaccaaagcgctgctggaggttcaacttcaacgggcccagggaggcacatgtctcaaagcctgtgcgagttcccatagcctgtgttccaatctgagctccacctggtctctgtctgaatttccatcccctttaggaggtccggaagccaccggtgaggccgccgtgatgggtggacctgagcctcacaattctgaggaggctacagattccgagaaagaaattaatcggctgagcatattgccttttcctccttccgcgggaagcatcttgcgccggcagagggaggaagaccccgcacccccaaagcggagcttcagtagtatgtctgacattacggggtccgtaactcttaagccctggagccccgggctcagctcatctagcagttccgattctgtgtggccattggggaagcccgagggactccttgccaggggttgcggactcgacttcttgaacaggtccctggccattcgagttagcgggagaagccctccaggagggcccgaaccacaggataagggacccgacgggctgtccttttatggcgaccgttggtccggtgcagttgtcaggcgcgtccttagcggccccggcagtgcccgcatggaacctagggaacagcgtgtggaggccgcaggcctggaaggcgcatgccttgaagctgaagcacagcagagaacactgttatggaatcagggttcgactctgccctctctaatggattccaaagcttgccaatcattccacgaagccctggaggcgtgggctaaaggacccggtgcagaaccattctatattcgggccaacctgactctcccagaacgcgcggacccccacgctctctgtgtgaaagcccaggagatcctgaggctggtcgatagtgcatacaaaaggagacaggagtggttctgtacacgtgtggatcccttgaccctgcgagacctggatagaggtactgttcctaactatcaaagagcccagcaactcctggaggtgcaagagaaatgcctgccatccagcaggcaccgggggcccaggagtaacttgaagaagcgcgcgcttgaccagctgagacttgttagacccaaacctgtaggggctccggccggcgactctccggaccagctgctgctcgaaccctgtgccgaacctgagaggtccttacgcccctactccctggttcggcctctcctcgtatctgcgctacgcccggttgtcctcctccctgagtgccttgcccctcgcttaataaggaatctgcttgatttgccttccagcagacttgacttccaagtctgccccgccgaatccctgtccggggaggagctatgtccctcgtctgctcctggggccccaaaggcacagcctgcaactcctgggttgggatcgcgcataagggccatacaggagtctgtcgggaagaaacactgtcttttagaattgggagctcgaggagtacgcgagcttgtgcagaatgaaatttatcctattgtgattcatgtggaagttaccgaaaagaacgttcgggaggtgcgcgggctgctggggagacccggctggagagactctgaattgcttaggcagtgtcggggttccgagcaggtcctttggggtctcccctgctcttgggtgcaagtaccggcgcatgagtggggtcacgccgaggaacttgccaaagtggtgcgcggaagaatactgcaggagcaggcacggctggtatgggtggaatgtggcagttctcgtggctgtccctccagctcagaggcctag

SEQ ID NO: 180624 - DNA, 2241 bp, Artificial Sequence
  derived and/or modified sequence
atgggcgtgggcgtgggcctgggcaacggcctgcggctgctgccctggatggaagcttcccgacccggagcccccgggtctgagaggatcctcctagacattttagaacacgactggagagaggcccaggattcaaggcaggaactatgtcagaaactacacgcagtccagggcgagctgcagtgggcagaagagctgagggatcagtatttacaagagatggaggacctgcgcttgaagcaccggacattgcagaaggattgtgacctatataaacatcgcatggcaaccgttcttgcccagctggaggaaatcgaaaaggagcgggatcaggcaatccaatctagagacagaattcaactgcagtactcgcagagcctcatcgagaaggatcagtacagaaaacaggtgaggggactggaggcagaaagggacgagcttcttacgactctcacctctcttgaagggaccaaggctctgctggaagtgcagctgcagcgggcacagggcgggacgtgtctcaaggcttgtgcatcctcccactccctgtgctcaaatcttagcagcacctggtctcttagcgagtttccttctcctctcggaggacccgaggctaccggcgaagctgccgtgatgggtggcccggagcctcacaatagcgaggaggctacagacagtgagaaagaaattaatcgactgagtatcctccccttccccccatcggctggcagtattttgcgacgccagcgggaagaagaccccgctcccccaaaaaggagtttctcttcaatgtctgatatcacgggatctgtcactctcaaaccttggtctcctgggctttcatcgagcagtagttcagacagtgtatggcctttaggaaagccagaagggctcctagcccgtggctgtggtctggactttctaaacagatcgctggccattagggtgagtggccggtcaccgccgggcgggcctgaaccccaagataagggtcccgacggattaagcttctatggagacagatggagcggtgctgtcgtgcgacgcgtgctgagcggcccggggtccgccagaatggagcctagggagcaacgtgtggaggcggcaggcctggagggggcctgcctcgaggccgaggctcagcagagaaccctcctgtggaatcaaggctccactctaccatctctgatggattctaaggcatgtcagtccttccatgaggctctcgaagcctgggccaagggacccggggctgagcctttttacatacgggccaacctcaccctgcccgagagagctgacccgcatgctttgtgcgttaaggcgcaagagatactgagactggtcgatagtgcctacaagagacgccaggagtggttttgcacccgcgtggatcccttgactctcagagacctagatcgtgggaccgtaccaaactaccagagagcgcagcaattgctcgaagtccaagaaaaatgtctaccctcctccagacatcggggacctaggtcaaaccttaagaaacgtgcgctggaccaactccggctggtcagaccaaagccagtcggggcgccggccggtgacagccccgatcaattactgctggaaccttgcgctgaacctgaacgcagtctgagaccatactcattggttagacctctcctagtgagcgccctacgccccgttgtgctgctccccgagtgtctggcaccgcgcctgattcgcaacttgctggatttgcctagcagtcgcctcgatttccaggtatgtcctgcggagagcctcagcggcgaggagttgtgtccatcatctgccccgggcgcgcctaaggcccagcctgccacacctggattgggttcaagaatccgtgcaattcaggaatccgtgggaaagaagcactgcttgctggagttaggcgctaggggagtgcgtgaactggttcagaacgagatctacccgatagtgatccacgtggaggtgactgagaaaaatgtgcgggaagtacgcgggctattgggcaggccaggctggagggactcagagctcctgcggcagtgcagaggaagcgagcaggtgctttgggggctaccctgcagttgggtacaggtccctgctcacgaatggggccatgccgaagaattagcgaaggtcgtgaggggcaggatcctccaggaacaagcccgcttggtttgggtagagtgtggatcctctagaggctgtccatctagttccgaggcatag

SEQ ID NO: 180625 - DNA, 1443 bp, Artificial Sequence
  derived and/or modified sequence
atggaggacctgcggctgaagcaccggaccctgcagaaggactgcgatctctacaagcatcggatggctacagtactcgcccagctcgaagagattgaaaaagagagggaccaggccattcagtcccgtgaccggatccagctgcaatatagccagagcctcattgaaaaagatcagtaccgtaagcaggttagagggctcgaggccgaaagggacgaactgcttaccacccttaccagtctggaaggtacgaaagcgctgctcgaggtgcagttacagcgcgcacagggcggcacctgcctgaaagcatgtgcatctagtcactccctgtgttcaaacctttcatccacatggtctcttagcgagtttcccagccctttaggtggtcccgaagcaaccggagaggccgccgtgatggggggaccggaaccccataatagcgaggaagccacggacagtgagaaagagattaataggctcagtatcttaccctttccccctagtgctggatccattctgcgtcgacaacgggaggaggaccctgccccacccaaacgctccttctctagcatgtccgatattacaggctcagttactctgaagccatggagtccagggttgtcctccagctcctcctctgatagcgtctggccgctgggcaaacccgagggactcctggcaaggggttgcggtcttgactttttaaataggagccttgccattagggtgagcggccggtcaccaccaggcggcccggagccgcaggacaaggggcctgatggtctgtccttttacggagatcgctggtctggcgctgttgtgcgcagagtcctgtcgggacctggatccgcccggatggaaccacgggagcagcgagtagaggcagcgggactcgaaggcgcttgtctggaggccgaagcgcagcaaaggaccctactctggaatcagggctcaactttgccgtctttgatggacagcaaggcatgccagagttttcacgaggccctcgaagcttgggctaagggtcccggcgccgaaccattttatattcgcgctaatcttacactccctgagcgtgcggaccctcacgccctgtgcgtgaaggctcaggaaatactgcgcctagtggatagtgcatacaaaaggaggcaggaatggttctgtactcgcgtggacccactgacactgcgggacttagatcgagggactgtgcccaattatcagagagctcaacaattgctcgaagtacaggagaagtgccttccaagcagcagacatcgtggaccacggtctaatctcaagaagcgggctctggatcagctgaggctggttcgccccaaacctgttggtgcgcctgctggggactcccctgaccaacttttgttggagccctgtgccgagccagaaaggagcttgcgcccatactccttggtgagaccctag

SEQ ID NO: 180626 - DNA, 3099 bp, Artificial Sequence
  derived and/or modified sequence
atgccaggccgagccgaagcaggtgaggccgaagaagaggctggcgctggcagcggctcagaggcagaagaggatgccctctgggaaaggattgaaggagtgagacatcggcttgctagggccctgaatcccgcaaagctcaccccctatctcagacagtgcagagttatcgacgagcaggatgaggaggaagttttgtccacttatagattcccatgcagggtaaatcgtacggggaggctcatggatatcctgcggtgtagaggcaagcggggttacgaagcgttcctggaggccctggagttctactatccggagcattttacgctcctaaccggtcaggagcccgctcagaggtgttctatgattctggatgaagaaggtcccgaggggctgacccaatttctgatgaccgaggtaagacgacttcgagaagcacgtaagtcacagttgcagagagaacagcaactgcaagccagagggcgagttctggaagaggagcgagccggactggagcaacggctgagggatcagcagcaggctcaggagcgctgtcaacggctccgcgaggattgggaggctgggtcccttgagttactgcgactgaaagacgagaattacatgatcgccatgcgccttgcgcagttgtcggaggagaagaactcagctgtcctgcgatcgcgcgacttgcaactggcggtggatcaactcaaactcaaggtctcccggctggaggaggaatgcgccctgctgcggagggctagaggtccccctcccggtgcagaagaaaaggagaaggagaaggagaaggagaaagaacctgacaacgtcgacctcgtctccgagctgcgggctgagaaccagagactaaccgctagtcttagagaactgcaagaaggcctacagcaggaagcgagtaggcccggtgcccctggctcggagcggatcttgctggatatactcgagcacgactggagggaagcccaggactccagacaggagttgtgccagaagctccacgccgttcaaggagagctccagtgggcagaggaactcagggatcagtacttacaagaaatggaagacctcaggttgaagcatcggaccctgcagaaggactgcgacctttacaagcacaggatggccaccgtactcgcacaactcgaagaaatcgaaaaagagagggaccaagcgatccagagtcgcgaccgtatccaactgcagtacagtcagagccttattgaaaaggatcagtaccgcaagcaggtgagagggttggaagccgaaagggacgaacttctgaccacactgacctctcttgagggaacaaaagccctcctggaggtgcagctgcaaagagcccaggggggtacatgtctaaaagcttgtgctagttcgcacagcctgtgctcaaatttaagcagcacatggtccttgtcagagttcccctccccccttggcggtccggaagccactggggaggctgctgtcatggggggacctgagccccataattccgaggaggctaccgactccgaaaaagagatcaaccggctttccatattaccgttcccaccttctgcaggaagtatcttaagacgacagcgcgaggaggaccccgcaccgccaaagagaagtttctcctctatgtccgacattactggatctgtcacacttaaaccctggagtccaggactgtccagttcctcctcttccgattcagtgtggccattgggcaagccagaggggctgttggctcgtggctgcggtctggattttctgaataggtcactggcgattcgtgtgtctggtcgatcccctcccggaggaccagagccacaggacaaaggcccagatggcctctcgttttacggagacagatggtcaggcgctgtcgtgaggcgcgtccttagcggcccaggctccgctcgcatggagcccagggaacaaagagtcgaggctgcaggactggagggagcttgtcttgaagcagaggctcagcagcgaactctgctgtggaatcagggctctacgctcccatccttgatggattccaaagcatgccagtcttttcacgaagcactggaggcctgggcaaagggacctggtgcagaaccgttctatatccgagcaaacctgacgctgccggagcgagcggacccacatgctctctgtgtgaaggcccaggaaatccttcgactggtggacagcgcttacaagaggagacaggagtggttttgtacaagagtcgatcctctcacactcagggacctggataggggtaccgttcccaactaccaacgagcccagcagttgctggaggttcaggaaaaatgcctcccctcaagcaggcataggggtcctaggtcaaatctaaagaagcgtgccttagaccagctgagacttgttagacccaagcccgttggcgcacctgcgggagattccccagaccagctgctccttgagccctgcgcggaacccgaacggtctttgaggccatacagcttagtccgacctctcctggtcagcgctctgcgaccggttgtcctcctacccgaatgcctggctcctaggttgattcggaacttacttgacctgccctcctcccggctggactttcaagtatgtccagccgaatctttgagcggagaagagctgtgtccttcaagtgctcccggtgcccctaaggctcagcctgcgaccccagggctcggttctcgcattcgagcaatccaagaaagtgtgggcaaaaagcactgtctgcttgaattaggcgcaagaggtgtgcgagaactggtccagaacgaaatatatccaattgttatacacgtcgaggtgactgaaaaaaatgtgagagaagtgaggggtctgctggggcgaccaggttggcgggacagcgagctcctgcgccagtgtagaggatctgagcaagttttgtgggggttgccctgcagttgggtgcaggtgcccgctcacgaatggggccacgctgaagaattggcaaaagttgtgagagggaggattctccaagagcaggctaggctggtctgggtcgagtgcggctcctcacgcggatgtccatctagtagcgaggcctag

SEQ ID NO: 180627 - DNA, 3099 bp, Artificial Sequence
  derived and/or modified sequence
atgcccggaagagcggaggcaggggaggcagaagaggaagctggcgctgggagcggttcagaagcagaggaggatgctctctgggagcgcattgagggggtgaggcatcgcctcgcgcgtgccctcaatcccgctaagttgacgccgtacctccgacagtgtagagtgatcgacgaacaggacgaagaggaggtcctgtcgacatatcggtttccttgcagagtaaaccgaactggcaggttgatggacatactcagatgcagagggaagaggggctacgaagcttttctggaagctctggagttttactatcctgaacactttaccctgctgaccggtcaggagcctgcccagcggtgtagcatgattcttgacgaggaaggccctgagggcctgacgcagtttctcatgacagaagtgaggcggctgagggaggcccgtaagagtcagctccaaagagaacagcagttacaagccagaggacgagtgctggaggaagaaagagccggactcgaacagcgcctgcgtgaccaacagcaagcacaggagcgttgccaaagacttagagaggactgggaggccggaagcctggagctacttcggttgaaggatgaaaattacatgattgcaatgaggctggcccagctgagcgaggagaagaactctgccgtcctacgctctcgcgatctacagttggcagttgaccagctgaagctgaaggtatccagactagaggaggaatgtgctctgctgcgcagagctcgaggccctccccctggggctgaagagaaagagaaagaaaaggagaaggagaaggagcccgacaacgtcgatctcgtgagcgagctcagggccgaaaaccagagactgacagcttctctcagggaactacaggagggtctgcagcaagaggcatcccgccctggagctcccggtagcgagagaatcctactcgacattctcgagcatgattggcgcgaagcccaggatagcaggcaggagctgtgccagaagctccatgccgttcagggcgagctgcagtgggctgaagaactgagggaccagtacctccaggagatggaggatctgaggcttaagcatcggacgctgcaaaaggactgcgacctgtacaagcatcgtatggcaacggtgctggctcagttggaagagatcgaaaaggagagagaccaagccatccagagccgagacagaatccagctgcagtactcacagagcctaattgagaaggatcaatacaggaagcaggtgagggggcttgaggcagaacgcgacgagctcctgactaccctgaccagcttggagggaaccaaagcattgcttgaagttcagctacaaagagcacagggcggtacatgtctgaaggcctgcgcgagttctcacagcctatgcagtaacctgtcctcaacttggtccctgtccgagttcccatcaccccttggcggtcctgaggcaactggagaagccgcagtgatgggcggacctgaaccgcataattcagaggaggcaacagactctgagaaggagatcaaccgcctttctatactgcccttcccgccttctgccggaagtattctccgcaggcagagagaggaggaccccgctccccctaaacgatcattcagctccatgagcgatatcaccggttctgtgactctcaagccctggtcaccagggctttctagctcttcaagcagcgattctgtgtggccccttggaaaacctgaaggtcttttggcaagaggctgcggtctcgacttcctaaaccggagcctggccatccgcgtgtccggacgcagcccccctggtgggccagagccccaggataaaggaccagacggactgtccttttatggcgataggtggtccggagcagtagtgcgacgcgttctgtcaggtccgggatccgctaggatggagcccagagagcagcgggtggaagccgcagggcttgagggagcctgtctcgaggctgaagcacagcaacggaccctgctttggaaccagggctccacactgccaagtttgatggacagcaaagcatgtcagtcatttcacgaggccttggaagcatgggccaaaggaccgggagcagagcccttctacattcgcgctaaccttaccctgcctgagcgggcagacccacacgccctatgcgtgaaagcccaggagatccttcggttggtggactcggcctacaaacgacgccaagagtggttttgtacccgcgtcgatccgttaactctcagggatttggaccggggaaccgttcctaactaccagcgtgcgcaacagcttcttgaagtgcaggagaagtgtctgccctctagtcggcatcgaggaccacggtctaacctcaaaaagcgggctttggaccagcttcgacttgtgcgcccaaagcccgtgggcgctcctgccggagatagcccagatcagcttctgttggaaccctgtgcagagcctgagcgaagtctgaggccttacagcttggtgaggccactgctagttagtgccctgcgaccagtggtcctgctgccagagtgtctggcccctagactgatccgtaacctgctcgacctcccatcttctcggcttgactttcaggtgtgccccgctgagtcgctgtcaggggaggagctgtgtccgtcatctgctccgggtgcgcctaaagctcagcccgcaactccgggtcttggttcccggatcagggcaattcaagagtcagtagggaagaagcactgtctgcttgagcttggagcacgaggcgtgcgtgagctcgttcagaatgagatctaccccatcgtgattcatgtcgaagttactgagaaaaacgtcagagaggtgcgcggtctgttaggccgacctgggtggagagattctgagttgctccgccaatgccgcggatcagagcaggtgctctggggattaccttgctcttgggtgcaggtgccggctcacgaatgggggcacgccgaggaactggcaaaggtggttcggggaaggatcttgcaggagcaagccagactggtgtgggtggaatgtggatcttcccggggatgcccaagcagtagcgaggcctag

SEQ ID NO: 180628 - DNA, 2241 bp, Artificial Sequence
  derived and/or modified sequence
atgggggtaggtgtgggccttgggaatgggctgagactgctgccatggatggaggcctcccggcctggcgcaccaggcagtgagcgaattcttctcgacatattagaacacgactggagagaggctcaggacagcaggcaagagctctgtcaaaagttgcacgcagtgcagggtgagctgcaatgggcggaggagttgcgggaccagtaccttcaggagatggaggatctgcgtctcaagcaccgaacactgcaaaaagattgcgatctgtataagcaccgcatggccaccgtgttagctcagctggaagaaattgagaaagaacgggaccaggctattcagagcagagatcgcatacagctacagtactcccagagtcttattgaaaaggatcagtacaggaaacaggttagagggctggaagctgaaagagatgaactgctgacaacattgacatccttagaaggtacaaaagctctgctggaagtgcaactgcaaagggcgcaggggggtacgtgcctgaaggcatgcgcctcttcccattctctgtgctcaaatctgtcttccacgtggtccctaagtgagttccctagtcccctgggcggacctgaggccaccggcgaagccgctgtgatggggggtcccgaaccacacaattccgaggaggccacggactccgagaaggagattaatagacttagtatcctgccgtttcccccatcagctgggtcgatccttagaaggcagcgcgaagaggaccctgcacctcctaaacgttccttctccagtatgagcgacataaccggatctgttacactgaagccctggagccctggacttagctcctcaagctcttccgacagcgtctggccactgggaaagccagaaggcctgctcgccagaggttgcggcctggatttccttaaccggagccttgccatccgagttagtggaaggtccccccctgggggtcctgagcctcaggataagggcccagatgggctttccttctacggagatcgttggagcggcgcagtggtgcgccgtgtgttgtcaggcccaggctcggcgaggatggaaccaagagaacaacgagtcgaggcagccggacttgagggtgcctgtctagaggcagaggcccagcagcgcacattgctatggaaccaaggttccaccctcccgtctttaatggactctaaggcgtgccaatcctttcatgaagccctggaagcctgggctaaggggccaggtgcagaaccattttatatccgcgcaaatctgacactgcctgaaagggcggatccccacgccctctgcgtaaaagcacaggaaatcttacgcctggtggacagcgcctataaacgacgacaggagtggttttgcacgagagtggacccactgacacttagagacttagatcgcggtacagtccctaactaccagcgtgctcagcaattgctggaagtgcaggagaagtgtctcccaagttcgcggcatagaggccctcgcagcaatctgaagaagagagctctggaccagctccggttagtgcgcccaaaacccgtgggagccccagccggtgactcgcccgatcagcttctcttggagccgtgtgccgagccagagcggagtttacgcccttatagcctggtgcgaccactgttggtttctgcccttcgcccagtcgttctgctgcccgagtgcctggccccacggcttatccggaatctgctcgatttgccctccagcaggctggactttcaagtttgtcccgcagaatctctgtccggggaggagctctgcccttcttccgctccaggtgcccctaaagcccagcccgcaaccccaggcctgggcagtagaattcgggctatccaggagagtgttggcaagaagcattgcctccttgagcttggggcacggggtgtgagggagctggtacagaatgagatctatcctatcgtgatccacgttgaggttacagagaaaaatgtgcgagaggtacgcggactgctaggaaggccagggtggagagattccgagcttctcagacagtgcagaggcagcgagcaagtcctgtgggggctgccatgcagttgggtgcaggtgcctgcccatgaatggggccatgcggaagagctggccaaggtagtacgtggcagaatcctacaagagcaggccagactagtgtgggtggagtgtggctcctccagaggctgcccatcttcctccgaagcatag

SEQ ID NO: 180629 - DNA, 1443 bp, Artificial Sequence
  derived and/or modified sequence
atggaagatctgcggcttaagcatcgcacactccagaaagattgtgacctgtacaaacatcgaatggcaacagtactggcacaactggaggagatcgaaaaggaacgagaccaagcgatccagtccagggatagaattcagctccagtactcccaatccctcatcgagaaggaccaataccggaagcaagtcagggggttagaggccgagagagacgaattactcactaccctgaccagcctggagggaactaaggccttactggaagtacagctgcagcgtgcccagggtgggacttgcttgaaagcatgcgcctcttcgcacagcctgtgctctaatctgtcatcaacctggagccttagcgagttcccatcacctctgggtggacccgaagcgaccggcgaagccgctgtcatggggggtcctgaacctcacaatagcgaggaggctacggactctgagaaagaaattaaccgattatcaatcctgccattcccacccagcgcgggttctatcttgagacgccagcgggaggaggacccagcacctcctaagaggtctttttcatctatgtctgacattaccggctctgtgacccttaaaccatggagcccagggctaagctctagctcgtcttcagatagcgtctggccactgggcaagcctgaagggcttcttgcacggggttgcggactcgactttttgaatcgctccctcgccattagggtcagcgggagatccccgccaggcggtcccgagccccaggacaagggaccagatggcctctctttttatggggaccggtggagcggtgcggtcgtgcgcagagttctgagcggcccagggtcagctcgaatggaaccccgagaacagagagtggaggctgccggactcgaaggcgcatgcctggaggcagaagctcagcagcggactcttctgtggaaccaaggtagcaccttgcccagcctgatggattcaaaggcctgtcaaagcttccacgaggccctcgaggcgtgggcaaagggccctggtgctgagcccttctatattagggccaacctgactctccctgaacgggctgaccctcacgctctgtgcgttaaagcccaggaaatccttaggctcgtcgactctgcttacaagaggcgtcaggaatggttttgcaccagagtggacccactcacacttcgtgatcttgatcgtgggacagtgcctaattaccagagagcccaacagcttctggaagtgcaggaaaaatgtcttccatcctccaggcacaggggccctagaagcaacttgaagaagcgcgctctggatcagctgaggctggtgaggccaaaacctgttggcgctcctgctggcgatagtcctgaccagctcttgctggaaccttgtgctgaacctgaacgatccctgcggccatactccctagtcagaccttag

SEQ ID NO: 180630 - DNA, 3934 bp, Artificial Sequence
  derived and/or modified sequence
ccccgtgcgcctcttgcccgcagaccctgaggacacggccatgccgggccgggcggaggcgggggaggccgaggaggaggccggggccggctcggggtctgaggcggaggaggacgcgctgtgggagcgaatcgagggcgtccggcatcggctggctcgcgccctgaacccggccaagctcacgccgtatctgcgccagtgccgggtcatcgacgagcaggacgaggaggaggtgctgagcacctaccgcttcccgtgccgcgtcaaccgcaccgggcgcctgatggacatcttgcgctgccgtggcaagaggggctatgaggccttcctggaagccctggagttctactaccccgaacacttcacgctgctcacgggccaggaacccgcccagcgctgctccatgatcctcgatgaggaggggcctgagggcctgacccaattcttgatgacagaggtgcgacggctgcgggaagctcgcaagagccagctgcagcgggagcagcaactgcaggcccggggccgggtgctcgaggaggagcgggcagggctggagcagcggctgcgggaccagcagcaggctcaggagcgctgtcaacggctgcgggaggactgggaggcgggcagcctggagctgctgcggctcaaggatgagaactacatgatcgccatgcgcctggcacagctcagtgaggagaagaactcggctgtacttcgcagccgtgacctgcagctggcggtggatcagctcaagctcaaagtgagtcggctggaggaagagtgtgcactgcttcgaagggccaggggcccgccccctggggcagaggagaaggagaaggagaaggagaaggagaaggagccagacaatgtggaccttgtctctgagctgcgtgctgagaaccagcggctgacggcgtcactgcgggagttgcaggagggcctgcagcaggaggcgagccggccgggggccccgggctccgagcgcatcctgctggacatcctagagcatgactggcgggaggcgcaggacagcaggcaggagctgtgccagaagctgcatgccgtgcagggggagctgcagtgggccgaggagctgcgcgaccagtacctgcaggagatggaagacctgcggctcaagcaccgcacgctgcagaaggactgtgacctgtacaagcaccgcatggccactgtcctggcccaactggaggagattgagaaggagcgagaccaggccatccagagccgtgaccggatccagttgcagtactcacagagcctcatcgagaaggaccagtaccgcaagcaggtgcggggcctggaggcggagcgggatgagctgctgacaacgctcaccagcctggagggcaccaaggctctgctggaggttcagctgcagcgggcccagggtggcacctgcctcaaggcctgtgcctcctcccattccctgtgctccaacctcagcagcacttggagcctgagcgagttcccctcccctctgggaggcccagaagcaactggggaggcagctgtcatggggggacctgagcctcacaactcggaggaagccacagacagtgaaaaggagatcaatcggctctccatcctgcccttcccccccagtgccggctccatcctccgccggcagcgtgaggaagaccccgcaccccctaagagatccttcagcagcatgtcagacatcacagggagtgtgacacttaagccctggtcccctggcctctcttcgtcctcatcctctgacagcgtgtggcctttgggaaagccggaaggcctcctggctcggggctgtggcctggacttcctcaacaggtctctggctattcgggtgtctggccggagccccccagggggcccagagccgcaggacaagggaccagatggactgtcgttttatggggacagatggtctggggctgtggtgcgcagggtgctgtctgggcctgggtccgccaggatggaaccaagagagcaaagggtggaagctgctggtctggagggggcgtgcctggaagccgaggcccagcagagaaccttgctctggaatcaggggtccacactcccctccctgatggactcgaaggcctgccagtccttccacgaggccctagaagcctgggcaaagggaccaggtgccgagcccttctacattcgtgccaacctcaccttgcctgagagggcagatccccatgccctttgcgtgaaagcccaagagatccttcgactggtggactcggcatacaagcggaggcaggaatggttctgcacccgggttgaccccctcactctgcgggacctggaccggggcaccgtgcccaattatcagagagcccagcagctcctagaagttcaggagaaatgcctgccctccagccggcaccgaggcccccgcagtaatctgaagaagagagccctggaccagctgcggctggtgaggcccaagcccgtgggggcgcctgcaggggactccccggatcagctgctgctggagccctgtgcagagccggagcggagcctcagaccctacagtttggtgcggccgctactggtgtctgccctgcggcccgtggtgctgttgcctgagtgcctggcgccccggctcatccgtaacctgctagacctgcccagctcccggctggacttccaagtgtgcccagcggaaagcctctctggggaggaactgtgcccatcctcagcgcctggagcccccaaggctcagcctgccacccctgggctaggcagcaggatccgggccatccaggagtctgttgggaagaagcactgcctgctggagctgggtgctcggggtgtgcgggagctggtgcagaacgagatctaccccatcgtcatccacgtggaggtgactgagaagaatgtccgggaagtcaggggtctgctgggccggccgggctggcgggactcagagctgctgcggcagtgccgtggctcagagcaggtgctctgggggctgccctgctcctgggtgcaggtgcccgcccatgagtggggacacgcagaggagctggccaaggtggtgcgcggccgcatcctgcaggagcaggcccgcctcgtgtgggtggagtgcggcagcagcagaggctgccccagcagcagtgaggcctgaggctcatctgatacctgcaccttctccccaagccagcgtggaccctggtgtctatggtgaagctgggccctcccaccctgagccttcctagacccttggactctcagatgcagggcccttggctctggcctctcacccccaaggctgtctctggccctgccgagcctatgggagtcccgggacagagtgcccactcccctctacttgctgctctgggcctccccacctttcctggggtctccacattcccactagtgggtcttatgtgtgtctgtgtcttctccttaaacactcgccctggagtctgttctcacacctgtgcgcaggtttgcacactcaagttctcatgggcaggctcaggtctgtcccgctgccctgggcacgaggtctcctgaggacctgggcctgttctgctcctaggagacctgagcccgttaccgcgtgactcccaccatccagctcgcgctcctcgtggattcagccatgcatggactggggtgttccctggcccatggtcacctgtgcccctcgtgtctcctcacatgggtgtctgtggttctctcctgtgtaaatgtcacgccccacccctgtttcatgtgggcactaacacgtgtgcgttcctggcgggcacactcaggaccgtgcctcacagggcccactccctgcctatgcctccctcttggggggccgaggagggcggctgctctgtcatgagaatgtacggcccgtggatgattaacgggcctttttcacttagaagctgcacattatggagcattaaacacttttgtcata

SEQ ID NO: 180631 - DNA, 4113 bp, Artificial Sequence
  derived and/or modified sequence
ggcgtgcagacggacgcgcggggtggccgggggccggacgcacgacccggggcgggcggcaatgtggggaggcccgggcagcccaggaggctgcggggacgggggcggagccgggggcgccacgggcaccgcccccctgcgccggcggagccgccgcccgagtgcggacccgggagcccgaggcgactgtagcgtgcgggaccctgaggacacggccatgccgggccgggcggaggcgggggaggccgaggaggaggccggggccggctcggggtctgaggcggaggaggacgcgctgtgggagcgaatcgagggcgtccggcatcggctggctcgcgccctgaacccggccaagctcacgccgtatctgcgccagtgccgggtcatcgacgagcaggacgaggaggaggtgctgagcacctaccgcttcccgtgccgcgtcaaccgcaccgggcgcctgatggacatcttgcgctgccgtggcaagaggggctatgaggccttcctggaagccctggagttctactaccccgaacacttcacgctgctcacgggccaggaacccgcccagcgctgctccatgatcctcgatgaggaggggcctgagggcctgacccaattcttgatgacagaggtgcgacggctgcgggaagctcgcaagagccagctgcagcgggagcagcaactgcaggcccggggccgggtgctcgaggaggagcgggcagggctggagcagcggctgcgggaccagcagcaggctcaggagcgctgtcaacggctgcgggaggactgggaggcgggcagcctggagctgctgcggctcaaggatgagaactacatgatcgccatgcgcctggcacagctcagtgaggagaagaactcggctgtacttcgcagccgtgacctgcagctggcggtggatcagctcaagctcaaagtgagtcggctggaggaagagtgtgcactgcttcgaagggccaggggcccgccccctggggcagaggagaaggagaaggagaaggagaaggagaaggagccagacaatgtggaccttgtctctgagctgcgtgctgagaaccagcggctgacggcgtcactgcgggagttgcaggagggcctgcagcaggaggcgagccggccgggggccccgggctccgagcgcatcctgctggacatcctagagcatgactggcgggaggcgcaggacagcaggcaggagctgtgccagaagctgcatgccgtgcagggggagctgcagtgggccgaggagctgcgcgaccagtacctgcaggagatggaagacctgcggctcaagcaccgcacgctgcagaaggactgtgacctgtacaagcaccgcatggccactgtcctggcccaactggaggagattgagaaggagcgagaccaggccatccagagccgtgaccggatccagttgcagtactcacagagcctcatcgagaaggaccagtaccgcaagcaggtgcggggcctggaggcggagcgggatgagctgctgacaacgctcaccagcctggagggcaccaaggctctgctggaggttcagctgcagcgggcccagggtggcacctgcctcaaggcctgtgcctcctcccattccctgtgctccaacctcagcagcacttggagcctgagcgagttcccctcccctctgggaggcccagaagcaactggggaggcagctgtcatggggggacctgagcctcacaactcggaggaagccacagacagtgaaaaggagatcaatcggctctccatcctgcccttcccccccagtgccggctccatcctccgccggcagcgtgaggaagaccccgcaccccctaagagatccttcagcagcatgtcagacatcacagggagtgtgacacttaagccctggtcccctggcctctcttcgtcctcatcctctgacagcgtgtggcctttgggaaagccggaaggcctcctggctcggggctgtggcctggacttcctcaacaggtctctggctattcgggtgtctggccggagccccccagggggcccagagccgcaggacaagggaccagatggactgtcgttttatggggacagatggtctggggctgtggtgcgcagggtgctgtctgggcctgggtccgccaggatggaaccaagagagcaaagggtggaagctgctggtctggagggggcgtgcctggaagccgaggcccagcagagaaccttgctctggaatcaggggtccacactcccctccctgatggactcgaaggcctgccagtccttccacgaggccctagaagcctgggcaaagggaccaggtgccgagcccttctacattcgtgccaacctcaccttgcctgagagggcagatccccatgccctttgcgtgaaagcccaagagatccttcgactggtggactcggcatacaagcggaggcaggaatggttctgcacccgggttgaccccctcactctgcgggacctggaccggggcaccgtgcccaattatcagagagcccagcagctcctagaagttcaggagaaatgcctgccctccagccggcaccgaggcccccgcagtaatctgaagaagagagccctggaccagctgcggctggtgaggcccaagcccgtgggggcgcctgcaggggactccccggatcagctgctgctggagccctgtgcagagccggagcggagcctcagaccctacagtttggtgcggccgctactggtgtctgccctgcggcccgtggtgctgttgcctgagtgcctggcgccccggctcatccgtaacctgctagacctgcccagctcccggctggacttccaagtgtgcccagcggaaagcctctctggggaggaactgtgcccatcctcagcgcctggagcccccaaggctcagcctgccacccctgggctaggcagcaggatccgggccatccaggagtctgttgggaagaagcactgcctgctggagctgggtgctcggggtgtgcgggagctggtgcagaacgagatctaccccatcgtcatccacgtggaggtgactgagaagaatgtccgggaagtcaggggtctgctgggccggccgggctggcgggactcagagctgctgcggcagtgccgtggctcagagcaggtgctctgggggctgccctgctcctgggtgcaggtgcccgcccatgagtggggacacgcagaggagctggccaaggtggtgcgcggccgcatcctgcaggagcaggcccgcctcgtgtgggtggagtgcggcagcagcagaggctgccccagcagcagtgaggcctgaggctcatctgatacctgcaccttctccccaagccagcgtggaccctggtgtctatggtgaagctgggccctcccaccctgagccttcctagacccttggactctcagatgcagggcccttggctctggcctctcacccccaaggctgtctctggccctgccgagcctatgggagtcccgggacagagtgcccactcccctctacttgctgctctgggcctccccacctttcctggggtctccacattcccactagtgggtcttatgtgtgtctgtgtcttctccttaaacactcgccctggagtctgttctcacacctgtgcgcaggtttgcacactcaagttctcatgggcaggctcaggtctgtcccgctgccctgggcacgaggtctcctgaggacctgggcctgttctgctcctaggagacctgagcccgttaccgcgtgactcccaccatccagctcgcgctcctcgtggattcagccatgcatggactggggtgttccctggcccatggtcacctgtgcccctcgtgtctcctcacatgggtgtctgtggttctctcctgtgtaaatgtcacgccccacccctgtttcatgtgggcactaacacgtgtgcgttcctggcgggcacactcaggaccgtgcctcacagggcccactccctgcctatgcctccctcttggggggccgaggagggcggctgctctgtcatgagaatgtacggcccgtggatgattaacgggcctttttcacttagaagctgcacattatggagcattaaacacttttgtcataga

SEQ ID NO: 180632 - DNA, 3127 bp, Artificial Sequence
  derived and/or modified sequence
gcacttggctggggtgtgggtctgggggcaagatcttgggcccagggtctacctgtatgggccaggctcagccccttgaagacccctagtcatgggggtgggagtaggtcttgggaatggcctccgtctgctgccctggatggaggcgagccggccgggggccccgggctccgagcgcatcctgctggacatcctagagcatgactggcgggaggcgcaggacagcaggcaggagctgtgccagaagctgcatgccgtgcagggggagctgcagtgggccgaggagctgcgcgaccagtacctgcaggagatggaagacctgcggctcaagcaccgcacgctgcagaaggactgtgacctgtacaagcaccgcatggccactgtcctggcccaactggaggagattgagaaggagcgagaccaggccatccagagccgtgaccggatccagttgcagtactcacagagcctcatcgagaaggaccagtaccgcaagcaggtgcggggcctggaggcggagcgggatgagctgctgacaacgctcaccagcctggagggcaccaaggctctgctggaggttcagctgcagcgggcccagggtggcacctgcctcaaggcctgtgcctcctcccattccctgtgctccaacctcagcagcacttggagcctgagcgagttcccctcccctctgggaggcccagaagcaactggggaggcagctgtcatggggggacctgagcctcacaactcggaggaagccacagacagtgaaaaggagatcaatcggctctccatcctgcccttcccccccagtgccggctccatcctccgccggcagcgtgaggaagaccccgcaccccctaagagatccttcagcagcatgtcagacatcacagggagtgtgacacttaagccctggtcccctggcctctcttcgtcctcatcctctgacagcgtgtggcctttgggaaagccggaaggcctcctggctcggggctgtggcctggacttcctcaacaggtctctggctattcgggtgtctggccggagccccccagggggcccagagccgcaggacaagggaccagatggactgtcgttttatggggacagatggtctggggctgtggtgcgcagggtgctgtctgggcctgggtccgccaggatggaaccaagagagcaaagggtggaagctgctggtctggagggggcgtgcctggaagccgaggcccagcagagaaccttgctctggaatcaggggtccacactcccctccctgatggactcgaaggcctgccagtccttccacgaggccctagaagcctgggcaaagggaccaggtgccgagcccttctacattcgtgccaacctcaccttgcctgagagggcagatccccatgccctttgcgtgaaagcccaagagatccttcgactggtggactcggcatacaagcggaggcaggaatggttctgcacccgggttgaccccctcactctgcgggacctggaccggggcaccgtgcccaattatcagagagcccagcagctcctagaagttcaggagaaatgcctgccctccagccggcaccgaggcccccgcagtaatctgaagaagagagccctggaccagctgcggctggtgaggcccaagcccgtgggggcgcctgcaggggactccccggatcagctgctgctggagccctgtgcagagccggagcggagcctcagaccctacagtttggtgcggccgctactggtgtctgccctgcggcccgtggtgctgttgcctgagtgcctggcgccccggctcatccgtaacctgctagacctgcccagctcccggctggacttccaagtgtgcccagcggaaagcctctctggggaggaactgtgcccatcctcagcgcctggagcccccaaggctcagcctgccacccctgggctaggcagcaggatccgggccatccaggagtctgttgggaagaagcactgcctgctggagctgggtgctcggggtgtgcgggagctggtgcagaacgagatctaccccatcgtcatccacgtggaggtgactgagaagaatgtccgggaagtcaggggtctgctgggccggccgggctggcgggactcagagctgctgcggcagtgccgtggctcagagcaggtgctctgggggctgccctgctcctgggtgcaggtgcccgcccatgagtggggacacgcagaggagctggccaaggtggtgcgcggccgcatcctgcaggagcaggcccgcctcgtgtgggtggagtgcggcagcagcagaggctgccccagcagcagtgaggcctgaggctcatctgatacctgcaccttctccccaagccagcgtggaccctggtgtctatggtgaagctgggccctcccaccctgagccttcctagacccttggactctcagatgcagggcccttggctctggcctctcacccccaaggctgtctctggccctgccgagcctatgggagtcccgggacagagtgcccactcccctctacttgctgctctgggcctccccacctttcctggggtctccacattcccactagtgggtcttatgtgtgtctgtgtcttctccttaaacactcgccctggagtctgttctcacacctgtgcgcaggtttgcacactcaagttctcatgggcaggctcaggtctgtcccgctgccctgggcacgaggtctcctgaggacctgggcctgttctgctcctaggagacctgagcccgttaccgcgtgactcccaccatccagctcgcgctcctcgtggattcagccatgcatggactggggtgttccctggcccatggtcacctgtgcccctcgtgtctcctcacatgggtgtctgtggttctctcctgtgtaaatgtcacgccccacccctgtttcatgtgggcactaacacgtgtgcgttcctggcgggcacactcaggaccgtgcctcacagggcccactccctgcctatgcctccctcttggggggccgaggagggcggctgctctgtcatgagaatgtacggcccgtggatgattaacgggcctttttcacttagaagctgcacattatggagcattaaacacttttgtcata

SEQ ID NO: 180633 - DNA, 2140 bp, Artificial Sequence
  derived and/or modified sequence
agtgcactcatagtccagcaaactggccatgcacgtctgctcccagcttggtggtcacaccacagctgcccaccccccataccaggccaacttctggctgcacactccgaactggtgattggttaggggcatgggattttgtttgaagctgtgaagacagccacggtcacactgtggcagctctgtagcccttcatagtttagaggcctctgcccacttgctgtcttgtttgattcttgcaacacctttgggaggcaaatgatggggccaggggattgactgggcccattttactgatgaggaaactgaggcccagaggaggtggatcagctcaagctcaaagtgagtcggctggaggaagagtgtgcactgcttcgaagggccaggggcccgccccctggggcagaggagaaggagaaggagaaggagaaggagaaggagccagacaatgtggaccttgtctctgagctgcgtgctgagaaccagcggctgacggcgtcactgcgggagttgcaggagggcctgcagcaggaggcgagccggccgggggccccgggctccgagcgcatcctgctggacatcctagagcatgactggcgggaggcgcaggacagcaggcaggagctgtgccagaagctgcatgccgtgcagggggagctgcagtgggccgaggagctgcgcgaccagtacctgcaggagatggaagacctgcggctcaagcaccgcacgctgcagaaggactgtgacctgtacaagcaccgcatggccactgtcctggcccaactggaggagattgagaaggagcgagaccaggccatccagagccgtgaccggatccagttgcagtactcacagagcctcatcgagaaggaccagtaccgcaagcaggtgcggggcctggaggcggagcgggatgagctgctgacaacgctcaccagcctggagggcaccaaggctctgctggaggttcagctgcagcgggcccagggtggcacctgcctcaaggcctgtgcctcctcccattccctgtgctccaacctcagcagcacttggagcctgagcgagttcccctcccctctgggaggcccagaagcaactggggaggcagctgtcatggggggacctgagcctcacaactcggaggaagccacagacagtgaaaaggagatcaatcggctctccatcctgcccttcccccccagtgccggctccatcctccgccggcagcgtgaggaagaccccgcaccccctaagagatccttcagcagcatgtcagacatcacagggagtgtgacacttaagccctggtcccctggcctctcttcgtcctcatcctctgacagcgtgtggcctttgggaaagccggaaggcctcctggctcggggctgtggcctggacttcctcaacaggtctctggctattcgggtgtctggccggagccccccagggggcccagagccgcaggacaagggaccagatggactgtcgttttatggggacagatggtctggggctgtggtgcgcagggtgctgtctgggcctgggtccgccaggatggaaccaagagagcaaagggtggaagctgctggtctggagggggcgtgcctggaagccgaggcccagcagagaaccttgctctggaatcaggggtccacactcccctccctgatggactcgaaggcctgccagtccttccacgaggccctagaagcctgggcaaagggaccaggtgccgagcccttctacattcgtgccaacctcaccttgcctgagagggcagatccccatgccctttgcgtgaaagcccaagagatccttcgactggtggactcggcatacaagcggaggcaggaatggttctgcacccgggttgaccccctcactctgcgggacctggaccggggcaccgtgcccaattatcagagagcccagcagctcctagaagttcaggagaaatgcctgccctccagccggcaccgaggcccccgcagtaatctgaagaagagagccctggaccagctgcggctggtgaggcccaagcccgtgggggcgcctgcaggggactccccggatcagctgctgctggagccctgtgcagagccggagcggagcctcagaccctacagtttggtgcggccgc

SEQ ID NO: 180634 - DNA, 3099 bp, Artificial Sequence
  derived and/or modified sequence
atgcccggcagagccgaggccggcgaggccgaggaggaggccggcgccggcagcggcagcgaggccgaggaggacgccctgtgggagagaatcgagggcgtgagacacagactggccagagccctgaaccccgccaagctgaccccctacctgagacagtgcagagtgatcgacgagcaggacgaggaggaggtgctgagcacctacagattcccctgcagagtgaacagaaccggcagactgatggacatcctgagatgcagaggcaagagaggctacgaggccttcctggaggccctggagttctactaccccgagcacttcaccctgctgaccggccaggagcccgcccagagatgcagcatgatcctggacgaggagggccccgagggcctgacccagttcctgatgaccgaggtgagaagactgagagaggccagaaagagccagctgcagagagagcagcagctgcaggccagaggcagagtgctggaggaggagagagccggcctggagcagagactgagagaccagcagcaggcccaggagagatgccagagactgagagaggactgggaggccggcagcctggagctgctgagactgaaggacgagaactacatgatcgccatgagactggcccagctgagcgaggagaagaacagcgccgtgctgagaagcagagacctgcagctggccgtggaccagctgaagctgaaggtgagcagactggaggaggagtgcgccctgctgagaagagccagaggccccccccccggcgccgaggagaaggagaaggagaaggagaaggagaaggagcccgacaacgtggacctggtgagcgagctgagagccgagaaccagagactgaccgccagcctgagagagctgcaggagggcctgcagcaggaggccagcagacccggcgcccccggcagcgagagaatcctgctggacatcctggagcacgactggagagaggcccaggacagcagacaggagctgtgccagaagctgcacgccgtgcagggcgagctgcagtgggccgaggagctgagagaccagtacctgcaggagatggaggacctgagactgaagcacagaaccctgcagaaggactgcgacctgtacaagcacagaatggccaccgtgctggcccagctggaggagatcgagaaggagagagaccaggccatccagagcagagacagaatccagctgcagtacagccagagcctgatcgagaaggaccagtacagaaagcaggtgagaggcctggaggccgagagagacgagctgctgaccaccctgaccagcctggagggcaccaaggccctgctggaggtgcagctgcagagagcccagggcggcacctgcctgaaggcctgcgccagcagccacagcctgtgcagcaacctgagcagcacctggagcctgagcgagttccccagccccctgggcggccccgaggccaccggcgaggccgccgtgatgggcggccccgagccccacaacagcgaggaggccaccgacagcgagaaggagatcaacagactgagcatcctgcccttcccccccagcgccggcagcatcctgagaagacagagagaggaggaccccgccccccccaagagaagcttcagcagcatgagcgacatcaccggcagcgtgaccctgaagccctggagccccggcctgagcagcagcagcagcagcgacagcgtgtggcccctgggcaagcccgagggcctgctggccagaggctgcggcctggacttcctgaacagaagcctggccatcagagtgagcggcagaagcccccccggcggccccgagccccaggacaagggccccgacggcctgagcttctacggcgacagatggagcggcgccgtggtgagaagagtgctgagcggccccggcagcgccagaatggagcccagagagcagagagtggaggccgccggcctggagggcgcctgcctggaggccgaggcccagcagagaaccctgctgtggaaccagggcagcaccctgcccagcctgatggacagcaaggcctgccagagcttccacgaggccctggaggcctgggccaagggccccggcgccgagcccttctacatcagagccaacctgaccctgcccgagagagccgacccccacgccctgtgcgtgaaggcccaggagatcctgagactggtggacagcgcctacaagagaagacaggagtggttctgcaccagagtggaccccctgaccctgagagacctggacagaggcaccgtgcccaactaccagagagcccagcagctgctggaggtgcaggagaagtgcctgcccagcagcagacacagaggccccagaagcaacctgaagaagagagccctggaccagctgagactggtgagacccaagcccgtgggcgcccccgccggcgacagccccgaccagctgctgctggagccctgcgccgagcccgagagaagcctgagaccctacagcctggtgagacccctgctggtgagcgccctgagacccgtggtgctgctgcccgagtgcctggcccccagactgatcagaaacctgctggacctgcccagcagcagactggacttccaggtgtgccccgccgagagcctgagcggcgaggagctgtgccccagcagcgcccccggcgcccccaaggcccagcccgccacccccggcctgggcagcagaatcagagccatccaggagagcgtgggcaagaagcactgcctgctggagctgggcgccagaggcgtgagagagctggtgcagaacgagatctaccccatcgtgatccacgtggaggtgaccgagaagaacgtgagagaggtgagaggcctgctgggcagacccggctggagagacagcgagctgctgagacagtgcagaggcagcgagcaggtgctgtggggcctgccctgcagctgggtgcaggtgcccgcccacgagtggggccacgccgaggagctggccaaggtggtgagaggcagaatcctgcaggagcaggccagactggtgtgggtggagtgcggcagcagcagaggctgccccagcagcagcgaggcctag

SEQ ID NO: 180635 - DNA, 2241 bp, Artificial Sequence
  derived and/or modified sequence
atgggcgtgggcgtgggcctgggcaacggcctgagactgctgccctggatggaggccagcagacccggcgcccccggcagcgagagaatcctgctggacatcctggagcacgactggagagaggcccaggacagcagacaggagctgtgccagaagctgcacgccgtgcagggcgagctgcagtgggccgaggagctgagagaccagtacctgcaggagatggaggacctgagactgaagcacagaaccctgcagaaggactgcgacctgtacaagcacagaatggccaccgtgctggcccagctggaggagatcgagaaggagagagaccaggccatccagagcagagacagaatccagctgcagtacagccagagcctgatcgagaaggaccagtacagaaagcaggtgagaggcctggaggccgagagagacgagctgctgaccaccctgaccagcctggagggcaccaaggccctgctggaggtgcagctgcagagagcccagggcggcacctgcctgaaggcctgcgccagcagccacagcctgtgcagcaacctgagcagcacctggagcctgagcgagttccccagccccctgggcggccccgaggccaccggcgaggccgccgtgatgggcggccccgagccccacaacagcgaggaggccaccgacagcgagaaggagatcaacagactgagcatcctgcccttcccccccagcgccggcagcatcctgagaagacagagagaggaggaccccgccccccccaagagaagcttcagcagcatgagcgacatcaccggcagcgtgaccctgaagccctggagccccggcctgagcagcagcagcagcagcgacagcgtgtggcccctgggcaagcccgagggcctgctggccagaggctgcggcctggacttcctgaacagaagcctggccatcagagtgagcggcagaagcccccccggcggccccgagccccaggacaagggccccgacggcctgagcttctacggcgacagatggagcggcgccgtggtgagaagagtgctgagcggccccggcagcgccagaatggagcccagagagcagagagtggaggccgccggcctggagggcgcctgcctggaggccgaggcccagcagagaaccctgctgtggaaccagggcagcaccctgcccagcctgatggacagcaaggcctgccagagcttccacgaggccctggaggcctgggccaagggccccggcgccgagcccttctacatcagagccaacctgaccctgcccgagagagccgacccccacgccctgtgcgtgaaggcccaggagatcctgagactggtggacagcgcctacaagagaagacaggagtggttctgcaccagagtggaccccctgaccctgagagacctggacagaggcaccgtgcccaactaccagagagcccagcagctgctggaggtgcaggagaagtgcctgcccagcagcagacacagaggccccagaagcaacctgaagaagagagccctggaccagctgagactggtgagacccaagcccgtgggcgcccccgccggcgacagccccgaccagctgctgctggagccctgcgccgagcccgagagaagcctgagaccctacagcctggtgagacccctgctggtgagcgccctgagacccgtggtgctgctgcccgagtgcctggcccccagactgatcagaaacctgctggacctgcccagcagcagactggacttccaggtgtgccccgccgagagcctgagcggcgaggagctgtgccccagcagcgcccccggcgcccccaaggcccagcccgccacccccggcctgggcagcagaatcagagccatccaggagagcgtgggcaagaagcactgcctgctggagctgggcgccagaggcgtgagagagctggtgcagaacgagatctaccccatcgtgatccacgtggaggtgaccgagaagaacgtgagagaggtgagaggcctgctgggcagacccggctggagagacagcgagctgctgagacagtgcagaggcagcgagcaggtgctgtggggcctgccctgcagctgggtgcaggtgcccgcccacgagtggggccacgccgaggagctggccaaggtggtgagaggcagaatcctgcaggagcaggccagactggtgtgggtggagtgcggcagcagcagaggctgccccagcagcagcgaggcctag

SEQ ID NO: 180636 - DNA, 1443 bp, Artificial Sequence
  derived and/or modified sequence
atggaggacctgagactgaagcacagaaccctgcagaaggactgcgacctgtacaagcacagaatggccaccgtgctggcccagctggaggagatcgagaaggagagagaccaggccatccagagcagagacagaatccagctgcagtacagccagagcctgatcgagaaggaccagtacagaaagcaggtgagaggcctggaggccgagagagacgagctgctgaccaccctgaccagcctggagggcaccaaggccctgctggaggtgcagctgcagagagcccagggcggcacctgcctgaaggcctgcgccagcagccacagcctgtgcagcaacctgagcagcacctggagcctgagcgagttccccagccccctgggcggccccgaggccaccggcgaggccgccgtgatgggcggccccgagccccacaacagcgaggaggccaccgacagcgagaaggagatcaacagactgagcatcctgcccttcccccccagcgccggcagcatcctgagaagacagagagaggaggaccccgccccccccaagagaagcttcagcagcatgagcgacatcaccggcagcgtgaccctgaagccctggagccccggcctgagcagcagcagcagcagcgacagcgtgtggcccctgggcaagcccgagggcctgctggccagaggctgcggcctggacttcctgaacagaagcctggccatcagagtgagcggcagaagcccccccggcggccccgagccccaggacaagggccccgacggcctgagcttctacggcgacagatggagcggcgccgtggtgagaagagtgctgagcggccccggcagcgccagaatggagcccagagagcagagagtggaggccgccggcctggagggcgcctgcctggaggccgaggcccagcagagaaccctgctgtggaaccagggcagcaccctgcccagcctgatggacagcaaggcctgccagagcttccacgaggccctggaggcctgggccaagggccccggcgccgagcccttctacatcagagccaacctgaccctgcccgagagagccgacccccacgccctgtgcgtgaaggcccaggagatcctgagactggtggacagcgcctacaagagaagacaggagtggttctgcaccagagtggaccccctgaccctgagagacctggacagaggcaccgtgcccaactaccagagagcccagcagctgctggaggtgcaggagaagtgcctgcccagcagcagacacagaggccccagaagcaacctgaagaagagagccctggaccagctgagactggtgagacccaagcccgtgggcgcccccgccggcgacagccccgaccagctgctgctggagccctgcgccgagcccgagagaagcctgagaccctacagcctggtgagaccctag

SEQ ID NO: 180637 - protein, 1165 aa, Artificial Sequence
  derived and/or modified sequence
MQDVQGPRPGSPGDAEDRRELGLHRGEVNFGGSGKKRGKFVRVPSGVAPSVLFDLLLAEWHLPAPNLVVSLVGEEQPFAMKSWLRDVLRKGLVKAAQSTGAWILTSALRVGLARHVGQAVRDHSLASTSTKVRVVAVGMASLGRVLHRRILEEAQEDFPVHYPEDDGGSQGPLCSLDSNLSHFILVEPGPPGKGDGLTELRLRLEKHISEQRAGYGGTGSIEIPVLCLLVNGDPNTLERISRAVEQAAPWLILVGSGGIADVLAALVNQPHLLVPKVAEKQFKEKFPSKHFSWEDIVRWTKLLQNITSHQHLLTVYDFEQEGSEELDTVILKALVKACKSHSQEPQDYLDELKLAVAWDRVDIAKSEIFNGDVEWKSCDLEEVMVDALVSNKPEFVRLFVDNGADVADFLTYGRLQELYRSVSRKSLLFDLLQRKQEEARLTLAGLGTQQAREPPAGPPAFSLHEVSRVLKDFLQDACRGFYQDGRPGDRRRAEKGPAKRPTGQKWLLDLNQKSENPWRDLFLWAVLQNRHEMATYFWAMGQEGVAAALAACKILKEMSHLETEAEAARATREAKYERLALDLFSECYSNSEARAFALLVRRNRCWSKTTCLHLATEADAKAFFAHDGVQAFLTRIWWGDMAAGTPILRLLGAFLCPALVYTNLITFSEEAPLRTGLEDLQDLDSLDTEKSPLYGLQSRVEELVEAPRAQGDRGPRAVFLLTRWRKFWGAPVTVFLGNVVMYFAFLFLFTYVLLVDFRPPPQGPSGPEVTLYFWVFTLVLEEIRQGFFTDEDTHLVKKFTLYVGDNWNKCDMVAIFLFIVGVTCRMLPSAFEAGRTVLAMDFMVFTLRLIHIFAIHKQLGPKIIVVERMMKDVFFFLFFLSVWLVAYGVTTQALLHPHDGRLEWIFRRVLYRPYLQIFGQIPLDEIDEARVNCSTHPLLLEDSPSCPSLYANWLVILLLVTFLLVTNVLLMNLLIAMFSYTFQVVQGNADMFWKFQRYNLIVEYHERPALAPPFILLSHLSLTLRRVFKKEAEHKREHLERDLPDPLDQKVVTWETVQKENFLSKMEKRRRDSEGEVLRKTAHRVDFIAKYLGGLREQEKRIKCLESQINYCSVLVSSVADVLAQGGGPRSSQHCGEGSQLVAADHRGGLDGWEQPGAGQPPSDT

SEQ ID NO: 180638 - protein, 1167 aa, Artificial Sequence
  derived and/or modified sequence
MQDVQGPRPGSPGDAEDRRELGLHRGEVNFGGSGKKRGKFVRVPSGVAPSVLFDLLLAEWHLPAPNLVVSLVGEEQPFAMKSWLRDVLRKGLVKAAQSTGAWILTSALRVGLARHVGQAVRDHSLASTSTKVRVVAVGMASLGRVLHRRILEEAQVHEDFPVHYPEDDGGSQGPLCSLDSNLSHFILVEPGPPGKGDGLTELRLRLEKHISEQRAGYGGTGSIEIPVLCLLVNGDPNTLERISRAVEQAAPWLILVGSGGIADVLAALVNQPHLLVPKVAEKQFKEKFPSKHFSWEDIVRWTKLLQNITSHQHLLTVYDFEQEGSEELDTVILKALVKACKSHSQEPQDYLDELKLAVAWDRVDIAKSEIFNGDVEWKSCDLEEVMVDALVSNKPEFVRLFVDNGADVADFLTYGRLQELYRSVSRKSLLFDLLQRKQEEARLTLAGLGTQQAREPPAGPPAFSLHEVSRVLKDFLQDACRGFYQDGRPGDRRRAEKGPAKRPTGQKWLLDLNQKSENPWRDLFLWAVLQNRHEMATYFWAMGQEGVAAALAACKILKEMSHLETEAEAARATREAKYERLALDLFSECYSNSEARAFALLVRRNRCWSKTTCLHLATEADAKAFFAHDGVQAFLTRIWWGDMAAGTPILRLLGAFLCPALVYTNLITFSEEAPLRTGLEDLQDLDSLDTEKSPLYGLQSRVEELVEAPRAQGDRGPRAVFLLTRWRKFWGAPVTVFLGNVVMYFAFLFLFTYVLLVDFRPPPQGPSGPEVTLYFWVFTLVLEEIRQGFFTDEDTHLVKKFTLYVGDNWNKCDMVAIFLFIVGVTCRMLPSAFEAGRTVLAMDFMVFTLRLIHIFAIHKQLGPKIIVVERMMKDVFFFLFFLSVWLVAYGVTTQALLHPHDGRLEWIFRRVLYRPYLQIFGQIPLDEIDEARVNCSTHPLLLEDSPSCPSLYANWLVILLLVTFLLVTNVLLMNLLIAMFSYTFQVVQGNADMFWKFQRYNLIVEYHERPALAPPFILLSHLSLTLRRVFKKEAEHKREHLERDLPDPLDQKVVTWETVQKENFLSKMEKRRRDSEGEVLRKTAHRVDFIAKYLGGLREQEKRIKCLESQINYCSVLVSSVADVLAQGGGPRSSQHCGEGSQLVAADHRGGLDGWEQPGAGQPPSDT

SEQ ID NO: 180639 - protein, 1159 aa, Artificial Sequence
  derived and/or modified sequence
PGSPGDAEDRRELGLHRGEVNFGGSGKKRGKFVRVPSGVAPSVLFDLLLAEWHLPAPNLVVSLVGEEQPFAMKSWLRDVLRKGLVKAAQSTGAWILTSALRVGLARHVGQAVRDHSLASTSTKVRVVAVGMASLGRVLHRRILEEAQVHEDFPVHYPEDDGGSQGPLCSLDSNLSHFILVEPGPPGKGDGLTELRLRLEKHISEQRAGYGGTGSIEIPVLCLLVNGDPNTLERISRAVEQAAPWLILVGSGGIADVLAALVNQPHLLVPKVAEKQFKEKFPSKHFSWEDIVRWTKLLQNITSHQHLLTVYDFEQEGSEELDTVILKALVKACKSHSQEPQDYLDELKLAVAWDRVDIAKSEIFNGDVEWKSCDLEEVMVDALVSNKPEFVRLFVDNGADVADFLTYGRLQELYRSVSRKSLLFDLLQRKQEEARLTLAGLGTQQAREPPAGPPAFSLHEVSRVLKDFLQDACRGFYQDGRPGDRRRAEKGPAKRPTGQKWLLDLNQKSENPWRDLFLWAVLQNRHEMATYFWAMGQEGVAAALAACKILKEMSHLETEAEAARATREAKYERLALDLFSECYSNSEARAFALLVRRNRCWSKTTCLHLATEADAKAFFAHDGVQAFLTRIWWGDMAAGTPILRLLGAFLCPALVYTNLITFSEEAPLRTGLEDLQDLDSLDTEKSPLYGLQSRVEELVEAPRAQGDRGPRAVFLLTRWRKFWGAPVTVFLGNVVMYFAFLFLFTYVLLVDFRPPPQGPSGPEVTLYFWVFTLVLEEIRQGFFTDEDTHLVKKFTLYVGDNWNKCDMVAIFLFIVGVTCRMLPSAFEAGRTVLAMDFMVFTLRLIHIFAIHKQLGPKIIVVERMMKDVFFFLFFLSVWLVAYGVTTQALLHPHDGRLEWIFRRVLYRPYLQIFGQIPLDEIDEARVNCSTHPLLLEDSPSCPSLYANWLVILLLVTFLLVTNVLLMNLLIAMFSYTFQVVQGNADMFWKFQRYNLIVEYHERPALAPPFILLSHLSLTLRRVFKKEAEHKREHLERDLPDPLDQKVVTWETVQKENFLSKMEKRRRDSEGEVLRKTAHRVDFIAKYLGGLREQEKRIKCLESQINYCSVLVSSVADVLAQGGGPRSSQHCGEGSQLVAADHRGGLDGWEQPGAGQPPSDT

SEQ ID NO: 180640 - DNA, 3498 bp, Artificial Sequence
  derived and/or modified sequence
atgcaggacgtgcagggccccagacccggcagccccggcgacgccgaggacagaagagagctgggcctgcacagaggcgaggtgaacttcggcggcagcggcaagaagagaggcaagttcgtgagagtgcccagcggcgtggcccccagcgtgctgttcgacctgctgctggccgagtggcacctgcccgcccccaacctggtggtgagcctggtgggcgaggagcagcccttcgccatgaagagctggctgagagacgtgctgagaaagggcctggtgaaggccgcccagagcaccggcgcctggatcctgaccagcgccctgagagtgggcctggccagacacgtgggccaggccgtgagagaccacagcctggccagcaccagcaccaaggtgagagtggtggccgtgggcatggccagcctgggcagagtgctgcacagaagaatcctggaggaggcccaggaggacttccccgtgcactaccccgaggacgacggcggcagccagggccccctgtgcagcctggacagcaacctgagccacttcatcctggtggagcccggcccccccggcaagggcgacggcctgaccgagctgagactgagactggagaagcacatcagcgagcagagagccggctacggcggcaccggcagcatcgagatccccgtgctgtgcctgctggtgaacggcgaccccaacaccctggagagaatcagcagagccgtggagcaggccgccccctggctgatcctggtgggcagcggcggcatcgccgacgtgctggccgccctggtgaaccagccccacctgctggtgcccaaggtggccgagaagcagttcaaggagaagttccccagcaagcacttcagctgggaggacatcgtgagatggaccaagctgctgcagaacatcaccagccaccagcacctgctgaccgtgtacgacttcgagcaggagggcagcgaggagctggacaccgtgatcctgaaggccctggtgaaggcctgcaagagccacagccaggagccccaggactacctggacgagctgaagctggccgtggcctgggacagagtggacatcgccaagagcgagatcttcaacggcgacgtggagtggaagagctgcgacctggaggaggtgatggtggacgccctggtgagcaacaagcccgagttcgtgagactgttcgtggacaacggcgccgacgtggccgacttcctgacctacggcagactgcaggagctgtacagaagcgtgagcagaaagagcctgctgttcgacctgctgcagagaaagcaggaggaggccagactgaccctggccggcctgggcacccagcaggccagagagccccccgccggcccccccgccttcagcctgcacgaggtgagcagagtgctgaaggacttcctgcaggacgcctgcagaggcttctaccaggacggcagacccggcgacagaagaagagccgagaagggccccgccaagagacccaccggccagaagtggctgctggacctgaaccagaagagcgagaacccctggagagacctgttcctgtgggccgtgctgcagaacagacacgagatggccacctacttctgggccatgggccaggagggcgtggccgccgccctggccgcctgcaagatcctgaaggagatgagccacctggagaccgaggccgaggccgccagagccaccagagaggccaagtacgagagactggccctggacctgttcagcgagtgctacagcaacagcgaggccagagccttcgccctgctggtgagaagaaacagatgctggagcaagaccacctgcctgcacctggccaccgaggccgacgccaaggccttcttcgcccacgacggcgtgcaggccttcctgaccagaatctggtggggcgacatggccgccggcacccccatcctgagactgctgggcgccttcctgtgccccgccctggtgtacaccaacctgatcaccttcagcgaggaggcccccctgagaaccggcctggaggacctgcaggacctggacagcctggacaccgagaagagccccctgtacggcctgcagagcagagtggaggagctggtggaggcccccagagcccagggcgacagaggccccagagccgtgttcctgctgaccagatggagaaagttctggggcgcccccgtgaccgtgttcctgggcaacgtggtgatgtacttcgccttcctgttcctgttcacctacgtgctgctggtggacttcagaccccccccccagggccccagcggccccgaggtgaccctgtacttctgggtgttcaccctggtgctggaggagatcagacagggcttcttcaccgacgaggacacccacctggtgaagaagttcaccctgtacgtgggcgacaactggaacaagtgcgacatggtggccatcttcctgttcatcgtgggcgtgacctgcagaatgctgcccagcgccttcgaggccggcagaaccgtgctggccatggacttcatggtgttcaccctgagactgatccacatcttcgccatccacaagcagctgggccccaagatcatcgtggtggagagaatgatgaaggacgtgttcttcttcctgttcttcctgagcgtgtggctggtggcctacggcgtgaccacccaggccctgctgcacccccacgacggcagactggagtggatcttcagaagagtgctgtacagaccctacctgcagatcttcggccagatccccctggacgagatcgacgaggccagagtgaactgcagcacccaccccctgctgctggaggacagccccagctgccccagcctgtacgccaactggctggtgatcctgctgctggtgaccttcctgctggtgaccaacgtgctgctgatgaacctgctgatcgccatgttcagctacaccttccaggtggtgcagggcaacgccgacatgttctggaagttccagagatacaacctgatcgtggagtaccacgagagacccgccctggccccccccttcatcctgctgagccacctgagcctgaccctgagaagagtgttcaagaaggaggccgagcacaagagagagcacctggagagagacctgcccgaccccctggaccagaaggtggtgacctgggagaccgtgcagaaggagaacttcctgagcaagatggagaagagaagaagagacagcgagggcgaggtgctgagaaagaccgcccacagagtggacttcatcgccaagtacctgggcggcctgagagagcaggagaagagaatcaagtgcctggagagccagatcaactactgcagcgtgctggtgagcagcgtggccgacgtgctggcccagggcggcggccccagaagcagccagcactgcggcgagggcagccagctggtggccgccgaccacagaggcggcctggacggctgggagcagcccggcgccggccagccccccagcgacacctag

SEQ ID NO: 180641 - DNA, 3504 bp, Artificial Sequence
  derived and/or modified sequence
atgcaggacgtgcagggccccagacccggcagccccggcgacgccgaggacagaagagagctgggcctgcacagaggcgaggtgaacttcggcggcagcggcaagaagagaggcaagttcgtgagagtgcccagcggcgtggcccccagcgtgctgttcgacctgctgctggccgagtggcacctgcccgcccccaacctggtggtgagcctggtgggcgaggagcagcccttcgccatgaagagctggctgagagacgtgctgagaaagggcctggtgaaggccgcccagagcaccggcgcctggatcctgaccagcgccctgagagtgggcctggccagacacgtgggccaggccgtgagagaccacagcctggccagcaccagcaccaaggtgagagtggtggccgtgggcatggccagcctgggcagagtgctgcacagaagaatcctggaggaggcccaggtgcacgaggacttccccgtgcactaccccgaggacgacggcggcagccagggccccctgtgcagcctggacagcaacctgagccacttcatcctggtggagcccggcccccccggcaagggcgacggcctgaccgagctgagactgagactggagaagcacatcagcgagcagagagccggctacggcggcaccggcagcatcgagatccccgtgctgtgcctgctggtgaacggcgaccccaacaccctggagagaatcagcagagccgtggagcaggccgccccctggctgatcctggtgggcagcggcggcatcgccgacgtgctggccgccctggtgaaccagccccacctgctggtgcccaaggtggccgagaagcagttcaaggagaagttccccagcaagcacttcagctgggaggacatcgtgagatggaccaagctgctgcagaacatcaccagccaccagcacctgctgaccgtgtacgacttcgagcaggagggcagcgaggagctggacaccgtgatcctgaaggccctggtgaaggcctgcaagagccacagccaggagccccaggactacctggacgagctgaagctggccgtggcctgggacagagtggacatcgccaagagcgagatcttcaacggcgacgtggagtggaagagctgcgacctggaggaggtgatggtggacgccctggtgagcaacaagcccgagttcgtgagactgttcgtggacaacggcgccgacgtggccgacttcctgacctacggcagactgcaggagctgtacagaagcgtgagcagaaagagcctgctgttcgacctgctgcagagaaagcaggaggaggccagactgaccctggccggcctgggcacccagcaggccagagagccccccgccggcccccccgccttcagcctgcacgaggtgagcagagtgctgaaggacttcctgcaggacgcctgcagaggcttctaccaggacggcagacccggcgacagaagaagagccgagaagggccccgccaagagacccaccggccagaagtggctgctggacctgaaccagaagagcgagaacccctggagagacctgttcctgtgggccgtgctgcagaacagacacgagatggccacctacttctgggccatgggccaggagggcgtggccgccgccctggccgcctgcaagatcctgaaggagatgagccacctggagaccgaggccgaggccgccagagccaccagagaggccaagtacgagagactggccctggacctgttcagcgagtgctacagcaacagcgaggccagagccttcgccctgctggtgagaagaaacagatgctggagcaagaccacctgcctgcacctggccaccgaggccgacgccaaggccttcttcgcccacgacggcgtgcaggccttcctgaccagaatctggtggggcgacatggccgccggcacccccatcctgagactgctgggcgccttcctgtgccccgccctggtgtacaccaacctgatcaccttcagcgaggaggcccccctgagaaccggcctggaggacctgcaggacctggacagcctggacaccgagaagagccccctgtacggcctgcagagcagagtggaggagctggtggaggcccccagagcccagggcgacagaggccccagagccgtgttcctgctgaccagatggagaaagttctggggcgcccccgtgaccgtgttcctgggcaacgtggtgatgtacttcgccttcctgttcctgttcacctacgtgctgctggtggacttcagaccccccccccagggccccagcggccccgaggtgaccctgtacttctgggtgttcaccctggtgctggaggagatcagacagggcttcttcaccgacgaggacacccacctggtgaagaagttcaccctgtacgtgggcgacaactggaacaagtgcgacatggtggccatcttcctgttcatcgtgggcgtgacctgcagaatgctgcccagcgccttcgaggccggcagaaccgtgctggccatggacttcatggtgttcaccctgagactgatccacatcttcgccatccacaagcagctgggccccaagatcatcgtggtggagagaatgatgaaggacgtgttcttcttcctgttcttcctgagcgtgtggctggtggcctacggcgtgaccacccaggccctgctgcacccccacgacggcagactggagtggatcttcagaagagtgctgtacagaccctacctgcagatcttcggccagatccccctggacgagatcgacgaggccagagtgaactgcagcacccaccccctgctgctggaggacagccccagctgccccagcctgtacgccaactggctggtgatcctgctgctggtgaccttcctgctggtgaccaacgtgctgctgatgaacctgctgatcgccatgttcagctacaccttccaggtggtgcagggcaacgccgacatgttctggaagttccagagatacaacctgatcgtggagtaccacgagagacccgccctggccccccccttcatcctgctgagccacctgagcctgaccctgagaagagtgttcaagaaggaggccgagcacaagagagagcacctggagagagacctgcccgaccccctggaccagaaggtggtgacctgggagaccgtgcagaaggagaacttcctgagcaagatggagaagagaagaagagacagcgagggcgaggtgctgagaaagaccgcccacagagtggacttcatcgccaagtacctgggcggcctgagagagcaggagaagagaatcaagtgcctggagagccagatcaactactgcagcgtgctggtgagcagcgtggccgacgtgctggcccagggcggcggccccagaagcagccagcactgcggcgagggcagccagctggtggccgccgaccacagaggcggcctggacggctgggagcagcccggcgccggccagccccccagcgacacctag

SEQ ID NO: 180642 - DNA, 3480 bp, Artificial Sequence
  derived and/or modified sequence
cccggcagccccggcgacgccgaggacagaagagagctgggcctgcacagaggcgaggtgaacttcggcggcagcggcaagaagagaggcaagttcgtgagagtgcccagcggcgtggcccccagcgtgctgttcgacctgctgctggccgagtggcacctgcccgcccccaacctggtggtgagcctggtgggcgaggagcagcccttcgccatgaagagctggctgagagacgtgctgagaaagggcctggtgaaggccgcccagagcaccggcgcctggatcctgaccagcgccctgagagtgggcctggccagacacgtgggccaggccgtgagagaccacagcctggccagcaccagcaccaaggtgagagtggtggccgtgggcatggccagcctgggcagagtgctgcacagaagaatcctggaggaggcccaggtgcacgaggacttccccgtgcactaccccgaggacgacggcggcagccagggccccctgtgcagcctggacagcaacctgagccacttcatcctggtggagcccggcccccccggcaagggcgacggcctgaccgagctgagactgagactggagaagcacatcagcgagcagagagccggctacggcggcaccggcagcatcgagatccccgtgctgtgcctgctggtgaacggcgaccccaacaccctggagagaatcagcagagccgtggagcaggccgccccctggctgatcctggtgggcagcggcggcatcgccgacgtgctggccgccctggtgaaccagccccacctgctggtgcccaaggtggccgagaagcagttcaaggagaagttccccagcaagcacttcagctgggaggacatcgtgagatggaccaagctgctgcagaacatcaccagccaccagcacctgctgaccgtgtacgacttcgagcaggagggcagcgaggagctggacaccgtgatcctgaaggccctggtgaaggcctgcaagagccacagccaggagccccaggactacctggacgagctgaagctggccgtggcctgggacagagtggacatcgccaagagcgagatcttcaacggcgacgtggagtggaagagctgcgacctggaggaggtgatggtggacgccctggtgagcaacaagcccgagttcgtgagactgttcgtggacaacggcgccgacgtggccgacttcctgacctacggcagactgcaggagctgtacagaagcgtgagcagaaagagcctgctgttcgacctgctgcagagaaagcaggaggaggccagactgaccctggccggcctgggcacccagcaggccagagagccccccgccggcccccccgccttcagcctgcacgaggtgagcagagtgctgaaggacttcctgcaggacgcctgcagaggcttctaccaggacggcagacccggcgacagaagaagagccgagaagggccccgccaagagacccaccggccagaagtggctgctggacctgaaccagaagagcgagaacccctggagagacctgttcctgtgggccgtgctgcagaacagacacgagatggccacctacttctgggccatgggccaggagggcgtggccgccgccctggccgcctgcaagatcctgaaggagatgagccacctggagaccgaggccgaggccgccagagccaccagagaggccaagtacgagagactggccctggacctgttcagcgagtgctacagcaacagcgaggccagagccttcgccctgctggtgagaagaaacagatgctggagcaagaccacctgcctgcacctggccaccgaggccgacgccaaggccttcttcgcccacgacggcgtgcaggccttcctgaccagaatctggtggggcgacatggccgccggcacccccatcctgagactgctgggcgccttcctgtgccccgccctggtgtacaccaacctgatcaccttcagcgaggaggcccccctgagaaccggcctggaggacctgcaggacctggacagcctggacaccgagaagagccccctgtacggcctgcagagcagagtggaggagctggtggaggcccccagagcccagggcgacagaggccccagagccgtgttcctgctgaccagatggagaaagttctggggcgcccccgtgaccgtgttcctgggcaacgtggtgatgtacttcgccttcctgttcctgttcacctacgtgctgctggtggacttcagaccccccccccagggccccagcggccccgaggtgaccctgtacttctgggtgttcaccctggtgctggaggagatcagacagggcttcttcaccgacgaggacacccacctggtgaagaagttcaccctgtacgtgggcgacaactggaacaagtgcgacatggtggccatcttcctgttcatcgtgggcgtgacctgcagaatgctgcccagcgccttcgaggccggcagaaccgtgctggccatggacttcatggtgttcaccctgagactgatccacatcttcgccatccacaagcagctgggccccaagatcatcgtggtggagagaatgatgaaggacgtgttcttcttcctgttcttcctgagcgtgtggctggtggcctacggcgtgaccacccaggccctgctgcacccccacgacggcagactggagtggatcttcagaagagtgctgtacagaccctacctgcagatcttcggccagatccccctggacgagatcgacgaggccagagtgaactgcagcacccaccccctgctgctggaggacagccccagctgccccagcctgtacgccaactggctggtgatcctgctgctggtgaccttcctgctggtgaccaacgtgctgctgatgaacctgctgatcgccatgttcagctacaccttccaggtggtgcagggcaacgccgacatgttctggaagttccagagatacaacctgatcgtggagtaccacgagagacccgccctggccccccccttcatcctgctgagccacctgagcctgaccctgagaagagtgttcaagaaggaggccgagcacaagagagagcacctggagagagacctgcccgaccccctggaccagaaggtggtgacctgggagaccgtgcagaaggagaacttcctgagcaagatggagaagagaagaagagacagcgagggcgaggtgctgagaaagaccgcccacagagtggacttcatcgccaagtacctgggcggcctgagagagcaggagaagagaatcaagtgcctggagagccagatcaactactgcagcgtgctggtgagcagcgtggccgacgtgctggcccagggcggcggccccagaagcagccagcactgcggcgagggcagccagctggtggccgccgaccacagaggcggcctggacggctgggagcagcccggcgccggccagccccccagcgacacctag

SEQ ID NO: 180643 - DNA, 3498 bp, Artificial Sequence
  derived and/or modified sequence
atgcaggacgtgcaaggccctaggccggggtctcccggcgatgctgaggacaggcgcgaactcggattacaccgcggagaggtgaattttggaggctccggcaaaaagcgcgggaaatttgtccgggtgccctccggcgtggctcccagcgtgctgttcgacctcctgctggccgaatggcacctgccagccccgaacttggtagtcagcttggttggagaggagcagccattcgctatgaagtcgtggctgcgagatgtgctccgcaagggtcttgttaaggctgcccagtcaactggggcctggattctgaccagcgcattgagggtcggactcgcgcgacatgtgggacaggcggtgagggatcactctctcgccagtacctccactaaggtgcgcgtggtggccgtgggcatggcctccttggggcgagtgctccaccggcgaatactggaggaggcacaggaagacttcccggtccactacccagaagacgatggcggctcacaggggccattgtgctccctggactccaacctgagccactttatcctggtggagccaggcccacccgggaaaggggatggtttaactgaattgcgcctgcggctggagaaacacatttcagaacagagagcagggtacggggggacaggttcaatagaaatcccggttctgtgcctacttgtgaatggcgatcccaatacacttgagagaatctctcgggctgtggaacaggctgctccttggctgatccttgtggggagcggcggcattgctgacgtgctagccgcactcgtcaaccagccccacctgctggtgcccaaggttgcggaaaagcagttcaaagaaaagttccccagcaagcatttctcatgggaagatatagtccgctggactaagctacttcagaacatcacctcccatcagcatctcctcactgtgtacgatttcgaacaggaagggagcgaagagctcgatacagtgatccttaaagcattggtgaaggcctgcaaatctcactctcaggagccccaagattaccttgacgagttgaagcttgcagtcgcgtgggatagggttgatatcgccaagtccgagatctttaatggagacgtcgaatggaaatcttgtgatcttgaggaagtcatggtggacgccctggtctctaataaacccgagtttgttagactgttcgtggataacggcgctgatgtggccgattttctcacttatgggagattgcaggagctgtatagatcagttagccggaagtctttgctctttgacttgctgcaaagaaagcaggaggaggccaggctgacactggcaggcttgggaacacaacaagccagggaacctccagccgggccccctgcatttagcctccatgaggtgtcaagggttctcaaagacttccttcaggatgcctgccgagggttttaccaagacggaagaccgggagatcgaagaagggctgaaaaaggaccagctaaaagaccaaccggtcaaaaatggcttttagatcttaaccagaaatcagaaaatccctggagagatctcttcctgtgggccgtgctgcagaataggcatgagatggcaacatacttttgggcaatgggccaggagggtgtggctgcggccctagctgcctgtaaaatcctgaaagagatgagccaccttgagaccgaggctgaggccgcccgagccacacgtgaggcaaagtacgaaaggctcgctctcgatctgttctctgaatgttactctaattcagaggcgagagccttcgcacttcttgttagacgaaaccggtgctggtcaaagactacatgcctgcacctagccactgaagccgacgccaaggcattttttgctcatgatggagtgcaagcctttcttacacgtatttggtggggggatatggcagccggcacgccaatcctgcgtttactgggcgcctttctctgccccgccctggtgtataccaacctgattaccttctccgaagaggcacccctgcgcacgggcttggaagatctgcaggacttagacagtttggataccgagaaatccccgctttatggtctccagtccagggtcgaggaactagttgaagcaccacgggctcaaggcgaccggggtcccagagctgtattcttgctcacgaggtggcggaaattttggggagccccagtgaccgtgttcctcggcaatgtcgttatgtatttcgcattcctgtttctgttcacatacgtccttctggtcgatttccggccgccaccacaagggcccagcggcccagaggtgacgctgtacttttgggtgttcacactggttctggaagagatcagacagggtttttttaccgatgaggacactcatctggttaaaaagttcaccctgtacgtgggagataactggaacaagtgtgatatggtggcgatattcctttttatagtgggagtcacgtgccggatgttacccagcgcgttcgaagccggaagaaccgttctggctatggacttcatggtgttcaccttacgacttattcacatctttgctatccataaacagcttggacccaagattatagtggtggagcggatgatgaaggacgtattcttctttctgttcttcttgtccgtctggctcgtggcctatggggtgactactcaggcattgttgcaccctcacgacggacgcctggaatggatcttcagacgggtgctgtaccgtccctatctgcagatttttggtcagataccgctcgatgagatagacgaagctcgtgtcaattgctccacccatccgctgttgctggaggatagtcccagctgtcctagcttgtatgccaactggctggtgattctcctcctagtgaccttcctgctcgtgactaatgtgctgctgatgaacctgctgatcgccatgttctcctatacatttcaggtagttcaggggaacgccgacatgttctggaaattccagagatacaatttaatcgtggaatatcacgaaagacccgcgctggccccgccttttatcttgctgagccacctgtcactaaccctgaggagagtctttaagaaggaggctgaacataaacgggagcacctggaacgcgacctacctgatccgctcgaccaaaaggtggtgacttgggagacagtgcaaaaggagaactttcttagcaagatggaaaagcgccgcagggacagtgaaggcgaggtgctgcgaaaaactgcccatcgggttgacttcatcgccaagtacctgggaggacttagagagcaggaaaagcggattaaatgcttggagtcacagataaattactgtagcgtgctcgtatcttctgtcgcagacgtattagcccaggggggggggccccggagcagccaacattgcggtgagggcagccagctagtcgctgcggatcacaggggaggattggacggatgggagcagcccggcgccgggcagccaccatcggatacctag

SEQ ID NO: 180644 - DNA, 3504 bp, Artificial Sequence
  derived and/or modified sequence
atgcaggacgtgcagggaccacggcctggtagtcccggagacgctgaggaccggagagagctggggctccaccgcggtgaggtgaatttcggcggctctggaaagaagagagggaaatttgtccgcgttccctccggggtggcgccatctgtccttttcgatctcctgctggcagagtggcacctgcctgcacctaacctcgtggtgagcctggttggcgaagagcagcctttcgctatgaagtcttggctgagggacgtcctccggaagggcctggttaaagcagcccagagtacgggtgcatggattctgacgtctgccctgagggtaggcctagccaggcacgttggccaggcagtgcgggatcattcgttagcttccacttctacgaaagttagagttgttgccgtgggcatggcctccttaggcagggtcctgcacagacggattctcgaagaagctcaggtgcatgaggacttcccagtgcactaccccgaggatgacggcggatctcagggccctctctgctcactcgactcaaacttgagccattttatcctcgtggaaccgggaccgcctggcaagggcgatggtctgacggaactcagactgagactcgaaaaacacattagcgaacagagagccggctacggtgggaccggaagtatagaaatccccgtactctgcctcctggtgaatggagatcccaatacactggagcggattagtagggcggtcgaacaggcggctccatggctgatcctcgtaggaagcggtggaatcgctgatgtcttagctgcactcgtgaatcagccacatcttctggtcccaaaggtggccgagaagcagttcaaagaaaagttcccctcaaagcacttcagctgggaggatatagtgcgctggacaaaactccttcaaaatatcacaagccatcagcacctgctgaccgtctacgacttcgagcaggagggatcagaagagctggatacggttatcttgaaagctctggttaaggcttgtaagtctcactctcaagagcctcaggactacttagacgaactgaagctagccgtggcctgggaccgtgtcgatatagcaaagagcgagatcttcaacggagacgtggaatggaaatcttgcgacttagaggaggtgatggtggatgccctggtcagtaataaacccgaattcgtgcgcttgttcgtggacaacggggcagacgtggccgatttccttacctacgggcggttgcaggagttatataggtcagtctctcgcaaatcactcctgtttgatctgctgcagagaaaacaggaagaggcccggctcaccctggctggacttggcacccagcaggctagggaaccacccgccggcccacccgcattttcattacacgaggtgagtagggtgctgaaagatttcctccaggacgcatgcaggggcttctaccaagacggcaggccaggtgaccgaagaagggccgaaaaaggcccagccaagcgtcccactggccaaaagtggctgctcgatctcaaccaaaaaagtgagaatccttggagggacctgttcctgtgggcggtgctccaaaaccgccatgaaatggccacttacttttgggctatgggccaggagggggtggccgcggctctggccgcgtgtaaaatcctaaaggagatgagccacctggagactgaggcagaagcagccagagcaacccgagaagctaagtatgagaggttggcactcgatctttttagcgagtgttactcaaactcagaggctcgggcattcgccttattagtcaggcggaacagatgttggagcaagacaacttgcctgcaccttgccactgaagccgatgctaaagctttttttgcacacgacggggtgcaggcgtttttgacccgtatctggtggggggacatggcagctggtactccaatcctccgactccttggcgcttttctttgcccagcccttgtgtacacaaatctgatcaccttctcagaagaggctcctctgaggacagggctggaagacctgcaagatctggactccctggataccgagaagtcccctctgtacgggttgcaatcccgggtggaggaactggtggaagcgccccgcgctcagggggaccggggcccgagggccgttttcttactgaccaggtggcggaagttctggggagcgcctgtcacggtgtttcttggcaacgtcgtgatgtattttgcgtttctgttcttgttcacctacgtactgttggtggatttccgtccccccccacagggcccctctggccccgaggtcacattgtacttttgggtgtttaccctagtattagaggaaatccggcaaggatttttcacagacgaagacacacacctggtgaaaaagttcactctgtacgtgggtgacaactggaacaaatgcgacatggttgccatattcttgttcattgtcggtgtcacctgccgcatgctgcccagtgcctttgaagccggcagaaccgtactggctatggattttatggtgttcactctgaggttgatccacatctttgcaatacacaagcagttggggccgaaaatcattgttgtggaacgcatgatgaaggatgtattcttcttcctgttcttcctcagcgtgtggctcgtggcctatggggttacaacccaggcactcctccacccacatgacgggcggcttgagtggatcttcaggagagtcctctatcggccctatctccaaatctttggacaaattcctctggatgagattgacgaggctagggtgaactgctcaactcaccccttgctactagaggactcgccctcgtgtccttctctctacgcaaactggcttgtgattctactgttggtcacgtttctcctggtgacgaacgtactcctgatgaatctgttgattgcaatgttctcctacacatttcaggttgtgcagggtaacgccgatatgttttggaagttccagcgttacaacctcattgtggagtatcatgagcggcccgccttggcgcctccttttatactcctgtcccacctcagcctcacccttcgacgagtgtttaaaaaagaagcagagcacaagagggagcatctggagcgagacctcccagacccgttggatcagaaggttgtaacatgggagactgttcagaaggagaacttcctcagcaagatggaaaagagaaggcgggatagtgaaggtgaagtactcagaaagaccgcccaccgagttgacttcatagccaaatatctcggcggtctccgggagcaggagaagcgaatcaaatgtctcgagagccagattaattactgttctgtattggtaagctccgtcgccgacgtcttggcccaaggaggaggtcccagaagctcacagcattgtggagagggaagtcagcttgtagctgctgaccaccgaggtggtctggatggatgggagcagcccggggcaggtcaaccaccgtcggatacatag

SEQ ID NO: 180645 - DNA, 3480 bp, Artificial Sequence
  derived and/or modified sequence
cctgggtcccccggcgatgctgaggatcgccgcgagttaggcctgcaccgcggggaggtgaactttgggggctctgggaagaaaaggggaaaatttgtgcgggtgccatccggcgtcgcgccaagtgtgctgttcgaccttctactcgcagagtggcacttacctgcccctaacctggtggtctctctggtgggggaagagcagccttttgcgatgaaaagttggctcagagacgttcttcgaaaggggctggttaaggcggcccaaagcaccggtgcatggatcctgacatcggctctgagagttggtctggctcggcatgtcggccaggccgtcagagatcactcactggcatcaacatctaccaaggttagggtcgtggcggtgggcatggcgtctctgggccgagtcctccaccgccggatactggaagaagctcaggtgcatgaggacttcccagtgcattaccccgaagacgacggggggagccaagggcctttatgttctttggattcaaacctgtcccattttattttagtagagcccgggccaccaggcaagggcgacggcttgaccgagttgcggttgcggcttgagaagcatatctcggagcagagagccggctatggaggaacagggtcaatcgagatacccgtgctttgtctgctggttaacggggaccctaataccttagagcgcattagcagagccgtggaacaagccgcaccgtggctcatcctcgtgggatccggcggtatagccgacgtgttggccgcgctggtcaatcagcctcacttgcttgtccctaaagtggccgagaaacagttcaaggagaagtttcctagtaagcatttctcttgggaggatatagtgcggtggaccaaacttctccaaaacatcacatctcaccagcacctgcttacagtgtatgactttgagcaggagggatccgaagaactggatacggttatactgaaggcgctggtgaaggcttgcaagtcccattctcaggagccccaggactacttagatgagctgaaactggccgtggcgtgggatagagtggacatcgcaaaaagcgagatttttaacggagacgtggagtggaaatcttgcgacctcgaggaggtgatggtagacgctctcgtgtccaacaagcccgaatttgttaggctattcgtggataatggtgccgacgtagcagatttcctgacctatggccggctccaggagctttacagaagtgtgtctcgaaagtctctcctctttgacttgctccagagaaagcaggaggaggcgcggttgactttggcagggttgggaactcagcaagctcgagagcctcccgccggccctcctgctttctctctgcatgaggtaagcagagttctgaaggacttcctgcaagacgcctgcaggggattttatcaagatggccggccaggggataggcggcgggccgagaagggcccggctaagaggcccacaggacagaaatggctgctggacctaaatcaaaagtccgagaatccctggcgcgatttattcctctgggctgttctacagaatagacatgagatggctacctacttctgggccatgggccaggaaggggtggcggctgcgctcgccgcctgcaagattctcaaggagatgtcccatctcgagactgaagccgaggccgcaagggccacgcgtgaggccaagtatgagcgtctggcactggacctgttctctgaatgctattcgaatagtgaggccagggcctttgcgcttttggtacgacgtaatcgatgctggagcaaaaccacttgcctgcatcttgctacagaggccgatgccaaggcattttttgctcacgacggggtgcaggcctttctgacacgtatctggtggggggacatggccgcagggacccccatcttgagactcctgggagcgttcctctgcccagccttagtgtacactaacctgatcacctttagcgaggaggcacccctcaggactggcctcgaggatctgcaggatctcgatagcctggatacagaaaaatctcccttatacggactccagtctagggtggaagaactggtcgaagcccctcgagcccaaggggacagagggccaagagccgtgttcttgctgaccagatggcggaagttttggggggctccagtcacggtttttctgggtaacgtagtcatgtacttcgcttttctcttcttattcacttatgtgctcttagtggatttccggcccccgccacagggaccaagtggaccagaggtgaccctgtacttctgggttttcaccctggtgctggaagaaatcagacagggctttttcaccgatgaggacacgcacctggtgaagaaatttactctctatgttggagacaattggaataagtgcgatatggtggcaatcttcctatttatagtcggagtcacctgcaggatgctccctagtgccttcgaagctggccgtacggtcctggccatggatttcatggtttttactctgagactgatccatatctttgctattcataaacaactggggccaaagatcatcgtggtggagcggatgatgaaggacgtattcttctttctttttttcctgagcgtgtggctagtcgcgtatggggtgaccacccaggcccttctgcatcctcacgacggaagactggagtggatattccggcgagtgctgtacaggccatacctgcagatctttgggcagataccattagatgagattgacgaagcacgtgtcaactgcagcacccatccgctgctgctcgaagactctcctagttgcccatcactctacgctaactggttggtgatcctgctgttagtaacctttctgcttgtgactaatgtcttattaatgaacctgttaatagcaatgttctcatatacatttcaggtggtccaggggaacgccgacatgttctggaaatttcaacgatacaatctgatcgtggagtaccatgaaaggcccgccctcgcccctccgtttatcctgctttcacacctgtctctgactctcaggcgagtgtttaaaaaagaggcggaacataagagggaacacctggagcgggatctgcctgaccctctagatcagaaggtcgtgacctgggagaccgtccagaaggaaaactttttgagcaagatggaaaagcgccgccgcgattccgagggcgaagtcctgcgaaaaacagcacaccgcgtcgattttatcgctaaatacctcggtggcctgcgggagcaggagaagcgtatcaaatgcctcgagtcccagattaactactgctccgtactcgtatctagcgttgctgatgtactggcccagggaggcgggcccaggtcctctcagcactgcggagaggggtcccagctcgtggccgcggaccaccgaggagggcttgacggatgggaacagcccggagccggtcagcctccatcagatacatag

SEQ ID NO: 180646 - DNA, 3498 bp, Artificial Sequence
  derived and/or modified sequence
atgcaggatgtgcagggccccaggcctggcagccctggagatgctgaggaccggcgggagctgggcctgcacagaggagaggtgaactttggaggcagcggcaagaagaggggcaagtttgtgcgggtgcccagcggcgtggcccccagcgtgctgtttgacctgctgctggccgagtggcacctgcctgcccccaacctggtggtgtccctggtgggggaggagcagccctttgccatgaagtcctggctgagagatgtgctgaggaagggcctggtgaaggccgcccagagcactggagcctggatcctgaccagcgccctgcgggtgggcctggcccggcacgtgggccaggccgtgcgggaccacagcctggccagcaccagcaccaaggtgcgggtggtggccgtgggcatggccagcctgggccgggtgctgcaccggcgcatcctggaggaggcccaggaggacttccctgtgcactacccagaagatgatggcggcagccagggccccctgtgcagcctggacagcaacctgagccacttcatcctggtggagcccggccccccaggaaaaggagatggcctgacagagctgcggctgcggctggagaagcacatcagcgagcagagagctggctatggaggcaccggcagcattgagatccctgtgctgtgcctgctggtgaatggagaccccaacaccctggagcgcatcagcagagctgtggagcaggccgccccctggctgatcctggtgggcagcggcggcattgctgatgtgctggccgccctggtgaaccagccccacctgctggtgcccaaggtggccgagaagcagttcaaggagaagttccccagcaagcacttctcctgggaggacatcgtgcgctggaccaagctgctgcagaacatcaccagccaccagcacctgctgactgtgtatgactttgagcaggagggcagcgaggagctggacaccgtcatcctgaaggccctggtgaaggcctgcaagagccacagccaggagccccaggactacctggatgagctgaagctggccgtggcctgggacagagtggacatcgccaagtctgagatcttcaatggagatgtggagtggaagagctgtgacctggaggaggtgatggtggatgccctggtgagcaacaagccagagtttgtgcggctgtttgtggacaacggggctgatgtggccgacttcctgacctacggccgcctgcaggagctgtacagatctgtgtccaggaagagcctgctgtttgacctgctgcagaggaagcaggaggaggcccggctgaccctggccggcctgggcacccagcaggcccgggagcccccagctggccccccagccttcagcctgcacgaggtgtcccgggtgctgaaggacttcctgcaggatgcctgccggggcttctaccaggacggccggcctggggacagaagaagagctgagaagggccctgccaagaggcccaccggccagaagtggctgctggacctgaaccagaagtctgagaacccctggagggacctcttcctgtgggccgtgctgcagaacagacatgagatggccacctacttctgggccatgggccaggagggcgtggccgccgccctggccgcctgcaagatcctgaaggagatgagccacctggagacagaagctgaggccgcccgggccacccgggaggccaagtatgaaaggctggccctggacctcttcagcgagtgctacagcaacagcgaggcccgggcctttgccctgctggtgagaagaaaccgctgctggagcaagaccacctgcctgcacctggccacagaagcagatgccaaggccttctttgcccatgatggagtgcaggccttcctgacccgcatctggtggggagacatggctgctggcacccccatcctgcggctgctgggcgccttcctgtgcccagccctggtgtacaccaacctgatcaccttcagcgaggaggcccccctgaggacaggcctggaggacctgcaggacctggacagcctggacacagagaagagccccctgtatggcctgcagagccgggtggaggagctggtggaggccccccgggcccagggcgaccggggccccagggctgtgttcctgctgacccgctggaggaagttctggggcgcccctgtgacagtgttcctgggcaatgtggtgatgtactttgccttcctgttcctgttcacctacgtgctgctggtggacttccggcccccaccccagggccccagcggccctgaggtgaccctgtacttctgggtgttcaccctggtgctggaggagatccggcagggcttcttcacagatgaggacacccacctggtgaagaagttcaccctgtatgtgggggacaactggaacaagtgtgacatggtggccatcttcctgttcatcgtgggcgtgacctgcaggatgctgcccagcgcctttgaagctggccgcacagtgctggccatggacttcatggtgttcaccctgcggctcatccacatctttgccatccacaagcagctgggccccaagatcatcgtggtggagaggatgatgaaggatgtgttcttcttcctgttcttcctgtctgtgtggctggtggcctatggagtgaccacccaggccctgctgcacccccatgatggccgcctggagtggatcttcagaagagtgctgtaccggccctacctgcagatcttcggccagatccccctggatgaaattgatgaggcccgggtgaactgcagcacccaccccctgctgctggaggacagccccagctgccccagcctgtatgccaactggctggtgatcctgctgctggtgaccttcctgctggtgaccaacgtgctgctgatgaacctgctgattgccatgttctcctacaccttccaggtggtgcagggcaatgctgacatgttctggaagttccagcgctacaacctgattgtggagtaccacgagaggcctgccctggccccacccttcatcctgctgagccacctgagcctgaccctgcggcgggtcttcaagaaggaggccgagcacaagcgggagcacctggagcgggacctgcctgaccccctggaccagaaggtggtgacctgggagaccgtgcagaaggagaacttcctgagcaagatggagaagagaagaagagattctgagggggaggtgctgaggaagacagcccaccgggtggacttcatcgccaagtacctgggcggcctgcgggagcaggagaagaggatcaagtgcctggagagccagatcaactactgcagcgtgctggtgtcctctgtggctgatgtgctggcccagggcggcggccccaggagcagccagcactgtggggagggcagccagctggtggccgctgaccaccggggcggcctggatggctgggagcagcccggggccggccagcccccaagtgacacctag

SEQ ID NO: 180647 - DNA, 3504 bp, Artificial Sequence
  derived and/or modified sequence
atgcaggatgtgcagggccccaggcctggcagccctggagatgctgaggaccggcgggagctgggcctgcacagaggagaggtgaactttggaggcagcggcaagaagaggggcaagtttgtgcgggtgcccagcggcgtggcccccagcgtgctgtttgacctgctgctggccgagtggcacctgcctgcccccaacctggtggtgtccctggtgggggaggagcagccctttgccatgaagtcctggctgagagatgtgctgaggaagggcctggtgaaggccgcccagagcactggagcctggatcctgaccagcgccctgcgggtgggcctggcccggcacgtgggccaggccgtgcgggaccacagcctggccagcaccagcaccaaggtgcgggtggtggccgtgggcatggccagcctgggccgggtgctgcaccggcgcatcctggaggaggcccaggtgcatgaggacttccctgtgcactacccagaagatgatggcggcagccagggccccctgtgcagcctggacagcaacctgagccacttcatcctggtggagcccggccccccaggaaaaggagatggcctgacagagctgcggctgcggctggagaagcacatcagcgagcagagagctggctatggaggcaccggcagcattgagatccctgtgctgtgcctgctggtgaatggagaccccaacaccctggagcgcatcagcagagctgtggagcaggccgccccctggctgatcctggtgggcagcggcggcattgctgatgtgctggccgccctggtgaaccagccccacctgctggtgcccaaggtggccgagaagcagttcaaggagaagttccccagcaagcacttctcctgggaggacatcgtgcgctggaccaagctgctgcagaacatcaccagccaccagcacctgctgactgtgtatgactttgagcaggagggcagcgaggagctggacaccgtcatcctgaaggccctggtgaaggcctgcaagagccacagccaggagccccaggactacctggatgagctgaagctggccgtggcctgggacagagtggacatcgccaagtctgagatcttcaatggagatgtggagtggaagagctgtgacctggaggaggtgatggtggatgccctggtgagcaacaagccagagtttgtgcggctgtttgtggacaacggggctgatgtggccgacttcctgacctacggccgcctgcaggagctgtacagatctgtgtccaggaagagcctgctgtttgacctgctgcagaggaagcaggaggaggcccggctgaccctggccggcctgggcacccagcaggcccgggagcccccagctggccccccagccttcagcctgcacgaggtgtcccgggtgctgaaggacttcctgcaggatgcctgccggggcttctaccaggacggccggcctggggacagaagaagagctgagaagggccctgccaagaggcccaccggccagaagtggctgctggacctgaaccagaagtctgagaacccctggagggacctcttcctgtgggccgtgctgcagaacagacatgagatggccacctacttctgggccatgggccaggagggcgtggccgccgccctggccgcctgcaagatcctgaaggagatgagccacctggagacagaagctgaggccgcccgggccacccgggaggccaagtatgaaaggctggccctggacctcttcagcgagtgctacagcaacagcgaggcccgggcctttgccctgctggtgagaagaaaccgctgctggagcaagaccacctgcctgcacctggccacagaagcagatgccaaggccttctttgcccatgatggagtgcaggccttcctgacccgcatctggtggggagacatggctgctggcacccccatcctgcggctgctgggcgccttcctgtgcccagccctggtgtacaccaacctgatcaccttcagcgaggaggcccccctgaggacaggcctggaggacctgcaggacctggacagcctggacacagagaagagccccctgtatggcctgcagagccgggtggaggagctggtggaggccccccgggcccagggcgaccggggccccagggctgtgttcctgctgacccgctggaggaagttctggggcgcccctgtgacagtgttcctgggcaatgtggtgatgtactttgccttcctgttcctgttcacctacgtgctgctggtggacttccggcccccaccccagggccccagcggccctgaggtgaccctgtacttctgggtgttcaccctggtgctggaggagatccggcagggcttcttcacagatgaggacacccacctggtgaagaagttcaccctgtatgtgggggacaactggaacaagtgtgacatggtggccatcttcctgttcatcgtgggcgtgacctgcaggatgctgcccagcgcctttgaagctggccgcacagtgctggccatggacttcatggtgttcaccctgcggctcatccacatctttgccatccacaagcagctgggccccaagatcatcgtggtggagaggatgatgaaggatgtgttcttcttcctgttcttcctgtctgtgtggctggtggcctatggagtgaccacccaggccctgctgcacccccatgatggccgcctggagtggatcttcagaagagtgctgtaccggccctacctgcagatcttcggccagatccccctggatgaaattgatgaggcccgggtgaactgcagcacccaccccctgctgctggaggacagccccagctgccccagcctgtatgccaactggctggtgatcctgctgctggtgaccttcctgctggtgaccaacgtgctgctgatgaacctgctgattgccatgttctcctacaccttccaggtggtgcagggcaatgctgacatgttctggaagttccagcgctacaacctgattgtggagtaccacgagaggcctgccctggccccacccttcatcctgctgagccacctgagcctgaccctgcggcgggtcttcaagaaggaggccgagcacaagcgggagcacctggagcgggacctgcctgaccccctggaccagaaggtggtgacctgggagaccgtgcagaaggagaacttcctgagcaagatggagaagagaagaagagattctgagggggaggtgctgaggaagacagcccaccgggtggacttcatcgccaagtacctgggcggcctgcgggagcaggagaagaggatcaagtgcctggagagccagatcaactactgcagcgtgctggtgtcctctgtggctgatgtgctggcccagggcggcggccccaggagcagccagcactgtggggagggcagccagctggtggccgctgaccaccggggcggcctggatggctgggagcagcccggggccggccagcccccaagtgacacctag

SEQ ID NO: 180648 - DNA, 3480 bp, Artificial Sequence
  derived and/or modified sequence
cctggcagccctggagatgctgaggaccggcgggagctgggcctgcacagaggagaggtgaactttggaggcagcggcaagaagaggggcaagtttgtgcgggtgcccagcggcgtggcccccagcgtgctgtttgacctgctgctggccgagtggcacctgcctgcccccaacctggtggtgtccctggtgggggaggagcagccctttgccatgaagtcctggctgagagatgtgctgaggaagggcctggtgaaggccgcccagagcactggagcctggatcctgaccagcgccctgcgggtgggcctggcccggcacgtgggccaggccgtgcgggaccacagcctggccagcaccagcaccaaggtgcgggtggtggccgtgggcatggccagcctgggccgggtgctgcaccggcgcatcctggaggaggcccaggtgcatgaggacttccctgtgcactacccagaagatgatggcggcagccagggccccctgtgcagcctggacagcaacctgagccacttcatcctggtggagcccggccccccaggaaaaggagatggcctgacagagctgcggctgcggctggagaagcacatcagcgagcagagagctggctatggaggcaccggcagcattgagatccctgtgctgtgcctgctggtgaatggagaccccaacaccctggagcgcatcagcagagctgtggagcaggccgccccctggctgatcctggtgggcagcggcggcattgctgatgtgctggccgccctggtgaaccagccccacctgctggtgcccaaggtggccgagaagcagttcaaggagaagttccccagcaagcacttctcctgggaggacatcgtgcgctggaccaagctgctgcagaacatcaccagccaccagcacctgctgactgtgtatgactttgagcaggagggcagcgaggagctggacaccgtcatcctgaaggccctggtgaaggcctgcaagagccacagccaggagccccaggactacctggatgagctgaagctggccgtggcctgggacagagtggacatcgccaagtctgagatcttcaatggagatgtggagtggaagagctgtgacctggaggaggtgatggtggatgccctggtgagcaacaagccagagtttgtgcggctgtttgtggacaacggggctgatgtggccgacttcctgacctacggccgcctgcaggagctgtacagatctgtgtccaggaagagcctgctgtttgacctgctgcagaggaagcaggaggaggcccggctgaccctggccggcctgggcacccagcaggcccgggagcccccagctggccccccagccttcagcctgcacgaggtgtcccgggtgctgaaggacttcctgcaggatgcctgccggggcttctaccaggacggccggcctggggacagaagaagagctgagaagggccctgccaagaggcccaccggccagaagtggctgctggacctgaaccagaagtctgagaacccctggagggacctcttcctgtgggccgtgctgcagaacagacatgagatggccacctacttctgggccatgggccaggagggcgtggccgccgccctggccgcctgcaagatcctgaaggagatgagccacctggagacagaagctgaggccgcccgggccacccgggaggccaagtatgaaaggctggccctggacctcttcagcgagtgctacagcaacagcgaggcccgggcctttgccctgctggtgagaagaaaccgctgctggagcaagaccacctgcctgcacctggccacagaagcagatgccaaggccttctttgcccatgatggagtgcaggccttcctgacccgcatctggtggggagacatggctgctggcacccccatcctgcggctgctgggcgccttcctgtgcccagccctggtgtacaccaacctgatcaccttcagcgaggaggcccccctgaggacaggcctggaggacctgcaggacctggacagcctggacacagagaagagccccctgtatggcctgcagagccgggtggaggagctggtggaggccccccgggcccagggcgaccggggccccagggctgtgttcctgctgacccgctggaggaagttctggggcgcccctgtgacagtgttcctgggcaatgtggtgatgtactttgccttcctgttcctgttcacctacgtgctgctggtggacttccggcccccaccccagggccccagcggccctgaggtgaccctgtacttctgggtgttcaccctggtgctggaggagatccggcagggcttcttcacagatgaggacacccacctggtgaagaagttcaccctgtatgtgggggacaactggaacaagtgtgacatggtggccatcttcctgttcatcgtgggcgtgacctgcaggatgctgcccagcgcctttgaagctggccgcacagtgctggccatggacttcatggtgttcaccctgcggctcatccacatctttgccatccacaagcagctgggccccaagatcatcgtggtggagaggatgatgaaggatgtgttcttcttcctgttcttcctgtctgtgtggctggtggcctatggagtgaccacccaggccctgctgcacccccatgatggccgcctggagtggatcttcagaagagtgctgtaccggccctacctgcagatcttcggccagatccccctggatgaaattgatgaggcccgggtgaactgcagcacccaccccctgctgctggaggacagccccagctgccccagcctgtatgccaactggctggtgatcctgctgctggtgaccttcctgctggtgaccaacgtgctgctgatgaacctgctgattgccatgttctcctacaccttccaggtggtgcagggcaatgctgacatgttctggaagttccagcgctacaacctgattgtggagtaccacgagaggcctgccctggccccacccttcatcctgctgagccacctgagcctgaccctgcggcgggtcttcaagaaggaggccgagcacaagcgggagcacctggagcgggacctgcctgaccccctggaccagaaggtggtgacctgggagaccgtgcagaaggagaacttcctgagcaagatggagaagagaagaagagattctgagggggaggtgctgaggaagacagcccaccgggtggacttcatcgccaagtacctgggcggcctgcgggagcaggagaagaggatcaagtgcctggagagccagatcaactactgcagcgtgctggtgtcctctgtggctgatgtgctggcccagggcggcggccccaggagcagccagcactgtggggagggcagccagctggtggccgctgaccaccggggcggcctggatggctgggagcagcccggggccggccagcccccaagtgacacctag

SEQ ID NO: 180649 - DNA, 3498 bp, Artificial Sequence
  derived and/or modified sequence
atgcaggacgtgcagggcccccggcccggcagccccggcgacgccgaggaccggagagagctgggacttcataggggggaggtaaacttcgggggctccggtaagaagcggggcaagtttgtgcgtgtgccatcaggggtcgccccgtccgtccttttcgatcttttactggcagagtggcatctgccggcacctaacctagtggtatccttggttggagaggaacaacccttcgctatgaagagttggctccgcgatgtgcttcgtaaaggattggtaaaagccgcgcagagcactggtgcatggatactgactagcgccctacgcgtgggcctggcccgccatgttggccaggcagtgcgggaccattctctcgcctccactagcactaaggttcgggtggtggcggttggaatggcctctttgggaagggtgttacataggcgaatcctggaagaggcccaggaggactttccagtgcactaccccgaagacgatgggggaagccaggggcctctttgttctctggactctaacttgtctcattttattctggtcgagccaggaccacctggcaaaggggacggcctgaccgaactacgcctgaggctggagaaacatatttccgagcagagagctgggtacggaggtaccggatcaattgagatcccagttctttgccttctagtcaatggtgacccaaacacacttgaacggatctcacgggcagtcgaacaagcagccccatggctgatacttgtgggaagcggtggtatcgcagatgtcctggccgcactggtaaaccagcctcatttgctggtccccaaggtcgcagagaagcagtttaaggagaagttcccctccaaacatttctcttgggaggacattgtgcgctggaccaagcttctgcagaatattacatcccatcagcatttacttacagtctacgacttcgagcaggagggcagtgaagaactggatactgtgatcctaaaagccttggtcaaagcctgtaagtcgcattcgcaggagcctcaggactacctcgacgagctcaaactcgccgtggcttgggaccgagtggacatcgccaagtctgagatctttaatggagacgtcgagtggaagtcttgcgacctcgaggaggtgatggtcgatgcattggtgtccaacaagccagaattcgtgcgtctcttcgtcgacaatggtgcagacgtggccgactttctcacatatggaaggctgcaggagctgtatcgcagcgtgtctaggaaatccttattattcgacctcctgcaacgaaaacaggaggaagctagactgactctcgcaggcctcgggacccaacaggcccgggaaccacccgccggccctccggccttctcgctccatgaagtttcccgggtgttgaaggacttcttgcaggacgcgtgcagaggcttttatcaggatgggagacccggcgaccgccggcgggccgaaaaaggcccggccaagagacctactggacaaaaatggctgctggacctcaaccagaaatccgaaaatccctggagggatctgtttctctgggccgtgttgcaaaacagacatgaaatggctacttatttttgggccatgggtcaggagggggtggcagctgcccttgctgcctgcaaaatactgaaggaaatgagtcacctggagaccgaggccgaggctgctagggctaccagggaggcaaaatacgagcgtctggctcttgatctgtttagtgagtgctacagcaacagcgaagcccgagcctttgcactactcgtccggaggaaccggtgttggagtaagaccacctgccttcacttggcaactgaggccgacgctaaggccttttttgctcatgatggagtccaggcattcttgacgcgcatttggtggggcgacatggccgctggaactcccattctgagactgcttggagccttcctgtgcccggccttagtgtacacaaacttgatcaccttcagtgaggaagccccactgcgtacaggtctcgaggacctccaggatctggactctctggacacggagaaatcacccctgtacggcctgcaatcccgggttgaagaactggtggaggctccgcgcgcccaaggggatagaggccctcgagcagtcttcctgctgacaagatggagaaagttttggggggcaccggtcacggtgttcctgggcaatgtcgttatgtacttcgcattcctctttctctttacatatgtgctcctcgtggactttcgaccacccccgcagggcccatccggtcctgaggttaccttgtatttctgggtgtttactctggttctggaagagatccgccaggggttcttcacggacgaggatacccatttggtcaagaaattcacattgtatgtcggcgacaactggaacaaatgcgacatggtagctatattcctgttcattgtgggtgtgacttgcaggatgttgccatccgcttttgaggcaggtcggaccgtgctggcaatggactttatggtctttactctgaggctgatccatattttcgccatccataagcagctgggaccaaaaataatcgttgtggagcgaatgatgaaggatgtcttttttttcttgttctttctctcagtctggcttgtcgcttacggcgttacaacgcaagccctcttacacccccacgacggtagacttgagtggatctttaggcgggttctataccgcccctacctccaaatctttggccagattcccctggacgaaattgatgaagctagggttaactgttccacgcaccctttgctactggaagattcacctagttgtccatctctgtacgcaaattggcttgtgatcctgctgctagtaaccttcctgttggtgacgaatgttttattgatgaatttgttaatcgccatgttctcctacaccttccaggtcgtgcagggcaacgccgacatgttctggaagtttcagaggtacaacctaattgtggaatatcacgaacgtcccgcactcgcccccccctttatcctcttgtcacacctttccctcacgcttagacgcgtatttaaaaaagaagctgagcacaaaagagagcacctggagcgggacctgcccgatccattggaccagaaggttgtgacatgggagactgtccagaaagaaaattttctgagtaagatggagaaacggaggagagattccgaaggggaagtgctcaggaaaacggcacatagagttgacttcatcgctaagtatcttgggggactcagggagcaggagaaacgaatcaagtgtttagaatcccaaattaactactgctctgtgcttgtctcaagtgttgcagatgtgctggcgcaagggggcggaccacgaagcagtcagcactgcggagagggcagccagctggtggcagccgatcaccgcggcggattggatggctgggagcagcccggcgccggccaaccaccaagcgacacatag

SEQ ID NO: 180650 - DNA, 3504 bp, Artificial Sequence
  derived and/or modified sequence
atgcaggacgtgcagggcccccggcccggcagccccggcgacgccgaggacaggagagagttgggcttgcaccggggcgaggtcaatttcggcggatccggtaagaagcgcggtaaattcgtgcgggtgccctctggcgtcgcaccatcagtattgttcgacctactgttggccgagtggcacctgccagcccccaaccttgtcgtctctctggtgggggaggagcagccttttgcgatgaagagctggctaagggacgtgctacggaaaggtttggtgaaagcagcccaaagcacaggcgcttggatattgacgtccgccctgcgcgttggtttagcgagacatgttgggcaggctgtgcgggaccactctctggcaagtacatctacgaaagtccgagtcgtggccgttggtatggcctcgctgggtagagttctgcatagacggatcttggaggaggcacaagttcacgaggacttccccgtacactacccagaggatgatggcggctcccaggggccactctgctccctcgactcaaacttatctcactttatcttagtcgagcccggcccaccaggaaagggagatggcctgaccgaactccggttgagactggaaaaacatatttctgagcagagagccggctacgggggtacgggatccatcgaaatccctgttctatgcctactggtgaacggcgaccccaatacactggaacggatctcaagggctgtggagcaagcagctccttggctgattctcgtcggaagtggcggcatagccgatgtgctggctgcactggtgaatcaaccgcatctcctagtacccaaggtggccgagaaacaattcaaggagaaatttccatccaagcatttctcctgggaggacattgttcggtggactaaacttttacagaatatcacaagtcaccagcacctcctgaccgtttacgatttcgaacaggaggggtcagaagagctggacacggtaattttgaaggctctggtgaaagcttgcaagtcacattctcaggaaccccaggactatctcgatgaactcaagctcgcagtcgcttgggatagagttgacatagcaaagtcggaaatcttcaatggcgacgttgaatggaagtcctgtgatctcgaggaagtcatggtcgatgccctcgtgtcaaacaagcccgaatttgtcagactgtttgtggacaatggggccgatgtagcagacttcctcacctatggtaggctgcaggagctgtatcggtctgtcagccgtaagtccctcttgttcgacctcctgcagaggaagcaggaggaagctcgactgaccctggccggactcggcacgcagcaggctcgggagccgccagctggacctccagccttctcactacacgaggtgagcagagtgctcaaggatttcctgcaggatgcctgcaggggtttctatcaggatggccgtcccggcgataggcggagagcagagaagggtccagccaaaagacccacaggtcagaagtggctgctcgaccttaatcagaagtcagagaacccatggagagatctcttcctgtgggcggtccttcagaacagacacgagatggctacttacttttgggcaatgggtcaagaaggggtggcagctgctctggcggcttgcaaaattctcaaggagatgtcccacttggaaaccgaggctgaagccgcccgggccacacgggaagcgaaatacgagcgtcttgccctggatctattttcggagtgttatagtaacagcgaggcccgggcattcgcgctgctagttcggcggaaccgctgctggagcaaaacgacctgcttgcatcttgctactgaggcagacgctaaggcctttttcgcccatgacggcgtacaggcattcctcactcgaatctggtggggtgacatggctgctggaacccccatcctgcggttactgggcgcctttctgtgtcccgcattagtgtacaccaatctgataacgttttctgaggaggctccactgcgaaccggtctcgaggacctgcaggacctcgatagcctcgacacagagaaaagtccactgtacgggctccagtctcgagtggaagaactagtggaggcgccccgcgcccagggcgaccgcggaccacgagctgtgttcctcttgacgagatggcgcaagttttggggggcaccagtgacggtcttccttggaaacgtggtgatgtattttgcattcctgtttttatttacctacgtcctactggtcgactttcgcccgccaccccagggtccctcaggccctgaggtgactctatacttctgggtcttcactctggtcctggaggagataagacaggggtttttcacagacgaagacacacacctcgtgaaaaagtttacgctctatgttggggacaattggaataagtgcgacatggtcgcaatctttctttttatcgtaggggttacatgccggatgctgccatctgctttcgaagctggcaggaccgtgctggccatggacttcatggtctttactctgcgcttgatacatatcttcgcaatccacaagcaactcggtcccaaaattattgtcgtggaacgaatgatgaaggacgtgttttttttcctcttcttccttagcgtgtggctggttgcatacggggtcaccacccaggcccttctacaccctcacgacgggcgcctggagtggatcttcagaagagtgctgtatagaccgtacctgcagatcttcggacagattccactggacgagattgacgaggctcgggtgaactgctcgacacaccccctgctgcttgaagatagccccagttgcccctccctttacgctaactggttggtgatcctgcttctggttacattcctcttggttacaaatgttctgctgatgaacctccttatcgccatgttcagctacacattccaggtggtccagggcaatgccgatatgttttggaagttccaaagatataacctcattgtggagtaccatgagcgaccagctcttgccccgccatttattctcctcagccacctcagcttgactttacgccgggtcttcaaaaaggaggcagagcacaaaagagagcatttagagagagatctacctgaccccttggaccaaaaagttgtcacatgggagacagttcagaaagaaaacttcctgagcaaaatggaaaagcgccgccgggactccgagggcgaggttctccggaaaactgcccatcgagtagacttcattgccaaatacctgggaggccttcgggaacaggagaaaagaatcaaatgtctcgaatcccagatcaattactgtagcgtcctggtcagctctgtggccgatgtgctggcacaagggggagggcccagatcgtcccaacattgcggggagggaagccaactcgtcgccgccgatcacagaggagggctggatggctgggagcagccaggtgcaggccagcctccttccgacacctag

SEQ ID NO: 180651 - DNA, 3480 bp, Artificial Sequence
  derived and/or modified sequence
cccggcagccccggcgacgccgaggaccggcgggagctgggcctgcaccgcggagaggttaatttcggaggaagtgggaaaaagcgagggaagttcgtgagggtaccatcgggggttgctccgagcgtcctctttgatctgctgcttgcagaatggcatctgccagcaccaaacttggttgtttccttggtcggagaagaacagcctttcgctatgaagagctggctgcgggacgtgttaaggaagggtctggttaaggctgcccagagcacaggcgcctggatcctcactagcgcgctgagggtgggtttagctcgccatgtggggcaggccgttcgtgaccattccctcgcatctacaagtacaaaggttcgtgtcgtggctgtgggcatggctagcctgggtcgggtgcttcaccgtcggatactggaagaggcccaggttcacgaggacttccctgtacattaccccgaagatgacggaggttcccagggacctctttgttcactagatagtaacctgtctcattttatactggttgaacccggtcccccagggaagggcgatggcttgacagagctgaggttgcggctggagaagcacatcagcgagcagcgagctggttatggtgggacagggagcatcgagataccagtgctgtgcctgctggtgaacggcgatcccaacacactcgaaagaatcagcagagctgtggagcaggccgcgccgtggctcatactcgtaggctccggcgggatcgcagatgtactggccgccctggtgaaccaaccacacctcttggttccaaaagtggctgagaagcagttcaaggagaaatttccatcaaaacacttcagttgggaggatattgtgcggtggacgaaacttttgcaaaacatcacatcccaccaacatcttctcactgtgtacgatttcgagcaggaagggtctgaagagctagataccgtgattctgaaagctctggtcaaggcttgcaagagccattcccaggagcctcaggattatttggatgagctgaagctggccgtcgcttgggaccgcgtcgatatcgcgaaaagcgagatattcaacggcgatgtggaatggaaaagctgtgacttggaagaggtaatggtggatgctttggtgtctaacaaacccgagtttgtgcgtctttttgtggacaacggtgcagacgtggccgactttctgacttacgggcgcctgcaggaactgtacagatcggtgtcaagaaaaagcctgcttttcgacctgttgcagagaaagcaagaagaggcacgcctgactttggctgggctcggcactcaacaggctagggaaccaccagccggaccgcctgccttcagccttcacgaagtgtctagggtgctgaaggacttcttgcaggatgcatgtagggggttttaccaggatggccgcccgggcgaccggcgacgtgctgagaagggccccgctaagagacctaccggccaaaagtggttgcttgatctcaatcagaaaagcgaaaatccttggcgtgatctctttttatgggcggtgctgcaaaacagacatgaaatggccacttacttttgggctatgggccaggaaggggttgctgcagcactagctgcttgcaagatccttaaggagatgtcacacctcgaaaccgaagctgaggccgctcgtgctacccgggaagccaagtacgagcggctggccctggacctgttttcagagtgttacagcaactctgaggcccgggcattcgccttgttggtgcggcgaaaccgatgctggagcaaaaccacttgcctccacctggcaactgaagcagatgctaaagccttctttgctcacgatggggtgcaagcctttcttaccagaatttggtggggggatatggccgccggaacgccaatcctaaggctgctcggggcattcctgtgccctgcactcgtgtatacgaatcttataacgtttagcgaagaagcgccgctcagaactgggctggaggatctccaggacctcgactccctcgacaccgaaaaatccccactgtacggcctccagtctagggtggaagaattagtcgaagcccctcgcgcccagggggacagaggccccagggcggttttcctcctaacccggtggcggaagttttggggcgctccagttacagtgttcctaggaaatgtcgtcatgtactttgctttcctctttttgtttacctacgttctgctggtggatttccggcctcccccacaggggccttctggccctgaagtgacactatacttctgggtgttcaccctggtcctcgaggagattcggcagggctttttcacggacgaggatacacacctcgtcaagaagtttacactgtacgtaggcgacaattggaacaagtgcgatatggtcgccatctttttgtttatcgttggcgtgacttgcaggatgttacctagcgccttcgaggcagggcggacagtgctcgccatggactttatggtgttcacacttcggctgatccatatatttgcgattcacaaacagttgggccctaaaataatagtggtagagagaatgatgaaagatgtattcttcttcctgtttttcctaagtgtgtggctggtggcgtatggcgtgaccacgcaggctctgctgcatcctcacgacggaagactagagtggatttttcggcgcgtactgtacaggccttaccttcaaattttcggacagatacctctggatgagattgatgaggcaagagtcaattgcagtacccatcccctgttgcttgaggactccccctcgtgcccctcactgtacgccaattggctcgtcatcctgctgctggtcacgtttctcctagtgaccaacgtattgcttatgaacctgctgatagccatgttcagctacaccttccaggtagttcagggcaacgctgacatgttctggaaattccagcgctacaatctgattgtggaataccacgaaaggccagcactcgctccaccttttattctactcagccacctttccctcactttgaggagagtgttcaagaaggaggctgaacataaacgggaacatctggaacgcgatctccctgaccccctcgatcaaaaggtggtgacatgggaaaccgtgcagaaggagaactttctctccaagatggagaaaaggagacgggatagtgagggtgaagtacttaggaagactgcccatcgtgtggactttattgcaaaatatctcggaggactgagagagcaggagaaaagaattaagtgcctcgaaagtcagatcaactattgcagcgtgctggtgtctagcgtagcagacgtgcttgcccagggcggggggccccgttcttcccagcattgtggagaaggaagccagctggtggcggctgatcaccgcgggggacttgatggatgggagcaaccaggtgcagggcaacctccatccgatacttag

SEQ ID NO: 180652 - DNA, 3498 bp, Artificial Sequence
  derived and/or modified sequence
atgcaggacgtccaggggcctcgccctggatcacctggagacgctgaagatagacgagagcttgggctgcaccgcggtgaggtgaacttcggaggttccggcaaaaaacgcggaaagttcgttcgcgtgcctagcggcgtcgctccgagtgttttgttcgatctgcttctcgcagagtggcacctacctgcccctaatctcgtagtctctctggtgggggaagagcagccttttgcgatgaaatcatggcttcgggatgtgcttcgcaaaggtctggtgaaagccgctcagagtaccggggcttggatcctgacctctgccttacgcgtgggcctcgcaagacatgtgggacaggccgtccgcgatcattccctcgccagcacctcgaccaaagtgcgggtggtggccgtgggtatggctagcctggggagagtgctgcacaggagaatcctggaagaggcccaggaagatttccccgtccattaccccgaagatgacggaggctcacaaggaccactttgctcactggactccaatctcagccacttcatcttggtggagccaggccctcccggtaaaggcgacggattgacagaactccgcttacgtttggaaaagcatatcagcgaacagcgcgcaggatacggcggaacgggtagcattgagattccagtgttatgtctcctcgtgaacggggatcccaacacactggagagaatctcccgggctgtggagcaggctgcaccctggctgatcttggtgggcagcggcggaattgccgacgtgctggctgccctagtgaatcagccccacctgctggtgccaaaggtggccgaaaaacagttcaaagagaaattccccagcaagcatttctcctgggaagatattgtgaggtggactaagctgctccagaatatcaccagccaccaacacctgctcactgtgtacgactttgaacaagagggaagcgaagagctggacacagtgatcctaaaggcattggtcaaagcctgtaagagccacagtcaggagccacaggattacctagacgagttgaaattggccgtggcctgggaccgcgtggatattgccaagagtgagatattcaacggggacgttgaatggaaatcctgcgacctagaagaggtgatggtcgacgcgctggtgtcgaacaagcccgagtttgtgagacttttcgtggacaatggcgcagacgtagccgacttcttgacctatgggaggctccaggaactgtaccggtcagtgtctaggaaatctctgctttttgatctactccagagaaagcaagaagaggccaggctcacgctggcaggactcggtactcagcaggctcgcgagcctcctgctgggccaccggctttctcacttcacgaggtgtcaagagttctcaaggatttccttcaagatgcttgcaggggcttctatcaggacggtcggccaggagatcggagaagggctgaaaaaggccctgccaaacgtcccacgggtcagaagtggttgttggacctcaaccagaaatccgagaacccatggagggatttgtttctgtgggccgtgctgcagaaccgacatgagatggctacctacttttgggcaatgggccaggagggcgtggcagccgcattagcagcatgtaaaattctgaaagagatgtctcatctggaaacagaagcagaggctgctcgtgccactagggaggctaaatatgagcgactcgctttggatctgttcagcgagtgttattctaattctgaggcacgggctttcgcgctgctagtccggaggaaccggtgttggtcaaagactacctgcctacatctggcaacggaggcagacgccaaggccttcttcgcacatgacggggtgcaggccttccttacgcgaatttggtggggcgatatggcagccggaactcccattttgagacttctaggcgcatttctctgcccagctttggtgtataccaacctgattacgttctcagaagaagcgccactgcgtactggtcttgaagacctgcaagacctggactccttagacacagagaaaagtccattgtatgggctgcagtcccgagtggaagagctggttgaggcgcctcgggcacagggtgaccgtggtccaagggctgtgttcctcctgacacgttggcgcaagttctggggtgcccctgtcaccgtctttctaggaaatgttgtgatgtattttgcctttctctttctgttcacttacgtgctgctggtagacttcaggcctccccctcaaggaccttctggccctgaggtgaccctctacttctgggtctttaccctcgtgttggaagagatcaggcagggatttttcacagacgaagacacccaccttgtgaagaagtttacactctatgtgggagacaactggaacaagtgcgatatggtcgcaatcttcctcttcattgtgggggtcacctgcagaatgttgccgtctgctttcgaggcgggtcggacagtcttagccatggacttcatggtgttcaccctcagactgatccatatcttcgccatccacaagcagctggggccaaagataattgtggtagaacgaatgatgaaagatgtgttcttctttctgtttttcctctcagtgtggcttgtagcttacggagttactactcaggccctactgcatccacacgatgggagactcgaatggatttttaggagagtgctgtaccgtccatatctccagatcttcggacagatccccttggacgagattgacgaggccagggtgaactgcagcacccatcctctgcttctcgaggactctccttcctgccctagcctgtatgccaactggcttgtcattctgcttctcgtcacatttctcctcgtgaccaacgtgctgcttatgaacctgctcatcgcaatgttcagctacacttttcaggtggtccagggcaacgcagacatgttctggaagtttcaaagatacaaccttattgtggaataccacgagcggcctgccctagctcctccctttatcttactcagccatctgtcacttactttaagaagggtgttcaagaaggaagccgaacacaaacgagagcatctagagagagatctgccagatcctctggatcagaaagtagtgacttgggagacagtgcagaaggagaactttctctctaagatggagaagcggaggcgcgattctgagggcgaagtgttgcgaaagacagcccatcgggtcgattttattgccaagtacttgggaggacttagagagcaagagaaaagaattaaatgtctggagtcacagatcaattattgcagtgtgttggtcagctccgtcgccgatgttcttgctcagggtgggggacccaggtcttctcagcattgtggggaaggaagtcagctggtggctgcagatcacagaggaggactggacgggtgggagcaacccggtgccggacagccgccatcagatacgtag

SEQ ID NO: 180653 - DNA, 3504 bp, Artificial Sequence
  derived and/or modified sequence
atgcaggacgtacagggtccacgtcccggaagtccgggagacgcagaagaccgcagagagttaggactgcacagaggcgaggttaacttcggtggttcaggtaaaaaaagaggaaaatttgtgcgtgtgccttcaggcgttgctccatcggttctattcgatcttctcctcgcagagtggcatttaccggctcccaacctggtcgtgtcattggtgggcgaggagcagcccttcgccatgaagagttggcttagggatgtactgaggaagggactggtgaaagccgctcaatccaccggagcctggatcctgacctccgccctgcgcgtgggcttggctagacacgttggacaagcggtccgtgaccacagcctggcttccacatctactaaagtgcgagtagttgccgtgggtatggctagcttggggagggtactgcatcgccgtatcctcgaggaggcccaggttcatgaagattttcccgtgcactaccccgaagatgatggcggttctcaaggccctctctgttctctggatagcaacctatcacactttatactggtagaaccaggaccgcctgggaaaggcgacggattgactgagctgcgcttgagacttgagaaacatattagtgaacagcgggctggctacggtggaacaggttcaatagagattcccgtgctgtgcctcttggtaaacggtgatcctaatactcttgaacgtatatctcgggcagttgaacaagccgcaccatggctaatcctggtcggtagcggagggatcgcagacgtcctcgctgctcttgtgaatcaaccacaccttttagtgcccaaagtggcagaaaaacagtttaaggaaaagttcccaagcaaacacttctcctgggaggacattgtgcggtggaccaaattgctgcagaatataaccagtcatcagcacctactgactgtgtacgatttcgagcaggaaggctccgaagagctcgataccgtgattctgaaggctctcgtaaaggcctgcaagtcacactcacaggaaccgcaggactacttagatgaactgaaactggctgttgcttgggacagggtggatattgccaagagtgagatattcaacggagacgtggagtggaaaagttgcgacctggaagaggtaatggtggatgcactagtgtctaacaagcctgagtttgtccgattattcgtggataatggcgcagatgtcgctgactttctgacatatggtagattgcaagaactgtaccgttccgtctccaggaagtccctactgttcgacctgcttcagcgaaagcaggaggaggctagattgacgctcgctggtcttgggacgcagcaggcacgggaacccccagccggacctcctgcctttagcttgcacgaagtgtcacgtgtacttaaagacttcctgcaggacgcatgccggggattctatcaggatggaaggccaggcgataggagaagggccgaaaaggggccagcaaagagacccaccggtcagaagtggctactcgacctcaaccagaagtcagaaaatccttggcgcgacctgtttctctgggcggtcttacaaaatagacatgagatggccacctacttttgggcaatggggcaggaaggagtcgccgcagccctggctgcctgtaaaatcttgaaggagatgagtcacctcgagacagaagctgaagcagccagagcgacccgggaagcgaagtacgaacgtcttgctctggatctgttctcagaatgctactcgaacagtgaggcaagagcttttgcattgttggtgcggaggaaccgctgttggtccaagaccacctgcctccacctagccaccgaggccgacgcaaaagctttttttgcccacgatggtgtgcaggcctttcttacaaggatctggtggggcgacatggcagcaggcacacccattcttaggcttctcggggctttcctttgtcccgctctggtgtatactaatctgatcacctttagtgaggaggcacctcttagaaccggcttggaggacctccaggacctcgactccctggacacggaaaaaagcccgctgtatgggttgcaatctcgagttgaagagctcgttgaggctccacgagcccaaggagacagaggcccacgagccgtattcctgctaacaaggtggcggaaattttggggcgcaccagtgaccgtctttcttgggaacgtagtgatgtatttcgcctttctgtttctgttcacttatgttctcctggttgacttccggccacctcctcaggggccaagcggccctgaagtcaccttgtacttctgggtgtttacactggtattggaagagattagacaaggcttttttaccgacgaagatactcacctggtcaaaaagttcacgctttacgtgggcgataactggaacaagtgcgatatggtcgctattttcctgttcattgtgggggtaacatgcagaatgctaccttcagcttttgaagctgggcgaacggtgctagcgatggatttcatggtttttacccttcgccttatccatatcttcgccatacataagcagctggggcctaagatcattgttgttgagcgcatgatgaaagatgtgttttttttcctgttctttctctccgtgtggctggtagcctacggcgtaacgacacaggcgctccttcaccctcatgacgggcgacttgagtggatattccgtcgcgtactctataggccgtatttacaaatttttgggcagatacccctggatgagatcgacgaagcaagggtcaattgctccacacacccccttctcctggaggattcgccctcctgcccatcactttacgcgaactggcttgttattttactccttgtcaccttcttgcttgtgactaatgtcctgctgatgaacctgctcattgcaatgttctcctatacgtttcaagtggtacaaggtaacgctgatatgttctggaagtttcaaaggtacaacctgatagttgaatatcacgaacggccagcccttgccccaccttttatcctccttagccacttatcactgacgctgcgccgtgtgtttaaaaaagaggccgagcataagcgtgagcacctggagcgcgatctgcccgatccactggatcagaaggttgtcacatgggagaccgtccagaaggaaaatttccttagtaagatggaaaagcggaggagagattcagagggagaggtgctgaggaagaccgcgcacagagtggactttatcgccaagtatctggggggactcagggagcaagagaaacggatcaaatgtctggagtcccaaatcaattactgtagtgtgctggtttcttccgtcgcagatgttctggctcagggcggaggtccgcgaagttctcagcactgtggagagggctctcagctggttgcagcagatcaccgaggcggtctggacggctgggaacagcctggtgctggccaacccccatctgatacctag

SEQ ID NO: 180654 - DNA, 3480 bp, Artificial Sequence
  derived and/or modified sequence
cctggctctccgggtgacgccgaagatcgaagagagttaggtctgcaccggggtgaggtgaatttcgggggatccggcaaaaaacgcggaaagttcgtgcgagtgccttccggagtcgcccctagcgtactttttgatctactgctcgccgagtggcacttgcccgctccaaacctggtagtatccctggtgggcgaggagcaaccatttgcaatgaaatcttggcttagagacgttctgcgaaagggcctcgttaaagccgctcagtctaccggcgcatggattttgacttcggcattgagagtcggtctggccagacatgtgggtcaagctgtgagagaccacagtttggctagtacgagcacgaaggtgcgggtggtggccgtgggcatggcctccttaggacgggtgcttcaccgcagaattctggaggaagcgcaggtgcatgaggattttcctgtgcactaccctgaggacgacggagggtcccagggccctctgtgttcgctggactccaatctttcccacttcatcttggttgagcctggtcccccagggaagggggacggactgacggaacttcgcctaagactggagaagcacatttcagagcagcgggctggttatggaggtaccggcagtatagaaataccagttttgtgcctgctggttaatggcgaccctaacactctagaacgaataagtcgcgcagtggagcaagcagcaccatggctcatcctggtaggtagtgggggaattgctgatgttctggccgctttggtgaaccaacctcatcttctggtcccgaaggtggctgagaagcaattcaaggaaaaattcccatcaaaacacttctcatgggaagatatcgtgcgatggaccaagttgctgcagaatatcaccagccatcagcatttgcttaccgtctatgactttgaacaggagggctccgaagagctggacactgttatactcaaagcgctagttaaagcttgtaaatctcactcacaggaaccccaggattacttggacgagctgaagctagccgtcgcctgggacagagttgacatcgccaagagtgagatctttaacggcgacgttgaatggaaatcatgcgatcttgaagaggtcatggtggatgccctggtgtcaaacaaaccagagttcgtgcggctctttgtggataatggggcagatgtggcggacttcctaacttatgggagattgcaggagctatataggtcagtgagtcgtaagtctcttctcttcgacttattgcagcgcaagcaagaggaggcgagactgactctggccggattaggtactcaacaggcccgtgagccccctgccggaccccctgccttctccttgcacgaagtgtctcgcgtgctgaaggacttccttcaggatgcctgccggggtttctaccaggacgggaggccaggggataggcggcgtgcagaaaagggcccagctaagcgacccactggtcaaaagtggctgcttgatctcaatcagaagagcgaaaacccatggagggacttattcctctgggctgtgttgcagaataggcacgagatggctacatacttttgggctatgggtcaggagggggtggcggcagcacttgcggcttgcaaaatccttaaggaaatgtcccacctggaaacagaagctgaggctgctcgggctacccgtgaggcgaagtacgagagactggcacttgacttgttttcagagtgctattctaattccgaggcccgagccttcgcactacttgtccgcaggaaccggtgctggtcgaagaccacatgcctgcacctggccacagaggccgacgcaaaagcttttttcgcccacgatggagtgcaggcctttctcaccaggatatggtggggggacatggccgcagggacccccatcttgcgcttactgggcgcatttttatgtccagccctcgtgtacacaaatctaattactttttcagaagaggcacccctccgtaccggccttgaggacctacaggatctggactccctggataccgagaagtcaccgctttatgggctgcagagtcgtgtggaagagctggtcgaggccccacgggctcaaggggacagagggcctagggctgtgttcctcctgactcgctggcgcaaattttggggggcacctgtcaccgtgttcctgggaaacgtagttatgtactttgcattcttgtttctctttacttacgtactcctggtggacttccggcctccaccacagggcccatctgggccagaggtcactctgtatttctgggtgtttacactggttctcgaggagattcggcaggggtttttcactgatgaagacacccacctggtcaagaagtttaccctgtatgtgggagataactggaacaaatgtgatatggttgcgatatttctctttatagtgggggtgacctgtcgtatgttacctagcgctttcgaggcaggcaggaccgtgctggctatggatttcatggtctttacacttcgtctgatacacatttttgcaattcacaagcagctcggtccaaaaattatcgtggtcgagagaatgatgaaagacgtgttttttttcctgtttttcctgtctgtgtggctggtagcctatggggtaactacccaggctctgctgcatcctcacgacggaagactcgaatggatttttcgtagggtcctgtatagaccctacttgcaaatattcgggcagatcccactagacgagatcgacgaggcccgagtcaactgttctacacaccctctccttcttgaggacagcccatcttgccccagcttgtacgccaattggttagtaatactgttactggtcaccttcctactggttacgaacgtccttctaatgaatttgctgattgctatgttctcatacacctttcaggtggtgcagggcaacgccgatatgttctggaaattccagcgctataacttaattgtggaataccacgagcgcccagctcttgctcccccatttatcctactgagccacctgagcttaactctccgccgtgtgtttaagaaagaggccgagcacaaaagagagcatctggagcgggacctcccagatccactggatcagaaagtagtgacttgggagaccgtacagaaggagaatttcctgtcgaagatggagaagagaagaagggattctgagggagaggttttacgcaagacagcgcatcgtgtggatttcatcgcaaagtatttgggcggtctgagggaacaggaaaaacggatcaagtgtctggagtcacagataaactactgtagcgtcctggtttcaagcgtggccgacgttttggctcaagggggagggcctagatcaagccagcactgtggggaaggctcccagctagtggcagctgaccatcgcggagggcttgacggctgggagcagcccggagctggccagcccccaagtgatacttag

SEQ ID NO: 180655 - DNA, 3498 bp, Artificial Sequence
  derived and/or modified sequence
atgcaagacgtgcagggccctagaccgggatcacccggcgatgccgaagatcgtcgggagctcgggcttcacaggggtgaagtgaacttcggaggttccggtaaaaaaaggggtaagttcgtgcgcgtgccatcaggcgttgcaccatctgtactgtttgacctgttgttagcagaatggcatcttccagcacccaatctagttgtaagcttggtaggcgaagaacagccatttgcaatgaagtcatggttacgggacgtgctgcggaaaggtcttgtgaaggctgcccagtccacaggggcctggattctcacatcagcactgcgcgtgggtctcgctaggcatgtcgggcaggctgttagagatcattcgctcgcatctacctcaactaaagtccgtgtcgtcgctgtgggcatggcctcactggggagggtccttcatcggcgcatactcgaagaagcgcaagaagactttcctgtccactaccctgaagatgacggagggtcccagggacccttgtgcagcctggactccaaccttagccattttatcctagtcgagcctggtcccccagggaagggcgatgggctgactgagctgagactcagactcgaaaaacacatcagtgagcagagggccggatatggaggtacaggatccatcgagattccagtgttgtgtctcctggtgaatggtgatcccaacacccttgaaaggatttccagggccgtcgagcaggctgcgccttggttgatccttgttggctcaggaggaattgcagacgtactcgccgccctggtgaaccaaccccatttgcttgttccaaaagtcgcagaaaaacaattcaaagagaaatttccctcaaagcattttagttgggaagacattgtgcgttggaccaaactgctgcagaacatcacaagtcatcaacatctcctaacagtgtatgactttgaacaagaaggatccgaggagctcgataccgtgattcttaaagcgttggtgaaggcatgtaagagccactcccaggaaccacaagattaccttgacgagctcaagctggcagtagcttgggacagagtggatattgccaagtcagagatctttaacggtgatgtagagtggaagtcctgtgaccttgaagaagttatggttgacgccctcgtgagtaacaaacctgaattcgttaggttattcgttgacaatggcgccgatgtggcggattttctgacttacggtagactccaggaactgtacagatcggtgtctagaaaaagccttctgttcgatctgctgcaaaggaaacaggaggaagccaggctgaccttggcagggctgggcacccagcaagccagagagcctcctgcaggaccaccagccttctcccttcacgaggtgagccgggtcctgaaggatttccttcaagacgcctgcagaggattctatcaggacggcagacccggggataggagacgcgccgagaaagggcccgcaaagcgacccaccggccagaagtggctgctcgacctcaaccagaaaagcgagaacccctggcgcgacctcttcctgtgggcagtgctccagaacagacacgaaatggctacttatttttgggcgatgggacaagaaggtgtcgctgctgcactcgcagcctgtaagatcctgaaggaaatgtcacacttagaaaccgaggctgaggccgcgcgagccacaagggaagccaagtacgagaggctggccctggatctgttcagcgagtgctacagtaattccgaggctcgagccttcgccttactcgtgcgcaggaaccgctgttggtctaagacaacttgcctgcatcttgctacagaagccgacgccaaagccttttttgcccacgacggcgtgcaggccttcctgacaaggatctggtggggggacatggctgctggaaccccgatcctgagactgctgggtgcatttttgtgtccagccctcgtgtacacaaatctcattaccttttccgaggaggcacctctgcggaccggcctggaagacctacaggacctggattccctggatacagaaaagtccccactctacggactacagtcacgagtagaagaactggtcgaagcacctagagctcagggtgacagaggcccacgggcagtgttcttgctcacacgatggcgcaaattctggggggcgcccgtgacggtgttccttgggaatgtagtgatgtatttcgcctttctctttctatttacctacgtgctcctggtggactttcggccccctccacagggccctagtgggcctgaggtaacactgtacttctgggtgtttacactggtgcttgaggagatcaggcaaggcttctttactgacgaagacacgcatctcgtgaagaaatttactctgtacgtgggcgataattggaacaaatgtgacatggtggctatctttctgtttattgtgggcgtcacctgccggatgctcccatccgcatttgaagccggccgcacggtgttggctatggatttcatggtgttcaccctaaggctcattcacatattcgccattcacaagcagctaggcccaaaaattatcgtcgtcgagagaatgatgaaagatgttttctttttcctgttcttcttaagtgtgtggctggtggcttacggggtgaccacacaagcacttctacacccccacgacggtagactagagtggatctttcgacgggtcctttatcggccctacttacagatttttggacaaattcctctggacgaaattgacgaagccagagtgaactgctcgactcaccccctgctgctggaagactcccccagttgtccgtccctctatgccaactggctggttattcttctcctagtgaccttcctactggtgactaacgttctactaatgaacctcctgatcgcgatgttcagctatacgttccaggttgttcaggggaacgccgacatgttctggaaatttcagcgctacaacctgattgttgagtaccatgagagacccgccttggcaccaccttttattctactgtcacacctctcgctcacgcttcgccgggtgtttaagaaagaggcagagcacaagcgcgagcatctggaaagggacctgcctgaccctctggatcagaaggtggtcacctgggaaacagtgcagaaagagaatttcctcagcaaaatggagaagagaaggagagatagtgagggcgaggtcttgcggaagacggcgcacagagtggattttatagccaaatatctcggaggacttcgcgagcaggagaagcggattaagtgcctagaaagccagattaactactgcagtgtcctcgtttcctccgtcgccgatgtgctggcacagggaggcgggccaagatcctctcaacattgcggtgagggcagccagctggttgccgccgatcaccgaggggggctggatggatgggagcagcccggagcaggtcaacctccaagcgatacctag

SEQ ID NO: 180656 - DNA, 3498 bp, Artificial Sequence
  derived and/or modified sequence
atgcaagatgttcagggcccacggcccggctcacccggagacgctgaagaccgtagggagctgggattgcatcgcggagaagtaaactttggaggaagtggcaagaaacgtggaaagtttgtcagagtgccttctggagtggctcccagcgtcctgtttgacctgcttcttgcagaatggcacctccccgcaccaaatctcgtggtctcccttgtcggagaggagcaacccttcgctatgaaatcctggctgcgggatgtccttagaaagggccttgtgaaagccgcacagagtaccggtgcgtggattctaaccagtgctttgcgggtcggcctcgctcggcatgtgggccaagctgttcgggaccattcactggcttctacttcaactaaagtccgcgtcgtggccgttggaatggcgtctcttggacgcgtgttacaccgccgaatcctagaagaggcccaggaagacttcccagtccattacccagaagatgacggcgggtcccaagggcctctttgcagtctggactctaatctctcccactttattctggtcgaaccagggccccccggcaaaggcgatggattgaccgagctgcgcctgcggctggagaaacacatatcagaacagcgcgccggatacggaggtacaggctctattgaaatacccgttctgtgcttacttgtgaatggagatcctaacacgttggaacggatctctagggctgtcgaacaggccgcaccttggctcatactggtgggaagcggtggtatcgctgacgtgcttgctgcccttgtgaaccaaccccatctgttagttcctaaggtagcagagaaacagttcaaagaaaaattccccagcaaacacttttcttgggaggacattgtcagatggacaaaactgctacaaaacattacgtctcaccagcacttgttgactgtctacgactttgagcaggaaggctcagaagaacttgatactgtgatcctcaaggctctggtgaaagcgtgtaaatcccattcacaagaaccccaggactaccttgacgaactgaagttagcagtcgcatgggaccgagtggacatcgctaagtctgagatcttcaatggagatgtggagtggaagagctgtgatctcgaggaagtaatggtggatgcgcttgttagcaataagcctgaatttgtgcgactgttcgtggataatggggcagacgtcgccgatttcctgacatatggtcggctgcaagagctgtacagatcggtgtctcgaaaatcgttgctcttcgatctgttacaacgcaagcaagaagaggctagactgactctcgcaggactcggcactcagcaggctagagaaccacccgccggcccccccgccttctcattgcacgaggtttcaagggttttaaaagatttcctgcaggacgcatgccgcggcttttaccaggacggtaggccaggggatcgaagacgcgccgagaaaggccccgcgaagagacctactggacagaaatggctgctagacctaaatcagaagtcagaaaatccctggagagatctgtttttgtgggccgtgcttcaaaatcgccatgaaatggcaacctatttctgggccatgggacaggagggtgtggccgctgccctggccgcttgtaagattctaaaagaaatgtctcacctggagactgaggctgaagctgcacgagccactcgcgaagcaaagtatgaaagattggccttggatctgttctctgaatgctattccaactcagaggctcgcgcttttgcactccttgtgcggaggaaccgctgctggtcaaagacaacctgtctacatcttgccaccgaggctgacgccaaggctttctttgcacacgatggcgtgcaggcatttttgacaagaatctggtggggggacatggcagccggcacccccatcctccgtctgctgggtgcatttctctgccctgctttagtgtacacaaatctgatcacgtttagtgaagaagctcctctccgcaccggtctagaagatttgcaagacctggactcactggatacagaaaaatcccccctgtacggcttacagtctcgcgtggaagaactagttgaggcgccaagagcacagggagatcgcggacccagggccgtgtttttgctcactcgctggcggaaattttggggcgctccagtcacagttttccttggaaatgtggtcatgtattttgccttcctgttcctcttcacttacgtcttgctcgtggactttagaccacctcctcaggggccttccggtcccgaagtaacgctctatttttgggtgtttacactggttctcgaagaaataagacaggggttttttactgatgaagatacccatttagtcaaaaaatttacactctatgtcggagacaactggaataaatgtgatatggtggccatttttctctttatcgtcggtgtgacgtgccgcatgctgcccagcgcctttgaggctgggcgaactgtgctagctatggacttcatggtctttacactccgcctgatccacatctttgctatccataaacagctgggcccaaaaataatcgttgttgagagaatgatgaaagacgtcttctttttcttgtttttcttgtcagtgtggttggtggcatacggtgttaccacacaagctctcctacacccccacgatggcaggcttgaatggatttttagacgagttctctacagaccttatttacagatttttggtcagattcccctggatgaaatcgatgaagcccgagtaaactgctcaactcatcctctgctgctcgaagattcaccatcctgcccatcactgtatgccaattggcttgtaatcctgctcctggttactttcctgctcgtgaccaacgtgctcctcatgaaccttctgatcgccatgttcagctatacttttcaggtggtccaagggaacgctgacatgttctggaaatttcaacgatacaacctgatagtggaatatcacgagagacccgcgctcgcccctccttttatcctactgtctcatctttctctaacactccgacgggtttttaagaaagaagctgagcataaaagagaacacctcgagagggacctgcccgacccccttgatcaaaaagtcgtgacatgggaaacagtgcagaaagagaatttcctttctaagatggagaaacgaaggcgggatagtgagggagaggtcctaagaaaaacggcccatcgagttgactttattgctaagtatttaggcggtctacgcgaacaggagaaacggattaaatgtctggaatcacagataaactactgctccgtcttagttagctcggtggcagatgttttagcacagggcgggggacccaggagttcacagcattgcggtgagggaagtcaactggtggctgcagatcatcgtggcgggttagacgggtgggaacagcctggcgcaggacaacccccaagcgacacctag

SEQ ID NO: 180657 - DNA, 3929 bp, Artificial Sequence
  derived and/or modified sequence
gaggccaccatgcaggatgtccaaggcccccgtcccggaagccccggggatgctgaagaccggcgggagctgggcttgcacaggggcgaggtcaactttggagggtctgggaagaagcgaggcaagtttgtacgggtgccgagcggagtggccccgtctgtgctctttgacctgctgcttgctgagtggcacctgccggcccccaacctggtggtgtccctggtgggtgaggagcagcctttcgccatgaagtcctggctgcgggatgtgctgcgcaaggggctggtgaaggcggctcagagcacaggagcctggatcctgaccagtgccctccgcgtgggcctggccaggcatgtcgggcaggccgtgcgcgaccactcgctggccagcacgtccaccaaggtccgtgtggttgctgtcggcatggcctcgctgggccgcgtcctgcaccgccgcattctggaggaggcccaggaggattttcctgtccactaccctgaggatgacggcggcagccagggccccctctgttcactggacagcaacctctcccacttcatcctggtggagccaggccccccggggaagggcgatgggctgacggagctgcggctgaggctggagaagcacatctcggagcagagggcgggctacgggggcactggcagcatcgagatccctgtcctctgcttgctggtcaatggtgatcccaacaccttggagaggatctccagggccgtggagcaggctgccccgtggctgatcctggtaggctcggggggcatcgccgatgtgcttgctgccctagtgaaccagccccacctcctggtgcccaaggtggccgagaagcagtttaaggagaagttccccagcaagcatttctcttgggaggacatcgtgcgctggaccaagctgctgcagaacatcacctcacaccagcacctgctcaccgtgtatgacttcgagcaggagggctccgaggagctggacacggtcatcctgaaggcgctggtgaaagcctgcaagagccacagccaggagcctcaggactatctggatgagctcaagctggccgtggcctgggaccgcgtggacatcgccaagagtgagatcttcaatggggacgtggagtggaagtcctgtgacctggaggaggtgatggtggacgccctggtcagcaacaagcccgagtttgtgcgcctctttgtggacaacggcgcagacgtggccgacttcctgacgtatgggcggctgcaggagctctaccgctccgtgtcacgcaagagcctgctcttcgacctgctgcagcggaagcaggaggaggcccggctgacgctggccggcctgggcacccagcaggcccgggagccacccgcggggccaccggccttctccctgcacgaggtctcccgcgtactcaaggacttcctgcaggacgcctgccgaggcttctaccaggacggccggccaggggaccgcaggagggcggagaagggcccggccaagcggcccacgggccagaagtggctgctggacctgaaccagaagagcgagaacccctggcgggacctgttcctgtgggccgtgctgcagaaccgccacgagatggccacctacttctgggccatgggccaggaaggtgtggcagccgcactggccgcctgcaaaatcctcaaagagatgtcgcacctggagacggaggccgaggcggcccgagccacgcgcgaggcgaaatacgagcggctggcccttgacctcttctccgagtgctacagcaacagtgaggcccgcgccttcgccctgctggtgcgccggaaccgctgctggagcaagaccacctgcctgcacctggccaccgaggctgacgccaaggccttctttgcccacgacggcgttcaggccttcctgaccaggatctggtggggggacatggccgcaggcacgcccatcctgcggctgctaggagccttcctctgccccgccctcgtctataccaacctcatcaccttcagtgaggaagctcccctgaggacaggcctggaggacctgcaggacctggacagcctggacacggagaagagcccgctgtatggcctgcagagccgggtggaggagctggtggaggcgccgagggctcagggtgaccgaggcccacgtgctgtcttcctgctcacacgctggcggaaattctggggcgctcccgtgactgtgttcctggggaacgtggtcatgtacttcgccttcctcttcctgttcacctacgtcctgctggtggacttcaggccgcccccccagggcccctcagggcccgaggtcaccctctacttctgggtctttacgctggtgctggaggaaatccggcagggcttcttcacagacgaggacacacacctggtgaagaagttcacactgtatgtgggggacaactggaacaagtgtgacatggtggccatcttcctgttcatcgtgggtgtcacctgcaggatgctgccgtcggcgtttgaggctggccgcacagtcctcgccatggacttcatggtgttcacgctgcggctgatccatatctttgccatacacaagcagctgggccccaagatcatcgtggtagagcgcatgatgaaggacgtcttcttcttcctcttctttctgagcgtgtggctcgtggcctacggtgtcaccacccaggcgctgctgcacccccatgacggccgcctggagtggatcttccgccgggtgctctaccggccctacctgcagatcttcggccagatcccactggacgagattgatgaagcccgtgtgaactgctccacccacccactgctgctggaggactcaccatcctgccccagcctctatgccaactggctggtcatcctcctgctggtcaccttcctgttggtcaccaatgtgctgctcatgaacctgctcatcgccatgttcagctacacgttccaggtggtgcagggcaacgcagacatgttctggaagttccagcgctacaacctgattgtggagtaccacgagcgccccgccctggccccgcccttcatcctgctcagccacctgagcctgacgctccgccgggtcttcaagaaggaggctgagcacaagcgggagcacctggagagagacctgccagaccccctggaccagaaggtcgtcacctgggagacagtccagaaggagaacttcctgagcaagatggagaagcggaggagggacagcgagggggaggtgctgcggaaaaccgcccacagagtggacttcattgccaagtacctcgggggtctgagagagcaagaaaagcgcatcaagtgtctggagtcacagatcaactactgctcggtgctcgtgtcctccgtggctgacgtgctggcccagggtggcggcccccggagctctcagcactgtggcgagggaagccagctggtggctgctgaccacagaggtggtttagatggctgggaacaacccggggctggccagcctccctcggacacctgagctgcttggcctgccacgtgtggggccacctctcctcagctggccaccctgcacgttgtgcactgacctttgccgacctccagcggaaccccccagggggcaccagccccccagcagacaatggccctcctggtgcctcaccacagaccctcacccaaaggaaccgctccttgtccctcctggcctccccggaggcacagcagtgtcatggggctgtctcccctgacaggcacaactccccgggcagaaaacgtgccccaccgcatccctacctggaaactgaccagcctgcactgtggaaaagctggccctgtggcgtgacgggggagcacccccatccagactgcgaagctgctctggggtctgcacccacccctgccctgacttgtgttgcctgacaagagactcatctttttttgaaa

SEQ ID NO: 180658 - DNA, 3932 bp, Artificial Sequence
  derived and/or modified sequence
gaggccaccatgcaggatgtccaaggcccccgtcccggaagccccggggatgctgaagaccggcgggagctgggcttgcacaggggcgaggtcaactttggagggtctgggaagaagcgaggcaagtttgtacgggtgccgagcggagtggccccgtctgtgctctttgacctgctgcttgctgagtggcacctgccggcccccaacctggtggtgtccctggtgggtgaggagcagcctttcgccatgaagtcctggctgcgggatgtgctgcgcaaggggctggtgaaggcggctcagagcacaggagcctggatcctgaccagtgccctccgcgtgggcctggccaggcatgtcgggcaggccgtgcgcgaccactcgctggccagcacgtccaccaaggtccgtgtggttgctgtcggcatggcctcgctgggccgcgtcctgcaccgccgcattctggaggaggcccaggtgcacgaggattttcctgtccactaccctgaggatgacggcggcagccagggccccctctgttcactggacagcaacctctcccacttcatcctggtggagccaggccccccggggaagggcgatgggctgacggagctgcggctgaggctggagaagcacatctcggagcagagggcgggctacgggggcactggcagcatcgagatccctgtcctctgcttgctggtcaatggtgatcccaacaccttggagaggatctccagggccgtggagcaggctgccccgtggctgatcctggtaggctcggggggcatcgccgatgtgcttgctgccctagtgaaccagccccacctcctggtgcccaaggtggccgagaagcagtttaaggagaagttccccagcaagcatttctcttgggaggacatcgtgcgctggaccaagctgctgcagaacatcacctcacaccagcacctgctcaccgtgtatgacttcgagcaggagggctccgaggagctggacacggtcatcctgaaggcgctggtgaaagcctgcaagagccacagccaggagcctcaggactatctggatgagctcaagctggccgtggcctgggaccgcgtggacatcgccaagagtgagatcttcaatggggacgtggagtggaagtcctgtgacctggaggaggtgatggtggacgccctggtcagcaacaagcccgagtttgtgcgcctctttgtggacaacggcgcagacgtggccgacttcctgacgtatgggcggctgcaggagctctaccgctccgtgtcacgcaagagcctgctcttcgacctgctgcagcggaagcaggaggaggcccggctgacgctggccggcctgggcacccagcaggcccgggagccacccgcggggccaccggccttctccctgcacgaggtctcccgcgtactcaaggacttcctgcaggacgcctgccgaggcttctaccaggacggccggccaggggaccgcaggagggcggagaagggcccggccaagcggcccacgggccagaagtggctgctggacctgaaccagaagagcgagaacccctggcgggacctgttcctgtgggccgtgctgcagaaccgccacgagatggccacctacttctgggccatgggccaggaaggtgtggcagccgcactggccgcctgcaaaatcctcaaagagatgtcgcacctggagacggaggccgaggcggcccgagccacgcgcgaggcgaaatacgagcggctggcccttgacctcttctccgagtgctacagcaacagtgaggcccgcgccttcgccctgctggtgcgccggaaccgctgctggagcaagaccacctgcctgcacctggccaccgaggctgacgccaaggccttctttgcccacgacggcgttcaggccttcctgaccaggatctggtggggggacatggccgcaggcacgcccatcctgcggctgctaggagccttcctctgccccgccctcgtctataccaacctcatcaccttcagtgaggaagctcccctgaggacaggcctggaggacctgcaggacctggacagcctggacacggagaagagcccgctgtatggcctgcagagccgggtggaggagctggtggaggcgccgagggctcagggtgaccgaggcccacgtgctgtcttcctgctcacacgctggcggaaattctggggcgctcccgtgactgtgttcctggggaacgtggtcatgtacttcgccttcctcttcctgttcacctacgtcctgctggtggacttcaggccgcccccccagggcccctcagggcccgaggtcaccctctacttctgggtctttacgctggtgctggaggaaatccggcagggcttcttcacagacgaggacacacacctggtgaagaagttcacactgtatgtgggggacaactggaacaagtgtgacatggtggccatcttcctgttcatcgtgggtgtcacctgcaggatgctgccgtcggcgtttgaggctggccgcacagtcctcgccatggacttcatggtgttcacgctgcggctgatccatatctttgccatacacaagcagctgggccccaagatcatcgtggtagagcgcatgatgaaggacgtcttcttcttcctcttctttctgagcgtgtggctcgtggcctacggtgtcaccacccaggcgctgctgcacccccatgacggccgcctggagtggatcttccgccgggtgctctaccggccctacctgcagatcttcggccagatcccactggacgagattgatgaagcccgtgtgaactgctccacccacccactgctgctggaggactcaccatcctgccccagcctctatgccaactggctggtcatcctcctgctggtcaccttcctgttggtcaccaatgtgctgctcatgaacctgctcatcgccatgttcagctacacgttccaggtggtgcagggcaacgcagacatgttctggaagttccagcgctacaacctgattgtggagtaccacgagcgccccgccctggccccgcccttcatcctgctcagccacctgagcctgacgctccgccgggtcttcaagaaggaggctgagcacaagcgggagcacctggagagagacctgccagaccccctggaccagaaggtcgtcacctgggagacagtccagaaggagaacttcctgagcaagatggagaagcggaggagggacagcgagggggaggtgctgcggaaaaccgcccacagagtggacttcattgccaagtacctcgggggtctgagagagcaagaaaagcgcatcaagtgtctggagtcacagatcaactactgctcggtgctcgtgtcctccgtggctgacgtgctggcccagggtggcggcccccggagctctcagcactgtggcgagggaagccagctggtggctgctgaccacagaggtggtttagatggctgggaacaacccggggctggccagcctccctcggacacctgagctgcttggcctgccacgtgtggggccacctctcctcagctggccaccctgcacgttgtgcactgacctttgccgacctccagcggaaccccccagggggcaccagccccccagcagacaatggccctcctggtgcctcaccacagaccctcacccaaaggaaccgctccttgtccctcctggcctccccggaggcacagcagtgtcatggggctgtctcccctgacaggcacaactccccgggcagaaaacgtgccccaccgcatccctacctggaaactgaccagcctgcactgtggaaaagctggccctgtggcgtgacgggggagcacccccatccagactgcgaagctgctctggggtctgcacccacccctgccctgacttgtgttgcctgacaagagactcatctttttttg

SEQ ID NO: 180659 - DNA, 3902 bp, Artificial Sequence
  derived and/or modified sequence
cccggaagccccggggatgctgaagaccggcgggagctgggcttgcacaggggcgaggtcaactttggagggtctgggaagaagcgaggcaagtttgtacgggtgccgagcggagtggccccgtctgtgctctttgacctgctgcttgctgagtggcacctgccggcccccaacctggtggtgtccctggtgggtgaggagcagcctttcgccatgaagtcctggctgcgggatgtgctgcgcaaggggctggtgaaggcggctcagagcacaggagcctggatcctgaccagtgccctccgcgtgggcctggccaggcatgtcgggcaggccgtgcgcgaccactcgctggccagcacgtccaccaaggtccgtgtggttgctgtcggcatggcctcgctgggccgcgtcctgcaccgccgcattctggaggaggcccaggtgcacgaggattttcctgtccactaccctgaggatgacggcggcagccagggccccctctgttcactggacagcaacctctcccacttcatcctggtggagccaggccccccggggaagggcgatgggctgacggagctgcggctgaggctggagaagcacatctcggagcagagggcgggctacgggggcactggcagcatcgagatccctgtcctctgcttgctggtcaatggtgatcccaacaccttggagaggatctccagggccgtggagcaggctgccccgtggctgatcctggtaggctcggggggcatcgccgatgtgcttgctgccctagtgaaccagccccacctcctggtgcccaaggtggccgagaagcagtttaaggagaagttccccagcaagcatttctcttgggaggacatcgtgcgctggaccaagctgctgcagaacatcacctcacaccagcacctgctcaccgtgtatgacttcgagcaggagggctccgaggagctggacacggtcatcctgaaggcgctggtgaaagcctgcaagagccacagccaggagcctcaggactatctggatgagctcaagctggccgtggcctgggaccgcgtggacatcgccaagagtgagatcttcaatggggacgtggagtggaagtcctgtgacctggaggaggtgatggtggacgccctggtcagcaacaagcccgagtttgtgcgcctctttgtggacaacggcgcagacgtggccgacttcctgacgtatgggcggctgcaggagctctaccgctccgtgtcacgcaagagcctgctcttcgacctgctgcagcggaagcaggaggaggcccggctgacgctggccggcctgggcacccagcaggcccgggagccacccgcggggccaccggccttctccctgcacgaggtctcccgcgtactcaaggacttcctgcaggacgcctgccgaggcttctaccaggacggccggccaggggaccgcaggagggcggagaagggcccggccaagcggcccacgggccagaagtggctgctggacctgaaccagaagagcgagaacccctggcgggacctgttcctgtgggccgtgctgcagaaccgccacgagatggccacctacttctgggccatgggccaggaaggtgtggcagccgcactggccgcctgcaaaatcctcaaagagatgtcgcacctggagacggaggccgaggcggcccgagccacgcgcgaggcgaaatacgagcggctggcccttgacctcttctccgagtgctacagcaacagtgaggcccgcgccttcgccctgctggtgcgccggaaccgctgctggagcaagaccacctgcctgcacctggccaccgaggctgacgccaaggccttctttgcccacgacggcgttcaggccttcctgaccaggatctggtggggggacatggccgcaggcacgcccatcctgcggctgctaggagccttcctctgccccgccctcgtctataccaacctcatcaccttcagtgaggaagctcccctgaggacaggcctggaggacctgcaggacctggacagcctggacacggagaagagcccgctgtatggcctgcagagccgggtggaggagctggtggaggcgccgagggctcagggtgaccgaggcccacgtgctgtcttcctgctcacacgctggcggaaattctggggcgctcccgtgactgtgttcctggggaacgtggtcatgtacttcgccttcctcttcctgttcacctacgtcctgctggtggacttcaggccgcccccccagggcccctcagggcccgaggtcaccctctacttctgggtctttacgctggtgctggaggaaatccggcagggcttcttcacagacgaggacacacacctggtgaagaagttcacactgtatgtgggggacaactggaacaagtgtgacatggtggccatcttcctgttcatcgtgggtgtcacctgcaggatgctgccgtcggcgtttgaggctggccgcacagtcctcgccatggacttcatggtgttcacgctgcggctgatccatatctttgccatacacaagcagctgggccccaagatcatcgtggtagagcgcatgatgaaggacgtcttcttcttcctcttctttctgagcgtgtggctcgtggcctacggtgtcaccacccaggcgctgctgcacccccatgacggccgcctggagtggatcttccgccgggtgctctaccggccctacctgcagatcttcggccagatcccactggacgagattgatgaagcccgtgtgaactgctccacccacccactgctgctggaggactcaccatcctgccccagcctctatgccaactggctggtcatcctcctgctggtcaccttcctgttggtcaccaatgtgctgctcatgaacctgctcatcgccatgttcagctacacgttccaggtggtgcagggcaacgcagacatgttctggaagttccagcgctacaacctgattgtggagtaccacgagcgccccgccctggccccgcccttcatcctgctcagccacctgagcctgacgctccgccgggtcttcaagaaggaggctgagcacaagcgggagcacctggagagagacctgccagaccccctggaccagaaggtcgtcacctgggagacagtccagaaggagaacttcctgagcaagatggagaagcggaggagggacagcgagggggaggtgctgcggaaaaccgcccacagagtggacttcattgccaagtacctcgggggtctgagagagcaagaaaagcgcatcaagtgtctggagtcacagatcaactactgctcggtgctcgtgtcctccgtggctgacgtgctggcccagggtggcggcccccggagctctcagcactgtggcgagggaagccagctggtggctgctgaccacagaggtggtttagatggctgggaacaacccggggctggccagcctccctcggacacctgagctgcttggcctgccacgtgtggggccacctctcctcagctggccaccctgcacgttgtgcactgacctttgccgacctccagcggaaccccccagggggcaccagccccccagcagacaatggccctcctggtgcctcaccacagaccctcacccaaaggaaccgctccttgtccctcctggcctccccggaggcacagcagtgtcatggggctgtctcccctgacaggcacaactccccgggcagaaaacgtgccccaccgcatccctacctggaaactgaccagcctgcactgtggaaaagctggccctgtggcgtgacgggggagcacccccatccagactgcgaagctgctctggggtctgcacccacccctgccctgacttgtgttgcctgacaagagactcatctttttttgaaa

SEQ ID NO: 180660 - protein, 354 aa, Artificial Sequence
  derived and/or modified sequence
MMSYLKQPPYGMNGLGLAGPAMDLLHPSVGYPATPRKQRRERTTFTRSQLDVLEALFAKTRYPDIFMREEVALKINLPESRVQVWFKNRRAKCRQQQQSGSGTKSRPAKKKSSPVRESSGSESSGQFTPPAVSSSASSSSSASSSSANPAAAAAAGLGGNPVAAASSLSTPAASSIWSPASISPGSAPASVSVPEPLAAPSNTSCMQRSVAAGAATAAASYPMSYGQGGSYGQGYPTPSSSYFGGVDCSSYLAPMHSHHHPHQLSPMAPSSMAGHHHHHPHAHHPLSQSSGHHHHHHHHHHQGYGGSGLAFNSADCLDYKEPGAAAASSAWKLNFNSPDCLDYKDQASWRFQVL

SEQ ID NO: 180661 - DNA, 2176 bp, Artificial Sequence
  derived and/or modified sequence
gatcaatcttcatcaggctacatttccaatcacctaaacaaccgagcaagacaagccactccgacaaggttggctgcccggcgggtctctgtgagagatccaggtagatggtgaacggccccggcagctgagggcaggccaggcccccagacgcatcagaccctgaaggactgcgtggtgggagccctgcaccgctcctggccccgggccccctggatccgtcggggcgcctccacccagctgttagcatgatgtcttacctcaaacaacccccatacggcatgaacgggctgggcctggccgggcccgccatggacctcctgcacccatccgtgggctatccggccactccgcggaagcagcggcgggagcgcaccaccttcacgcgttcacagctggacgtgctcgaggcgctcttcgccaagactcgctaccctgacatcttcatgcgggaggaggtggcgctcaagatcaacctgccggagtctagagtccaggtctggttcaagaaccgccgcgccaaatgccgccagcagcagcagagcgggagcggaaccaagagccgcccagccaagaagaagtcctctccagtgcgggagagctcgggctccgaaagcagtggccaattcacgccgccagctgtgtccagctctgcctcgtcctctagctcggcgtccagctcttccgccaacccagcggctgcagcggctgcgggactaggtgggaacccggtggcggccgcgtcgtcgctgagtacaccagctgcctcatctatctggagcccggcctccatctcgccaggctcagcgcccgcgtccgtgtcggtgccggagccattggccgcgcctagcaacacctcgtgtatgcagcgctccgtagctgcaggcgccgccaccgcagcagcctcttatcccatgtcctacggccagggcggcagctacggccaaggctaccctacgccctcctcttcctactttggcggcgtggactgcagctcatacctagcgcccatgcactcacatcaccacccgcaccagctcagccccatggcaccctcctccatggcgggccaccatcatcaccacccacatgcgcaccacccgttgagccagtcctcaggccaccaccaccaccatcaccaccaccaccaccaaggctacggtggctctgggcttgccttcaactctgccgactgcttggattacaaggagcctggcgccgctgctgcttcctccgcctggaaactcaacttcaactcccccgactgtctggactataaggaccaagcctcatggcggttccaggtcttgtgagcccaggaatgaaagaggagaagaaacgcaactacctgcgccctccgtggtcccgatcctgttgctgctgctgcaccgcccgcctttgcctcgtcttctccaaaactgaattttcaccccccaaaaagatgtccattgcctgcactgccgcccccatttttgtgccacttgcttggggggatgtgcaaacccaccctgccccttggatggggggaccggtgcttcggcttggcctacacattctatacaggagagatgtattatttccccccttcagcccctactaaactcttaagcctccccttccagtctttctggacagctattaagcacttgcagccttcggaggctctgcgctctgatccgctgtttgagcccaacactttaatttattctttctggacactggagtcactaactggcgtgtttctgcccattggagcacccgcacactactccaaatcaaaaccactaagagttcctcccgcgcagactgctgccccttcagctgccctcgattttgctccacgcctgccggccagagcctcccggcgtttcttccgccccagcggagtgcgctggggcgcgccagggctaggcccgccggaggagcgcgtccccagccttccgcgcacagagccgcatcccgccccgccctgcgctggactggttcaagcttccgcctcggcgggaacgctgtacatagtcaggtccgttccagggaccacttaaactttttagttgctgttggttggttgaactgaacatatcttgtcttagcacccaggaaacagaactttaagatatatacagcacatatatatatatatacatatatatatacacatatataaaaaacaaaa

SEQ ID NO: 180662 - DNA, 1065 bp, Artificial Sequence
  derived and/or modified sequence
atgatgagttatttgaagcagccaccttacggcatgaatgggctgggtcttgccgggcctgcaatggatctgcttcaccccagcgtggggtatcccgctactccaagaaagcagcgccgcgagcggaccactttcacccggagtcagttggatgttctggaggccctatttgcaaaaacccgttatcctgatatttttatgcgtgaggaggttgcactgaaaataaatctaccggaaagtcgggtacaggtgtggtttaaaaatcgcagagctaagtgcagacagcaacaacagagcggttccgggacgaaatcccgcccagccaagaaaaaatccagcccagtgcgggagtcctctgggagcgagagttctgggcagtttaccccacctgccgtgagcagttctgcctcttcaagcagtagcgcctcaagctcctctgccaaccccgcagctgccgcagccgccggtctcggcgggaatcccgttgccgcagccagctccctctcaacacccgctgcctctagcatatggtctccggcttccatctccccaggctcggcgcctgcgagtgtctctgtcccggagcccctggctgctcccagtaacacatcctgtatgcaaaggagcgtggcggccggagccgctaccgcagccgccagctatcccatgtcctatgggcaaggcggatcttatgggcaggggtatccaactccctcatcgtcctatttcggtggcgttgactgctcttcttaccttgctcctatgcactcccatcatcacccacaccagctgagccctatggccccttcctctatggccggccaccaccaccaccatcctcacgcacaccatccgctgtcacagagttccggtcaccatcaccaccaccatcaccatcaccatcagggctacggtgggtctggactcgccttcaacagcgccgactgtctggactacaaagaacccggggccgcagcagcgagctcagcctggaagctgaacttcaattcccccgattgcttagactacaaggaccaagcttcatggagattccaggtgttgtag

SEQ ID NO: 180663 - DNA, 1065 bp, Artificial Sequence
  derived and/or modified sequence
atgatgtcctacttaaagcagccaccttacgggatgaacggtttgggtctggcagggccagccatggatctcctgcacccgagcgtcggctatcccgcaaccccccgcaaacagagaagagagcgcacgacctttacaagaagtcagttggatgtgttggaggccctgttcgccaagaccagatatcccgacatttttatgagagaagaggttgctttaaaaattaatctgccggaaagcagggtccaggtttggtttaaaaataggagagccaaatgtcgccagcaacagcaaagtggatcaggaactaagtctcggccagccaaaaagaagagcagtccagtacgtgagagcagtgggtcagagagttccggacagttcacaccacctgcagtctcaagtagcgcttcaagctccagcagcgcaagcagcagcagcgctaaccctgccgctgccgcagccgccggcttaggaggcaaccctgttgccgccgcaagctctctgtcaacccccgccgcctcttctatctggagtccagcttccattagccccgggtccgcccctgcatcggtgtcagtgcccgagccacttgctgcacctagcaacacctcatgtatgcaaaggtcagttgctgccggcgccgccaccgccgccgcttcctaccccatgtcctacggccaaggtggctcctatgggcagggctacccaactcccagttctagctactttggcggggttgactgcagctcgtatttagcccctatgcactcccaccaccacccccatcagctctcccctatggcgcctagttccatggcagggcatcatcatcaccacccacacgcacatcacccattgagtcagtccagtgggcatcatcatcatcatcaccatcaccaccaccaagggtacggcggtagcgggctggcatttaatagcgccgactgcctggactacaaggaacccggggccgccgccgcttctagcgcctggaaattgaacttcaatagccctgattgccttgactataaagatcaagcttcgtggcgctttcaggtgctgtag

SEQ ID NO: 180664 - DNA, 1065 bp, Artificial Sequence
  derived and/or modified sequence
atgatgagctacctgaagcagcccccctacggcatgaatggcctgggcctggccggccctgccatggacctgctgcaccccagcgtgggctacccagccacccccaggaagcagaggcgggagaggaccaccttcaccaggagccagctggatgtgctggaggccctgtttgccaagacccgctacccagacatcttcatgagggaggaggtggccctgaagatcaacctgcctgagagccgggtgcaggtgtggttcaagaacagaagagccaagtgccggcagcagcagcagagcggcagcggcaccaagagcaggcctgccaagaagaagagcagccctgtgcgggagagcagcggcagcgagagcagcggccagttcaccccacctgctgtgagcagcagcgccagcagcagcagcagcgccagcagcagcagcgccaacccagctgctgctgctgctgctggcctgggcggcaaccctgtggccgccgccagcagcctgagcaccccagctgccagcagcatctggagccctgccagcatcagccctggcagcgccccagcctctgtgtctgtgcctgagcccctggccgcccccagcaacaccagctgcatgcagaggtctgtggccgccggggccgccacagctgctgccagctaccccatgtcctatggccagggcggcagctatggccagggctaccccacccccagcagcagctactttggaggagtggactgcagcagctacctggcccccatgcacagccaccaccacccccaccagctgagccccatggcccccagctccatggccggccaccaccaccaccacccccacgcccaccaccccctgagccagagcagcggccaccaccaccaccaccaccaccaccaccaccagggctacggcggcagcggcctggccttcaacagcgctgactgcctggactacaaggagcccggggctgctgctgccagcagcgcctggaagctgaacttcaacagcccagactgcctggactacaaggaccaggcctcctggaggttccaggtgctgtag

SEQ ID NO: 180665 - DNA, 1065 bp, Artificial Sequence
  derived and/or modified sequence
atgatgagctacctgaagcagcccccctacggcatgaacggcctgggattggctggtcctgccatggatctgctgcatcctagtgtgggttaccctgccaccccaagaaagcagcgacgggagagaaccacgtttacccggagccagttggatgttttagaggcactgttcgccaaaacccggtaccccgacatcttcatgcgggaagaagtagcactaaaaatcaatctgcccgaatctcgcgtgcaagtctggtttaaaaataggcgggctaagtgtaggcaacagcaacagagcggttcgggaactaaatccagaccggccaagaagaagagtagccccgtgcgtgaatcaagtggatcagaatcttcaggacagtttacgccgccggcggtcagtagcagcgcctcgtcctcttcctctgcctcctcatcttccgcaaatccagccgccgctgccgcagccggactgggcgggaatcccgtggcggccgcttcttccctcagcacgccagctgccagttctatatggagcccagccagcatttcaccaggctccgcacctgcttccgtgtcagtccctgagcctctcgcagccccatccaatacgagttgcatgcaaaggtctgtggctgctggtgctgccacggccgcggcatcatacccaatgagctatgggcaggggggaagttacggccagggttaccctaccccctcctcgagctattttggcggcgtggactgttccagttatctggctcccatgcacagccaccaccatcctcaccagctgtcacccatggctccgtcttctatggcaggtcaccaccaccaccacccacacgcccaccacccccttagccagtccagcggccatcatcaccatcaccaccatcatcatcatcaaggctacggtggctcaggcttggcttttaactccgccgattgcctggactataaggagcctggagcagcagcagctagctccgcttggaagctgaactttaactccccagattgcttggattacaaggaccaagcatcatggcggttccaggtgctgtag

SEQ ID NO: 180666 - DNA, 1065 bp, Artificial Sequence
  derived and/or modified sequence
atgatgagctacctgaagcagcccccctacggcatgaacggcctgggcttggcaggcccagcgatggacctgctccaccccagcgttgggtatcccgccacgcccagaaagcagcgtagagagcgaaccaccttcacaagatcacagctggatgtgctggaagccctgttcgcaaaaaccagataccccgatatctttatgcgtgaggaagtcgccctcaaaattaatttgccggagtcccgcgtgcaagtctggtttaagaataggcgggccaaatgcagacagcagcaacagtccggttccggtaccaaaagcagaccagccaaaaaaaaaagcagccctgtgagggagagcagcggatctgagagctccggccaatttacacctcctgcagtttcttcatctgcatctagttcctcatccgcaagtagctcatcagcaaatcctgctgccgcagccgctgcgggcctcggcggaaaccccgtcgcggccgcgagttcattgagtacacccgctgcgtcaagcatttggagtcctgccagtatctcaccaggctctgcgccagctagtgtgtcagtccccgagcccctggcggccccatcaaatactagctgcatgcagaggagcgttgccgccggagctgccactgctgctgccagctacccaatgtcctacggacaaggaggatcctatggccaaggctatccgacgcctagttctagttatttcggaggtgtggattgctcctcatatctcgcaccaatgcattctcatcaccacccccaccagctttcgccaatggcgccaagcagtatggccgggcaccaccatcatcaccctcatgcgcaccatcctctcagccagtcctccgggcatcatcaccaccaccaccatcaccatcaccaaggttatggcggatctgggctggctttcaactctgcagattgtctggactacaaggaacccggggcagctgcagcaagcagtgcctggaagctcaacttcaatagtcctgattgtctggattacaaagatcaagcatcttggaggttccaggtgctatag

SEQ ID NO: 180667 - DNA, 2861 bp, Artificial Sequence
  derived and/or modified sequence
acatacccggggagggcagtagaaaggtgatcaatcttcatcaggctacatttccaatcacctaaacaaccgagcaagacaagccactccgacaaggttggctgcccggcgggtctctgtgagagatccaggtagatggtgaacggccccggcagctgagggcaggccaggcccccagacgcatcagaccctgaaggactgcgtggtgggagccctgcaccgctcctggccccgggccccctggatccgtcggggcgcctccacccagctgttagcatgatgtcttacctcaaacaacccccatacggcatgaacgggctgggcctggccgggcccgccatggacctcctgcacccatccgtgggctatccggccactccgcggaagcagcggcgggagcgcaccaccttcacgcgttcacagctggacgtgctcgaggcgctcttcgccaagactcgctaccctgacatcttcatgcgggaggaggtggcgctcaagatcaacctgccggagtctagagtccaggtctggttcaagaaccgccgcgccaaatgccgccagcagcagcagagcgggagcggaaccaagagccgcccagccaagaagaagtcctctccagtgcgggagagctcgggctccgaaagcagtggccaattcacgccgccagctgtgtccagctctgcctcgtcctctagctcggcgtccagctcttccgccaacccagcggctgcagcggctgcgggactaggtgggaacccggtggcggccgcgtcgtcgctgagtacaccagctgcctcatctatctggagcccggcctccatctcgccaggctcagcgcccgcgtccgtgtcggtgccggagccattggccgcgcctagcaacacctcgtgtatgcagcgctccgtagctgcaggcgccgccaccgcagcagcctcttatcccatgtcctacggccagggcggcagctacggccaaggctaccctacgccctcctcttcctactttggcggcgtggactgcagctcatacctagcgcccatgcactcacatcaccacccgcaccagctcagccccatggcaccctcctccatggcgggccaccatcatcaccacccacatgcgcaccacccgttgagccagtcctcaggccaccaccaccaccatcaccaccaccaccaccaaggctacggtggctctgggcttgccttcaactctgccgactgcttggattacaaggagcctggcgccgctgctgcttcctccgcctggaaactcaacttcaactcccccgactgtctggactataaggaccaagcctcatggcggttccaggtcttgtgagcccaggaatgaaagaggagaagaaacgcaactacctgcgccctccgtggtcccgatcctgttgctgctgctgcaccgcccgcctttgcctcgtcttctccaaaactgaattttcaccccccaaaaagatgtccattgcctgcactgccgcccccatttttgtgccacttgcttggggggatgtgcaaacccaccctgccccttggatggggggaccggtgcttcggcttggcctacacattctatacaggagagatgtattatttccccccttcagcccctactaaactcttaagcctccccttccagtctttctggacagctattaagcacttgcagccttcggaggctctgcgctctgatccgctgtttgagcccaacactttaatttattctttctggacactggagtcactaactggcgtgtttctgcccattggagcacccgcacactactccaaatcaaaaccactaagagttcctcccgcgcagactgctgccccttcagctgccctcgattttgctccacgcctgccggccagagcctcccggcgtttcttccgccccagcggagtgcgctggggcgcgccagggctaggcccgccggaggagcgcgtccccagccttccgcgcacagagccgcatcccgccccgccctgcgctggactggttcaagcttccgcctcggcgggaacgctgtacatagtcaggtccgttccagggaccacttaaactttttagttgctgttggttggttgaactgaacatatcttgtcttagcacccaggaaacagaactttaagatatatacagcacatatatatatatatacatatatatatacacatatataaaaaacaaaagcaaaaaatattttccctctgtccgtcccccttctgctcttcctcaatcaatggcgctttttctttttcagttgttgcaaagctgccctgccctcttcacatcttctccctctgtgtatttattgaagagaaccgcttggtttcaggaagctgggcgcgggatatccgaagtgtggaggaaacagacaagtcagggtacagaggtgggggttgggcaggggcgcagggctgaccccctcacccggtctaagcacagggtcgcagttccagtttacaaacctaaaacaagaaaaccaaaaccagggaacaaaacaacaaaacaaaacaaaatccgtaaaagtacagcattagggaaaaacaaacaaacccaggccccaaacccagttccaactcctctgtcggcttctctctttcaacacccttgttttgtctagtgagtttttagtgcaccttcgttctccgaaatctgcggagagcccgcgcgcctgtgtatcaattttggctttggccgcttcgtccagtaggtgggaaagtaatttgtaaatttgatttgtctgatgtgaagatcacaaattacttgttgaaatgtaaggcagtccccctcctcctctttatctacattacttcccgaaaataaatgcaaattaatgaacggct

SEQ ID NO: 180668 - DNA, 2861 bp, Artificial Sequence
  derived and/or modified sequence
ggacgctgggctccaacgtttcagtagaagcgcttaagacttgcaaacacccttggtggggacctggaaccccgggagatgccgacgagcaagcaggttggctgcccggcgggtctctgtgagagatccaggtagatggtgaacggccccggcagctgagggcaggccaggcccccagacgcatcagaccctgaaggactgcgtggtgggagccctgcaccgctcctggccccgggccccctggatccgtcggggcgcctccacccagctgttagcatgatgtcttacctcaaacaacccccatacggcatgaacgggctgggcctggccgggcccgccatggacctcctgcacccatccgtgggctatccggccactccgcggaagcagcggcgggagcgcaccaccttcacgcgttcacagctggacgtgctcgaggcgctcttcgccaagactcgctaccctgacatcttcatgcgggaggaggtggcgctcaagatcaacctgccggagtctagagtccaggtctggttcaagaaccgccgcgccaaatgccgccagcagcagcagagcgggagcggaaccaagagccgcccagccaagaagaagtcctctccagtgcgggagagctcgggctccgaaagcagtggccaattcacgccgccagctgtgtccagctctgcctcgtcctctagctcggcgtccagctcttccgccaacccagcggctgcagcggctgcgggactaggtgggaacccggtggcggccgcgtcgtcgctgagtacaccagctgcctcatctatctggagcccggcctccatctcgccaggctcagcgcccgcgtccgtgtcggtgccggagccattggccgcgcctagcaacacctcgtgtatgcagcgctccgtagctgcaggcgccgccaccgcagcagcctcttatcccatgtcctacggccagggcggcagctacggccaaggctaccctacgccctcctcttcctactttggcggcgtggactgcagctcatacctagcgcccatgcactcacatcaccacccgcaccagctcagccccatggcaccctcctccatggcgggccaccatcatcaccacccacatgcgcaccacccgttgagccagtcctcaggccaccaccaccaccatcaccaccaccaccaccaaggctacggtggctctgggcttgccttcaactctgccgactgcttggattacaaggagcctggcgccgctgctgcttcctccgcctggaaactcaacttcaactcccccgactgtctggactataaggaccaagcctcatggcggttccaggtcttgtgagcccaggaatgaaagaggagaagaaacgcaactacctgcgccctccgtggtcccgatcctgttgctgctgctgcaccgcccgcctttgcctcgtcttctccaaaactgaattttcaccccccaaaaagatgtccattgcctgcactgccgcccccatttttgtgccacttgcttggggggatgtgcaaacccaccctgccccttggatggggggaccggtgcttcggcttggcctacacattctatacaggagagatgtattatttccccccttcagcccctactaaactcttaagcctccccttccagtctttctggacagctattaagcacttgcagccttcggaggctctgcgctctgatccgctgtttgagcccaacactttaatttattctttctggacactggagtcactaactggcgtgtttctgcccattggagcacccgcacactactccaaatcaaaaccactaagagttcctcccgcgcagactgctgccccttcagctgccctcgattttgctccacgcctgccggccagagcctcccggcgtttcttccgccccagcggagtgcgctggggcgcgccagggctaggcccgccggaggagcgcgtccccagccttccgcgcacagagccgcatcccgccccgccctgcgctggactggttcaagcttccgcctcggcgggaacgctgtacatagtcaggtccgttccagggaccacttaaactttttagttgctgttggttggttgaactgaacatatcttgtcttagcacccaggaaacagaactttaagatatatacagcacatatatatatatatacatatatatatacacatatataaaaaacaaaagcaaaaaatattttccctctgtccgtcccccttctgctcttcctcaatcaatggcgctttttctttttcagttgttgcaaagctgccctgccctcttcacatcttctccctctgtgtatttattgaagagaaccgcttggtttcaggaagctgggcgcgggatatccgaagtgtggaggaaacagacaagtcagggtacagaggtgggggttgggcaggggcgcagggctgaccccctcacccggtctaagcacagggtcgcagttccagtttacaaacctaaaacaagaaaaccaaaaccagggaacaaaacaacaaaacaaaacaaaatccgtaaaagtacagcattagggaaaaacaaacaaacccaggccccaaacccagttccaactcctctgtcggcttctctctttcaacacccttgttttgtctagtgagtttttagtgcaccttcgttctccgaaatctgcggagagcccgcgcgcctgtgtatcaattttggctttggccgcttcgtccagtaggtgggaaagtaatttgtaaatttgatttgtctgatgtgaagatcacaaattacttgttgaaatgtaaggcagtccccctcctcctctttatctacattacttcccgaaaataaatgcaaattaatgaacggct

SEQ ID NO: 180669 - DNA, 1065 bp, Artificial Sequence
  derived and/or modified sequence
atgatgtcttacttgaagcaaccgccttacggtatgaatgggctggggctggcaggacccgctatggatctcttgcatccttcggtgggataccccgcaactccccgaaagcagcggagagaaaggaccaccttcacacgaagccagctggacgtactagaggccctgtttgccaagacgcggtaccccgatatttttatgcgagaggaagtggctctcaaaatcaatttgccagaatccagagtgcaagtctggttcaagaatagacgcgctaaatgtagacagcaacagcagagcggctctggaacaaagagtagaccggcaaagaaaaagtcatcccctgttagagaatcttccgggtcagagtcttccggacagttcacaccacccgctgtctccagctccgctagtagttcatcttccgcatcctcatcgtccgccaatcccgctgccgctgccgcagctggcctgggcggaaacccagtcgccgcagcaagctccctgtccacacccgcagccagctcaatctggagtcccgcttccatttcccccggaagcgcaccagcgtctgtctcggtgcctgagccactggcggcaccatccaacacatcatgcatgcaacgttctgtcgcggctggggctgcaacagccgctgcatcatacccaatgagttacgggcaggggggttcctacgggcaaggctatccaacaccatcatccagctattttggtggagtcgattgcagtagctacctggctccgatgcattcccatcatcatccccatcagctgagtcctatggccccatccagtatggctgggcaccaccaccaccatcctcacgctcatcaccccctgtcgcagagtagcggacaccatcaccatcaccatcatcatcaccaccagggatacggcggatcaggactggcattcaattctgccgattgcttggattataaagagcctggggctgctgctgcctcaagcgcatggaaactgaacttcaactctccagattgcttggattataaggatcaagcatcctggcgttttcaggtactctag

SEQ ID NO: 180670 - DNA, 1065 bp, Artificial Sequence
  derived and/or modified sequence
atgatgtcctaccttaaacagcccccatatggaatgaacggcttgggactcgccggtccagcaatggatttgttacacccatcagttggataccctgccaccccacggaagcagagaagagagagaactacctttacacggtcccagctggacgtgctggaagcgctgtttgccaaaacccgatatcctgacatctttatgagagaggaagtcgccctaaaaattaatctgcctgagagtagggtacaggtctggtttaagaaccgcagagccaaatgccgacaacagcaacagagcggctctggaactaaatctaggcccgcaaagaagaaaagttctccagtcagggagagttcaggttctgagtcctcaggacagtttacaccacctgctgtgtcttcctcagctagcagttcctcctccgcgtcttcgtcatcagcaaatcctgcagccgctgccgctgccggactaggaggcaatcctgtagccgctgccagcagtttatccacgcctgccgcaagctccatatggagcccagccagcatatcccctggctctgcaccagctagtgttagcgttcccgaacccttggccgcaccatccaacacctcctgcatgcagcgaagcgtggccgcaggcgcagctaccgcagcagcaagctatccgatgagctacggccagggaggatcctacggccaagggtatccaactccttcctcatcctacttcggcggtgtcgattgttccagctatctggcaccaatgcattcccatcaccacccccatcagctcagccctatggcaccaagcagcatggcaggccaccatcatcatcacccccatgcgcaccaccccctctctcagagcagcggacaccaccatcaccatcaccaccaccaccatcagggatatggtggttccggtctcgcctttaattcggctgattgcctagactacaaagaacctggagccgcagctgcgagcagcgcttggaagcttaacttcaattctcctgactgtctggattataaagaccaggctagttggcgattccaggttctctag

SEQ ID NO: 180671 - DNA, 1065 bp, Artificial Sequence
  derived and/or modified sequence
atgatgagctacctgaagcagcccccctacggcatgaacggcctgggcctggccggccccgccatggacctgctgcaccccagcgtgggctaccccgccacccccagaaagcagagaagagagagaaccaccttcaccagaagccagctggacgtgctggaggccctgttcgccaagaccagataccccgacatcttcatgagagaggaggtggccctgaagatcaacctgcccgagagcagagtgcaggtgtggttcaagaacagaagagccaagtgcagacagcagcagcagagcggcagcggcaccaagagcagacccgccaagaagaagagcagccccgtgagagagagcagcggcagcgagagcagcggccagttcaccccccccgccgtgagcagcagcgccagcagcagcagcagcgccagcagcagcagcgccaaccccgccgccgccgccgccgccggcctgggcggcaaccccgtggccgccgccagcagcctgagcacccccgccgccagcagcatctggagccccgccagcatcagccccggcagcgcccccgccagcgtgagcgtgcccgagcccctggccgcccccagcaacaccagctgcatgcagagaagcgtggccgccggcgccgccaccgccgccgccagctaccccatgagctacggccagggcggcagctacggccagggctaccccacccccagcagcagctacttcggcggcgtggactgcagcagctacctggcccccatgcacagccaccaccacccccaccagctgagccccatggcccccagcagcatggccggccaccaccaccaccacccccacgcccaccaccccctgagccagagcagcggccaccaccaccaccaccaccaccaccaccaccagggctacggcggcagcggcctggccttcaacagcgccgactgcctggactacaaggagcccggcgccgccgccgccagcagcgcctggaagctgaacttcaacagccccgactgcctggactacaaggaccaggccagctggagattccaggtgctgtag

SEQ ID NO: 180672 - protein, 397 aa, Artificial Sequence
  derived and/or modified sequence
MEARGELGPARESAGGDLLLALLARRADLRREIPLCAGCDQHILDRFILKATATGTASVSSAATATPLAERCFSRGESVYCKDDFFKRFGTKCAACQLGIPPTQVVRRAQDFVYHLHCFACVVCKRQLATGDEFYLMEDSRLVCKADYETAKQREAEATAKRPRTTITAKQLETLKSAYNTSPKPARHVREQLSSETGLDMRVVQVWFQNRRAKEKRLKKDAGRQRWGQYFRNMKRSRGGSKSDKDSVQEGQDSDAEVSFPVSLPWRKWARPMASTGAWGHPGLGPALGSPGQLLPGAWRPGRPRAVPRAASRQPLRCPPIPRRPAEPPWPPLLSSLVYPDTSLGLVPSGAPGGPPPMRVLAGNGPSSDLSTGSSGGYPDFPASPASWLDEVDHAQF

SEQ ID NO: 180673 - protein, 402 aa, Artificial Sequence
  derived and/or modified sequence
MEARGELGPARESAGGDLLLALLARRADLRREIPLCAGCDQHILDRFILKALDRHWHSKCLKCSDCHTPLAERCFSRGESVYCKDDFFKRFGTKCAACQLGIPPTQVVRRAQDFVYHLHCFACVVCKRQLATGDEFYLMEDSRLVCKADYETAKQREAEATAKRPRTTITAKQLETLKSAYNTSPKPARHVREQLSSETGLDMRVVQVWFQNRRAKEKRLKKDAGRQRWGQYFRNMKRSRGGSKSDKDSVQEGQDSDAEVSFPDEPSLAEMGPANGLYGSLGEPTQALGRPSGALGNFSLEHGGLAGPEQYRELRPGSPYGVPPSPAAPQSLPGPQPLLSSLVYPDTSLGLVPSGAPGGPPPMRVLAGNGPSSDLSTGSSGGYPDFPASPASWLDEVDHAQF

SEQ ID NO: 180674 - DNA, 2413 bp, Artificial Sequence
  derived and/or modified sequence
cgcagcgcccagcagcacccggagtcgcttggacgccggttcggggctattgcggggtggcgtcgctgggcccgggaaagttcgggactggagagtggcgacgccgggcggcgggacccatggaggcgcgcggggagctgggcccggcccgggagtcggcgggaggcgacctgctgctagcactgctggcgcggagggcggacctgcgccgagagatcccgctgtgcgctggctgtgaccagcacatcctggaccgcttcatcctcaaggctctggaccgccactggcacagcaagtgtctcaagtgcagcgactgccacacgccactggccgagcgctgcttcagccgaggggagagcgtttactgcaaggacgactttttcaagcgcttcgggaccaagtgcgccgcgtgccagctgggcatcccgcccacgcaggtggtgcgccgcgcccaggacttcgtgtaccacctgcactgctttgcctgcgtcgtgtgcaagcggcagctggccacgggcgacgagttctacctcatggaggacagccggctcgtgtgcaaggcggactacgaaaccgccaagcagcgagaggccgaggccacggccaagcggccgcgcacgaccatcaccgccaagcagctggagacgctgaagagcgcttacaacacctcgcccaagccggcgcgccacgtgcgcgagcagctctcgtccgagacgggcctggacatgcgcgtggtgcaggtttggttccagaaccgccgggccaaggagaagaggctgaagaaggacgccggccggcagcgctgggggcagtatttccgcaacatgaagcgctcccgcggcggctccaagtcggacaaggacagcgttcaggaggggcaggacagcgacgctgaggtctccttccccgatgagccttccttggcggaaatgggcccggccaatggcctctacgggagcttgggggaacccacccaggccttgggccggccctcgggagccctgggcaacttctccctggagcatggaggcctggcaggcccagagcagtaccgagagctgcgtcccggcagcccctacggtgtccccccatcccccgccgccccgcagagcctccctggcccccagcccctcctctccagcctggtgtacccagacaccagcttgggccttgtgccctcgggagcccccggcgggcccccacccatgagggtgctggcagggaacggacccagttctgacctatccacggggagcagcgggggttaccccgacttccctgccagccccgcctcctggctggatgaggtagaccacgctcagttctgacccaggcccggctccaccctgcacctcacacgagggagctgcccctgggtgggcggctcggggctgctggggtttccgaggaagtggggccagggcgtcaagggagggctggtgccttcggagcctcccactgccgaccgcacagctccctctctgggggctgagggacccacctggcccctcctctgacacagggctggcccgccaggtggcctcccagcaagccagccttttttgtaagcaaatttctcccctttattgaccaattaactgagcacttgctgctatttctagacatgaaatgtcaccttgctgaggcccagcccagcccagcatagcccgagggctggaaaaacgctttcatctctaaaactgagaaatcatcataattgtgctttcacttcccaggctccatgtgtcttggagccgtcaccccgaggctccctctttaggtcggagattggccttgcctgtcgaggcaagaggctgcagaggcggggacacacctgtgtcctccgggagaggccccctcctctccccagaccacagggggcctctctgcctccagccccaccttccccgggagaagctttccccaatccccaggtctctagatcattctgttctcgagtatcctgtggaggaggcaaaaatgcctggcgccccttctctccaagctcaattctctaagcccctcagggtctcctcctcaccccaccccaggcccttggtgtccaggctgcacccacagatgtctgttgccaaacagcctgccctccctgccggagccggctctgccagccccagattgggaagtctccccgctggagaagggtggggctcctctgagcctgccctgcctcctccatcagatcctttgggaagaagtttctgggagatgcccgcagctgtgcgtgccccagacacaaaggctggcctgtgtgtaagtcaaagtcactcccgcaaacctgaatctcgagctacctattggttctgtgaatgttctgtgtcttttatttattctcgggtgatcagctctttccaagacttcaataaatttgtcagttacagtcaaaaaaaaaaaa

SEQ ID NO: 180675 - DNA, 1194 bp, Artificial Sequence
  derived and/or modified sequence
atggaagctaggggcgagctgggacctgcccgcgaatccgccgggggagatcttctcctggcgctgttagctcggcgggcagacttgcgacgggaaatacctttgtgcgctggctgcgaccagcatatactcgatcggttcattttgaaggcaaccgccacggggactgcaagtgtttctagcgcagcgacagccacccccctcgctgaaaggtgcttctctcggggagagtccgtgtactgcaaggatgacttctttaaacgattcggaaccaagtgcgccgcttgtcaactgggtatcccccccactcaggtggtgaggagggcacaggacttcgtgtatcacctacattgcttcgcttgcgtggtgtgcaagaggcagctagcaaccggagacgaattctacttgatggaggatagccgtcttgtttgcaaagcagactacgagaccgcgaaacaaagggaggcagaagccacggccaaaagacccagaactactataactgctaagcaattggaaaccctgaagtcagcctacaacacatccccgaagccagcccggcacgttagagaacaactttcatccgaaaccggactcgatatgagggttgtccaggtttggttccaaaaccgccgggccaaagagaaaaggttgaagaaagatgccggtcgacaacgatggggccagtactttcgcaacatgaaacggagcaggggtggcagcaaatctgacaaggactctgtgcaagagggccaggatagtgatgctgaagtatcctttcccgtctcactgccctggcgcaagtgggctcgcccgatggcctccacgggagcctggggccatccaggtttggggcccgcgctgggatcacccgggcaactcctgcctggggcctggagaccagggaggcctcgcgctgtccccagggccgcttccagacagccactgcgctgcccacctatcccaaggagaccagcggagccgccctggccccctttattgagcagcctcgtgtaccccgacactagcctaggtctggtaccaagtggggcacccggaggaccccccccaatgcgagttctcgccggaaatgggccgagctccgatttgtcaactggttcatctggagggtaccctgacttccctgcaagccccgctagttggcttgatgaagtggatcatgcacagttctag

SEQ ID NO: 180676 - DNA, 1209 bp, Artificial Sequence
  derived and/or modified sequence
atggaggcacggggtgaactcggaccggctcgcgagtcagcaggaggcgacctgctcctggccctgctggccagacgggccgatctccgaagggaaattcctctctgcgctggctgcgaccagcatatcctggacaggttcattctcaaagcactagatcgccactggcattcaaaatgtctgaagtgtagcgactgccacaccccattagcagaacgctgtttctccagaggcgaatctgtctactgtaaagatgacttttttaaaaggttcggtactaaatgtgcggcgtgtcagttgggcatccctccaacacaggtcgtccggcgggctcaagacttcgtgtaccatctccactgcttcgcctgcgtagtatgcaagagacagctggcgactggcgacgagttttacctgatggaagatagccgtctggtgtgcaaagcagactacgagaccgccaaacagcgagaagccgaagcaactgctaaacgacctagaaccacaattacggctaagcagttagaaaccctgaagagcgcctataacacgtcgcccaagcccgcgcgacatgtgagagagcaactctcaagcgagactgggttagatatgagagtcgtgcaggtttggttccagaatagacgcgctaaggaaaaaagattgaagaaggacgccggtaggcagcgctggggccagtacttccgtaacatgaagagatcccgcggaggatctaagagcgataaggacagtgtccaggagggccaggattccgatgcagaagtaagctttccagacgagccaagcctggctgaaatggggccagccaatggcctctatggcagcctgggcgagcctacacaggctctgggaaggcccagtggagcgctggggaacttctcgctcgagcacggcggcctcgctgggccagaacagtacagagaactccgccctggcagtccatacggagtaccgccttcaccggcagccccgcagtctttgccaggcccgcagccgctgctatcatcactggtttacccagatacctcgttagggctggtgccgtccggcgctcccggtgggccacctcccatgcgagtgctggctgggaatgggccaagcagcgacctgtccacaggaagtagcggaggctaccctgactttccggcctcccccgcaagctggctcgatgaggtggaccatgcacagttctag

SEQ ID NO: 180677 - DNA, 1194 bp, Artificial Sequence
  derived and/or modified sequence
atggaggcccggggggagctgggccctgcccgggagagcgctggaggagacctgctgctggccctgctggccaggagagctgacctgcggcgggagatccccctgtgtgccggctgtgaccagcacatcctggaccgcttcatcctgaaggccacagccaccggcacagcctctgtgtcctctgctgccacagccacccccctggccgagcgctgcttcagcagaggagagagcgtgtactgcaaggatgacttcttcaagagatttggcaccaagtgtgccgcctgccagctgggcatcccccccacccaggtggtgagaagagcccaggactttgtgtaccacctgcactgctttgcctgtgtggtgtgcaagaggcagctggccactggagatgagttctacctgatggaggacagccggctggtgtgcaaggctgactatgaaacagccaagcagcgggaggccgaggccacagccaagaggcccaggaccaccatcacagccaagcagctggagaccctgaagagcgcctacaacaccagccccaagccagcccggcacgtgcgggagcagctgagcagcgagaccggcctggacatgagggtggtgcaggtgtggttccagaacagaagagccaaggagaagaggctgaagaaggatgctggccggcagcgctggggccagtacttcaggaacatgaagaggagcagaggaggcagcaagagtgacaaggacagcgtgcaggagggccaggacagtgatgctgaggtgtccttccctgtgtccctgccctggaggaagtgggcccggcccatggccagcactggagcctggggccaccctggcctgggccctgccctgggcagccctggccagctgctgcccggggcctggaggcctggccggcccagggctgtgccccgggccgccagccggcagcccctgcgctgcccccccatccccaggaggcctgctgagcccccctggccacccctgctgagcagcctggtgtacccagacaccagcctgggcctggtgcccagcggggcccctgggggccccccacccatgagggtgctggccggaaatggccccagcagtgacctgagcacaggcagcagcggcggctacccagacttccctgccagccctgcctcctggctggatgaggtggaccacgcccagttctag

SEQ ID NO: 180678 - DNA, 1209 bp, Artificial Sequence
  derived and/or modified sequence
atggaggcccggggggagctgggccctgcccgggagagcgctggaggagacctgctgctggccctgctggccaggagagctgacctgcggcgggagatccccctgtgtgccggctgtgaccagcacatcctggaccgcttcatcctgaaggccctggacagacactggcacagcaagtgcctgaagtgcagcgactgccacacccccctggccgagcgctgcttcagcagaggagagagcgtgtactgcaaggatgacttcttcaagagatttggcaccaagtgtgccgcctgccagctgggcatcccccccacccaggtggtgagaagagcccaggactttgtgtaccacctgcactgctttgcctgtgtggtgtgcaagaggcagctggccactggagatgagttctacctgatggaggacagccggctggtgtgcaaggctgactatgaaacagccaagcagcgggaggccgaggccacagccaagaggcccaggaccaccatcacagccaagcagctggagaccctgaagagcgcctacaacaccagccccaagccagcccggcacgtgcgggagcagctgagcagcgagaccggcctggacatgagggtggtgcaggtgtggttccagaacagaagagccaaggagaagaggctgaagaaggatgctggccggcagcgctggggccagtacttcaggaacatgaagaggagcagaggaggcagcaagagtgacaaggacagcgtgcaggagggccaggacagtgatgctgaggtgtccttcccagatgagcccagcctggccgagatgggccctgccaacggcctgtatggcagcctgggggagcccacccaggccctgggccggcccagcggggccctgggcaacttcagcctggagcacggcggcctggccggccctgagcagtaccgggagctgcggcccggcagcccctacggcgtgccccccagccctgctgccccccagagcctgcccggcccccagcccctgctgagcagcctggtgtacccagacaccagcctgggcctggtgcccagcggggcccctgggggccccccacccatgagggtgctggccggaaatggccccagcagtgacctgagcacaggcagcagcggcggctacccagacttccctgccagccctgcctcctggctggatgaggtggaccacgcccagttctag

SEQ ID NO: 180679 - DNA, 1313 bp, Artificial Sequence
  derived and/or modified sequence
cgcagcgcccagcagcacccggagtcgcttggacgccggttcggggctattgcggggtggcgtcgctgggcccgggaaagttcgggactggagagtggcgacgccgggcggcgggacccatggaggcgcgcggggagctgggcccggcccgggagtcggcgggaggcgacctgctgctagcactgctggcgcggagggcggacctgcgccgagagatcccgctgtgcgctggctgtgaccagcacatcctggaccgcttcatcctcaaggctaccgccactggcacagcaagtgtctcaagtgcagcgactgccacaccactggccgagcgctgcttcagccgaggggagagcgtttactgcaaggacgactttttcaagcgcttcgggaccaagtgcgccgcgtgccagctgggcatcccgcccacgcaggtggtgcgccgcgcccaggacttcgtgtaccacctgcactgctttgcctgcgtcgtgtgcaagcggcagctggccacgggcgacgagttctacctcatggaggacagccggctcgtgtgcaaggcggactacgaaaccgccaagcagcgagaggccgaggccacggccaagcggccgcgcacgaccatcaccgccaagcagctggagacgctgaagagcgcttacaacacctcgcccaagccggcgcgccacgtgcgcgagcagctctcgtccgagacgggcctggacatgcgcgtggtgcaggtttggttccagaaccgccgggccaaggagaagaggctgaagaaggacgccggccggcagcgctgggggcagtatttccgcaacatgaagcgctcccgcggcggctccaagtcggacaaggacagcgttcaggaggggcaggacagcgacgctgaggtctccttccccgtgagccttccttggcggaaatgggcccggccaatggcctctacgggagcttgggggcacccaggccttgggccggccctcgggagccctgggcaacttctccctggagcatggaggcctggcaggcccagagcagtaccgagagctgcgtcccggcagcccctacggtgtccccccatcccccgccgccccgcagagcctccctggccccccctcctctccagcctggtgtacccagacaccagcttgggccttgtgccctcgggagcccccggcgggcccccacccatgagggtgctggcagggaacggacccagttctgacctatccacggggagcagcgggggttaccccgacttccctgccagccccgcctcctggctggatgaggtagaccacgctcagttctga

SEQ ID NO: 180680 - DNA, 2403 bp, Artificial Sequence
  derived and/or modified sequence
cgcagcgcccagcagcacccggagtcgcttggacgccggttcggggctattgcggggtggcgtcgctgggcccgggaaagttcgggactggagagtggcgacgccgggcggcgggacccatggaggcgcgcggggagctgggcccggcccgggagtcggcgggaggcgacctgctgctagcactgctggcgcggagggcggacctgcgccgagagatcccgctgtgcgctggctgtgaccagcacatcctggaccgcttcatcctcaaggctctggaccgccactggcacagcaagtgtctcaagtgcagcgactgccacacgccactggccgagcgctgcttcagccgaggggagagcgtttactgcaaggacgactttttcaagcgcttcgggaccaagtgcgccgcgtgccagctgggcatcccgcccacgcaggtggtgcgccgcgcccaggacttcgtgtaccacctgcactgctttgcctgcgtcgtgtgcaagcggcagctggccacgggcgacgagttctacctcatggaggacagccggctcgtgtgcaaggcggactacgaaaccgccaagcagcgagaggccgaggccacggccaagcggccgcgcacgaccatcaccgccaagcagctggagacgctgaagagcgcttacaacacctcgcccaagccggcgcgccacgtgcgcgagcagctctcgtccgagacgggcctggacatgcgcgtggtgcaggtttggttccagaaccgccgggccaaggagaagaggctgaagaaggacgccggccggcagcgctgggggcagtatttccgcaacatgaagcgctcccgcggcggctccaagtcggacaaggacagcgttcaggaggggcaggacagcgacgctgaggtctccttccccgatgagccttccttggcggaaatgggcccggccaatggcctctacgggagcttgggggaacccacccaggccttgggccggccctcgggagccctgggcaacttctccctggagcatggaggcctggcaggcccagagcagtaccgagagctgcgtcccggcagcccctacggtgtccccccatcccccgccgccccgcagagcctccctggcccccagcccctcctctccagcctggtgtacccagacaccagcttgggccttgtgccctcgggagcccccggcgggcccccacccatgagggtgctggcagggaacggacccagttctgacctatccacggggagcagcgggggttaccccgacttccctgccagccccgcctcctggctggatgaggtagaccacgctcagttctgacccaggcccggctccaccctgcacctcacacgagggagctgcccctgggtgggcggctcggggctgctggggtttccgaggaagtggggccagggcgtcaagggagggctggtgccttcggagcctcccactgccgaccgcacagctccctctctgggggctgagggacccacctggcccctcctctgacacagggctggcccgccaggtggcctcccagcaagccagccttttttgtaagcaaatttctcccctttattgaccaattaactgagcacttgctgctatttctagacatgaaatgtcaccttgctgaggcccagcccagcccagcatagcccgagggctggaaaaacgctttcatctctaaaactgagaaatcatcataattgtgctttcacttcccaggctccatgtgtcttggagccgtcaccccgaggctccctctttaggtcggagattggccttgcctgtcgaggcaagaggctgcagaggcggggacacacctgtgtcctccgggagaggccccctcctctccccagaccacagggggcctctctgcctccagccccaccttccccgggagaagctttccccaatccccaggtctctagatcattctgttctcgagtatcctgtggaggaggcaaaaatgcctggcgccccttctctccaagctcaattctctaagcccctcagggtctcctcctcaccccaccccaggcccttggtgtccaggctgcacccacagatgtctgttgccaaacagcctgccctccctgccggagccggctctgccagccccagattgggaagtctccccgctggagaagggtggggctcctctgagcctgccctgcctcctccatcagatcctttgggaagaagtttctgggagatgcccgcagctgtgcgtgccccagacacaaaggctggcctgtgtgtaagtcaaagtcactcccgcaaacctgaatctcgagctacctattggttctgtgaatgttctgtgtcttttatttattctcgggtgatcagctctttccaagacttcaataaatttgtcagttacagtcaa

SEQ ID NO: 180681 - DNA, 1194 bp, Artificial Sequence
  derived and/or modified sequence
atggaggcccggggcgagctgggccccgcccgggagagcgccggcggcgacctactcctagcactcctggctaggagggccgatttgaggcgagagattcctttgtgcgctgggtgcgatcagcacatactggatagatttattctgaaggccactgccactgggactgcatctgtgagcagcgctgcgacggccacgcctctggccgagaggtgtttttcccggggagagtctgtgtactgtaaggacgatttcttcaagaggttcggcaccaaatgtgccgcatgtcaacttggaatcccacccacacaagttgtcagacgcgcgcaggacttcgtgtaccacctgcactgtttcgcctgtgtagtttgcaagcgccagttggctactggcgacgagttttacctcatggaggatagccgccttgtgtgcaaggcagattacgagaccgctaagcagcgtgaggctgaggcgactgcaaagaggccccggactaccattactgccaagcagctggagacccttaaaagcgcttacaacacctccccaaagccagctagacatgtgagggaacagttgagttcagaaaccggtctcgatatgcgagtggtgcaggtgtggttccagaatagacgggctaaagagaagcggttaaaaaaggacgctggaagacagagatgggggcagtacttccgtaacatgaaaagaagccgtggcggatcaaagtctgacaaggacagcgtacaagagggacaagattcagatgctgaagtcagctttcccgtctccttgccatggcgcaaatgggctagacccatggcctccacaggcgcatggggccatccaggccttggccctgcactgggctcccctggacagctgctgccaggcgcttggcgaccgggcagacccagagctgttccgagggccgcaagtcgacagccgctgaggtgcccgcctattccacgaaggccggcagaaccgccgtggcccccccttctctcatccctggtctaccctgacaccagtctgggtctcgtgccttcaggtgccccgggcggccccccccctatgagagtcctggccggaaacggcccttcctcagacctaagcactggaagctccggcggataccccgacttccctgctagtcctgccagctggctggatgaagtagatcacgcacagttctag

SEQ ID NO: 180682 - DNA, 1209 bp, Artificial Sequence
  derived and/or modified sequence
atggaggcccggggcgagctgggccccgcccgggagagcgccggcggtgaccttttgctcgcactgttggctcgtcgtgctgatctaaggcgagaaattccactatgcgcgggctgtgaccagcacattctggacaggtttatcctgaaggctttggaccgccactggcactctaagtgtctcaagtgtagtgattgtcacacccctctagccgagcgctgctttagtaggggggagtccgtgtattgcaaggacgactttttcaagaggtttgggaccaaatgcgctgcgtgtcaactgggaatccctccaactcaggtagtcagacgagcccaggatttcgtctatcatttacattgctttgcttgcgttgtttgcaaacgccagctggctacaggcgatgaattttacctgatggaagacagcaggttggtgtgcaaggcagactacgaaactgctaaacagcgggaggccgaagcaactgccaagcgaccgcggacaaccatcaccgctaaacaactggaaacactcaagtctgcctacaatactagtccaaaacctgctagacatgtcagagaacagctgtcctctgagaccgggctggacatgagagtagtacaagtctggtttcagaatcgcagggccaaggaaaagcgacttaaaaaagatgccgggaggcagcgctggggtcagtactttcggaacatgaagcgcagccgagggggaagcaaaagcgataaagattccgtgcaagaggggcaggattcagatgctgaggtgtcattcccagacgagccttccctggcagagatgggacccgccaatggtctgtacgggagcctcggtgaacctactcaagccctggggcgtccttcaggggcgcttgggaactttagccttgaacatggcgggctagccggcccagagcagtacagggagcttagacctggatcaccatatggagtacccccttctccagctgctccacagtccctgcctggaccacagcctctactctcctccctcgtctacccagacacttccctgggcctagtgccgagtggcgcgccgggcggacctccccccatgcgggtgctggccggcaatggcccgagctctgacctttcgaccgggtcaagcggcgggtaccccgacttccccgcctctccagcatcctggttggacgaggtggatcacgcacagttctag

SEQ ID NO: 180683 - DNA, 1194 bp, Artificial Sequence
  derived and/or modified sequence
atggaggccaggggtgagctcggacccgctcgagaaagcgctgggggagaccttttactcgcactactggcacggcgagcggatctccgcagggaaataccactgtgcgcaggctgtgatcagcacattctcgataggttcattctgaaggccactgccaccggcacggcctccgtgagttcagcagccacagctacccctcttgccgaacggtgtttttccaggggggagagcgtctattgcaaagatgatttctttaagagatttggaacaaagtgtgccgcatgtcagctgggcatacctcccactcaagtggttagacgggcacaggactttgtttaccatctgcattgtttcgcttgtgtggtgtgcaaaaggcagcttgcgacgggcgacgagttctatctgatggaggactctcgactggtatgtaaagcagattatgagactgctaagcagcgtgaggccgaagcaactgctaaaagacccagaactaccatcaccgctaaacagctcgaaactctcaagtcagcgtataacacatctccaaaacctgcgaggcatgtgagagaacaattatcttctgaaacggggctggacatgcgggtcgtacaagtgtggtttcagaatcgcagggcaaaggaaaagcgcctgaaaaaggacgccggaagacagaggtggggacagtattttaggaatatgaagcgctccaggggaggatcaaaaagtgacaaggattcggtgcaggaggggcaagactccgatgccgaagtgtctttcccagtaagcctgccctggcgcaaatgggcccgacctatggcaagtaccggcgcttggggacaccccggactgggccctgccctggggtcacccggtcagctgcttcccggtgcatggaggcccggacggccaagagcagtgccaagagctgcatccagacaaccactgcggtgtccccctatcccccgaagaccagccgaaccgccttggcccccactcctgtcttcacttgtctatcctgacacgtctctgggcttagtaccttccggagcaccagggggtcctccaccaatgcgggtgctggcaggaaatggtccctcttctgacttatccaccggtagctccgggggataccccgattttcccgcaagcccggctagctggctggacgaagtcgaccatgcccagttctag

SEQ ID NO: 180684 - DNA, 1209 bp, Artificial Sequence
  derived and/or modified sequence
atggaagctagaggcgaactgggccctgccagggaatccgcaggcggtgatctgcttcttgcgctgctggcacgcagagccgacttaagaagggaaatacccctctgcgccggatgcgaccagcatatactggatagatttattctcaaggcactggaccgtcactggcacagtaaatgcctcaagtgctccgactgtcacacacctcttgcggaaaggtgtttttctcgcggtgaatcagtgtactgcaaagacgattttttcaaacgcttcggaacgaagtgcgccgcatgccaactgggtattccgccaactcaagtcgtgagaagggcccaagactttgtctatcatctgcattgcttcgcttgcgtcgtgtgcaaaaggcagcttgccaccggtgacgagttctacctcatggaggactcgaggttggtgtgcaaggccgactatgaaacagctaaacagcgggaggccgaagcaaccgcaaagcgaccacgtaccaccattacggctaagcagctggaaactctcaaaagtgcctataataccagcccaaagccagcaagacatgtacgggagcagttgagcagtgagactgggctggatatgcgtgtggtgcaggtgtggtttcagaaccgccgagctaaggagaaacgactgaaaaaggatgccggaaggcagagatgggggcagtacttcagaaatatgaaaagaagccgcggtgggagtaagagcgataaggacagtgtgcaagagggccaagattccgacgcagaggtgtccttcccggacgagcccagtctggcagaaatgggtcccgcaaacggcttgtatggctcattaggcgagcccactcaggccctcggccgaccctccggggcactcgggaacttctctcttgaacatggaggattggcaggtcctgagcagtacagggaactgcgccctggatcaccctatggcgtcccaccctctcccgcagcccctcaatctctaccagggcctcagccgctcctgtcatcgctggtgtatccagatacttccctcggactagtgccttctggcgctcctggaggtcctccaccaatgcgggtactagccggaaatggcccatctagcgatctctcgaccggctcctctggcggatatcctgactttccagcctcccctgccagttggctcgacgaggtagatcacgctcagttctag

SEQ ID NO: 180685 - DNA, 1194 bp, Artificial Sequence
  derived and/or modified sequence
atggaggccagaggcgagctgggccccgccagagagagcgccggcggcgacctgctgctggccctgctggccagaagagccgacctgagaagagagatccccctgtgcgccggctgcgaccagcacatcctggacagattcatcctgaaggccaccgccaccggcaccgccagcgtgagcagcgccgccaccgccacccccctggccgagagatgcttcagcagaggcgagagcgtgtactgcaaggacgacttcttcaagagattcggcaccaagtgcgccgcctgccagctgggcatcccccccacccaggtggtgagaagagcccaggacttcgtgtaccacctgcactgcttcgcctgcgtggtgtgcaagagacagctggccaccggcgacgagttctacctgatggaggacagcagactggtgtgcaaggccgactacgagaccgccaagcagagagaggccgaggccaccgccaagagacccagaaccaccatcaccgccaagcagctggagaccctgaagagcgcctacaacaccagccccaagcccgccagacacgtgagagagcagctgagcagcgagaccggcctggacatgagagtggtgcaggtgtggttccagaacagaagagccaaggagaagagactgaagaaggacgccggcagacagagatggggccagtacttcagaaacatgaagagaagcagaggcggcagcaagagcgacaaggacagcgtgcaggagggccaggacagcgacgccgaggtgagcttccccgtgagcctgccctggagaaagtgggccagacccatggccagcaccggcgcctggggccaccccggcctgggccccgccctgggcagccccggccagctgctgcccggcgcctggagacccggcagacccagagccgtgcccagagccgccagcagacagcccctgagatgcccccccatccccagaagacccgccgagcccccctggccccccctgctgagcagcctggtgtaccccgacaccagcctgggcctggtgcccagcggcgcccccggcggccccccccccatgagagtgctggccggcaacggccccagcagcgacctgagcaccggcagcagcggcggctaccccgacttccccgccagccccgccagctggctggacgaggtggaccacgcccagttctag

SEQ ID NO: 180686 - DNA, 1209 bp, Artificial Sequence
  derived and/or modified sequence
atggaggccagaggcgagctgggccccgccagagagagcgccggcggcgacctgctgctggccctgctggccagaagagccgacctgagaagagagatccccctgtgcgccggctgcgaccagcacatcctggacagattcatcctgaaggccctggacagacactggcacagcaagtgcctgaagtgcagcgactgccacacccccctggccgagagatgcttcagcagaggcgagagcgtgtactgcaaggacgacttcttcaagagattcggcaccaagtgcgccgcctgccagctgggcatcccccccacccaggtggtgagaagagcccaggacttcgtgtaccacctgcactgcttcgcctgcgtggtgtgcaagagacagctggccaccggcgacgagttctacctgatggaggacagcagactggtgtgcaaggccgactacgagaccgccaagcagagagaggccgaggccaccgccaagagacccagaaccaccatcaccgccaagcagctggagaccctgaagagcgcctacaacaccagccccaagcccgccagacacgtgagagagcagctgagcagcgagaccggcctggacatgagagtggtgcaggtgtggttccagaacagaagagccaaggagaagagactgaagaaggacgccggcagacagagatggggccagtacttcagaaacatgaagagaagcagaggcggcagcaagagcgacaaggacagcgtgcaggagggccaggacagcgacgccgaggtgagcttccccgacgagcccagcctggccgagatgggccccgccaacggcctgtacggcagcctgggcgagcccacccaggccctgggcagacccagcggcgccctgggcaacttcagcctggagcacggcggcctggccggccccgagcagtacagagagctgagacccggcagcccctacggcgtgccccccagccccgccgccccccagagcctgcccggcccccagcccctgctgagcagcctggtgtaccccgacaccagcctgggcctggtgcccagcggcgcccccggcggccccccccccatgagagtgctggccggcaacggccccagcagcgacctgagcaccggcagcagcggcggctaccccgacttccccgccagccccgccagctggctggacgaggtggaccacgcccagttctag

SEQ ID NO: 180687 - protein, 309 aa, Artificial Sequence
  derived and/or modified sequence
MRENNQSSTLEFILLGVTGQQEQEDFFYILFLFIYPITLIGNLLIVLAICSDVRLHNPMYFLLANLSLVDIFFSSVTIPKMLANHLLGSKSISFGGCLTQMYFMIALGNTDSYILAAMAYDRAVAISRPLHYTTIMSPRSCIWLIAGSWVIGNANALPHTLLTASLSFCGNQEVANFYCDITPLLKLSCSDIHFHVKMMYLGVGIFSVPLLCIIVSYIRVFSTVFQVPSTKGVLKAFSTCGSHLTVVSLYYGTVMGTYFRPLTNYSLKDAVITVMYTAVTPMLNPFIYSLRNRDMKAALRKLFNKRISS

SEQ ID NO: 180688 - DNA, 930 bp, Artificial Sequence
  derived and/or modified sequence
atgagagagaacaaccagagcagcaccctggagttcatcctgctgggcgtgaccggccagcaggagcaggaggacttcttctacatcctgttcctgttcatctaccccatcaccctgatcggcaacctgctgatcgtgctggccatctgcagcgacgtgagactgcacaaccccatgtacttcctgctggccaacctgagcctggtggacatcttcttcagcagcgtgaccatccccaagatgctggccaaccacctgctgggcagcaagagcatcagcttcggcggctgcctgacccagatgtacttcatgatcgccctgggcaacaccgacagctacatcctggccgccatggcctacgacagagccgtggccatcagcagacccctgcactacaccaccatcatgagccccagaagctgcatctggctgatcgccggcagctgggtgatcggcaacgccaacgccctgccccacaccctgctgaccgccagcctgagcttctgcggcaaccaggaggtggccaacttctactgcgacatcacccccctgctgaagctgagctgcagcgacatccacttccacgtgaagatgatgtacctgggcgtgggcatcttcagcgtgcccctgctgtgcatcatcgtgagctacatcagagtgttcagcaccgtgttccaggtgcccagcaccaagggcgtgctgaaggccttcagcacctgcggcagccacctgaccgtggtgagcctgtactacggcaccgtgatgggcacctacttcagacccctgaccaactacagcctgaaggacgccgtgatcaccgtgatgtacaccgccgtgacccccatgctgaaccccttcatctacagcctgagaaacagagacatgaaggccgccctgagaaagctgttcaacaagagaatcagcagctag

SEQ ID NO: 180689 - DNA, 930 bp, Artificial Sequence
  derived and/or modified sequence
atgcgcgagaacaaccagtcctctacgcttgagttcatacttctgggggttactggccagcaggagcaagaagatttcttctacatcctatttctcttcatttaccccattactctcattggtaatctcctgattgttctcgctatctgcagcgatgtcaggctgcataacccaatgtattttctcctcgccaacctgtctcttgtcgacattttcttcagcagtgtgacaatacctaagatgcttgctaatcatctgctgggcagcaagtctatttccttcggagggtgccttacacagatgtactttatgatcgcactgggcaacaccgattcgtacatacttgctgcgatggcctacgaccgcgctgtcgctatatcgcgaccattacactataccaccataatgagtcctagatcgtgtatatggctgatagctggctcctgggtgataggcaacgcgaatgcccttccccacaccctcctcaccgccagcttgagtttctgcggcaatcaggaggtagccaatttttattgtgatatcacgccgctgctgaagctgtcatgcagcgatatccacttccacgtcaagatgatgtatctgggagtgggaatttttagcgttcccctgctgtgtataattgtttcatatattagagtctttagtacagtgttccaagtccccagcacgaaaggagtgctgaaagcttttagcacctgcggttcccatcttacagtggtaagtttgtactacggcacagtcatgggcacttatttccgacccttgactaattatagcctgaaagatgccgttatcaccgtcatgtacactgccgtcacaccaatgctcaacccattcatttattccctacgcaacagggacatgaaggccgcccttagaaagctgttcaataaacggatatcatcttag

SEQ ID NO: 180690 - DNA, 930 bp, Artificial Sequence
  derived and/or modified sequence
atgagggagaacaaccagagcagcaccctggagttcatcctgctgggcgtgacaggccagcaggagcaggaggacttcttctacatcctcttcctgttcatctaccccatcaccctcatcggcaacctgctgattgtgctggccatctgcagtgatgtgcggctgcacaaccccatgtacttcctgctggccaacctgagcctggtggacatcttcttcagctctgtgaccatccccaagatgctggccaaccacctgctgggcagcaagagcatcagctttggaggctgcctgacccagatgtacttcatgattgccctgggcaacacagacagctacatcctggccgccatggcctatgacagagctgtggccatcagccggcccctgcactacaccaccatcatgagccccaggagctgcatctggctgattgctggctcctgggtgattggaaatgccaatgccctgccccacaccctgctgacagccagcctgtccttctgtggcaaccaggaggtggccaacttctactgtgacatcacccccctgctgaagctgagctgcagcgacatccacttccacgtgaagatgatgtacctgggcgtgggcatcttctctgtgcccctgctgtgcatcatcgtgtcctacatccgggtcttcagcacagtgttccaggtgcccagcaccaagggcgtgctgaaggccttcagcacctgtggcagccacctgactgtggtgtccctgtactatggaacagtgatgggcacctacttccggcccctgaccaactacagcctgaaggatgctgtgatcaccgtgatgtacacagctgtgacccccatgctgaaccccttcatctacagcctgaggaacagagacatgaaggccgccctgaggaagctgttcaacaagaggatcagcagctag

SEQ ID NO: 180691 - DNA, 930 bp, Artificial Sequence
  derived and/or modified sequence
atgagggaaaataaccagtcctctacactggaattcatcctcctgggagttactggtcagcaggaacaggaagatttcttctacatcctcttcttgttcatttaccccatcacattgattggaaacctgctcatcgtcctagccatttgctctgatgttcgccttcacaaccccatgtattttctccttgccaacctctccttggttgacatcttcttctcatcggtaaccatccctaagatgctggccaaccatctcttgggcagcaaatccatctcttttgggggatgcctaacgcagatgtatttcatgatagccttgggtaacacagacagctatattttggctgcaatggcatatgatcgagctgtggccatcagccgcccacttcactacacaacaattatgagtccacggtcttgtatctggcttattgctgggtcttgggtgattggaaatgccaatgccctcccccacactctgctcacagctagtctgtccttctgtggcaaccaggaagtggccaacttctactgtgacattacccccttgctgaagttatcctgttctgacatccactttcatgtgaagatgatgtacctaggggttggcattttctctgtgccattactatgcatcattgtctcctatattcgagtcttctccacagtcttccaggttccttccaccaagggcgtgctcaaggccttctccacctgtggttcccacctcacggttgtctctttgtattatggtacagtcatgggcacgtatttccgccctttgaccaattatagcctaaaagacgcagtgatcactgtaatgtacacggcagtgaccccaatgttaaatcctttcatctacagtctgagaaatcgggacatgaaggctgccctgcggaaactcttcaacaagagaatctcctcgtaa

SEQ ID NO: 180692 - DNA, 930 bp, Artificial Sequence
  derived and/or modified sequence
atgcgggagaacaaccagagcagcaccctggagttcatcctgctgggggtgactggacagcaagaacaggaggacttcttttatatactgttcctcttcatttaccccattaccctgatcggtaacctgttgattgtactcgccatctgctccgatgtgagactgcataacccaatgtacttcttattggccaatttgtccttagtggacattttcttcagctccgtcaccatccccaagatgctggccaatcatctactgggctcaaagagtattagctttggaggatgcctgacccagatgtattttatgatcgcccttggtaacactgacagctatatcctggccgcaatggcttatgatcgagcagtcgcaatctccaggccattgcactacacaactatcatgagccccaggtcgtgtatttggcttatcgctggatcgtgggtgatcgggaatgctaatgccctgccacacactctgctcacagccagcttgtctttttgcggaaatcaggaggtcgcaaacttctattgtgacattacgcctttgctgaagttgtcctgttccgacatccatttccacgtgaagatgatgtacctcggcgtggggatattttccgttccgctgctgtgtatcattgtgagctacattagggtcttcagtacagtgttccaggtgccctccacaaagggagtgctgaaggccttttctacatgcggcagccaccttacagtcgtttccctatattacggcacagtcatgggaacatatttccggcctctgacaaactattctctgaaagatgccgtgataacagtcatgtacacagcggtcacccccatgctcaaccctttcatctatagcctgcgaaatcgtgacatgaaggcagctcttcgtaagctctttaataaacgtatttcgagttag

SEQ ID NO: 180693 - DNA, 930 bp, Artificial Sequence
  derived and/or modified sequence
atgagggagaataaccagagctcaactttagagttcattctcctgggggtgacgggccagcaggagcaagaggactttttctatatcctgtttctattcatctacccaatcaccctcattggaaacctgctcattgtactggctatctgttccgatgttaggctgcataaccctatgtactttctgctagccaacctatcactggtagatatttttttctcatctgtcacaattcccaagatgctggcgaatcatctcctgggttcaaagtccatctcatttgggggatgccttacccagatgtatttcatgattgccctgggaaacacggatagctacatcctcgcagcaatggcttatgatcgcgcagtggcaatcagccgacccctacactacaccacaattatgagtccaagatcctgcatctggcttattgcgggatcgtgggttattgggaacgccaacgcgcttccacatactcttcttactgcctccttaagtttttgtggcaatcaggaggttgccaacttttattgcgacatcactccccttctcaagctgtcatgttctgacatacatttccatgtgaagatgatgtacttgggagtcggaatcttttccgtgccactgctttgtataattgttagttatataagggttttttctacagtatttcaggtgccttccacaaaaggcgttctcaaagccttttcaacctgcggatcccatctgacagtcgtgtccctttattatggcaccgttatgggcacctacttccgaccactgactaattattccctgaaggatgccgtaatcaccgttatgtacactgcagtgacccccatgcttaaccccttcatctattctctgagaaatcgcgacatgaaggccgctctaagaaagcttttcaacaagcggattagcagttag

SEQ ID NO: 180694 - protein, 870 aa, Artificial Sequence
  derived and/or modified sequence
MNHLNVLAKALYDNVAESPDELSFRKGDIMTVLEQDTQGLDGWWLCSLHGRQGIVPGNRLKILVGMYDKKPAGPGPGPPATPAQPQPGLHAPAPPASQYTPMLPNTYQPQPDSVYLVPTPSKAQQGLYQVPGPSPQFQSPPAKQTSTFSKQTPHHPFPSPATDLYQVPPGPGGPAQDIYQVPPSAGMGHDIYQVPPSMDTRSWEGTKPPAKVVVPTRVGQGYVYEAAQPEQDEYDIPRHLLAPGPQDIYDVPPVRGLLPSQYGQEVYDTPPMAVKGPNGRDPLLEVYDVPPSVEKGLPPSNHHAVYDVPPSVSKDVPDGPLLREETYDVPPAFAKAKPFDPARTPLVLAAPPPDSPPAEDVYDVPPPAPDLYDVPPGLRRPGPGTLYDVPRERVLPPEVADGGVVDSGVYAVPPPAEREAPAEGKRLSASSTGSTRSSQSASSLEVAGPGREPLELEVAVEALARLQQGVSATVAHLLDLAGSAGATGSWRSPSEPQEPLVQDLQAAVAAVQSAVHELLEFARSAVGNAAHTSDRALHAKLSRQLQKMEDVHQTLVAHGQALDAGRGGSGATLEDLDRLVACSRAVPEDAKQLASFLHGNASLLFRRTKATAPGPEGGGTLHPNPTDKTSSIQSRPLPSPPKFTSQDSPDGQYENSEGGWMEDYDYVHLQGKEEFEKTQKELLEKGSITRQGKSQLELQQLKQFERLEQEVSRPIDHDLANWTPAQPLAPGRTGGLGPSDRQLLLFYLEQCEANLTTLTNAVDAFFTAVATNQPPKIFVAHSKFVILSAHKLVFIGDTLSRQAKAADVRSQVTHYSNLLCDLLRGIVATTKAAALQYPSPSAAQDMVERVKELGHSTQQFRRVLGQLAAA

SEQ ID NO: 180695 - DNA, 2613 bp, Artificial Sequence
  derived and/or modified sequence
atgaaccatttaaacgtgctggccaaggcactgtacgacaatgttgctgaaagtcctgacgagctctccttcaggaaaggtgatatcatgactgttctggagcaggacacgcaaggattggatggctggtggctgtgttctttgcacggacgacagggaattgtgccaggaaaccgcctgaaaatactcgtggggatgtacgacaaaaagccagccggacctggccccggccccccagctacacccgctcaaccgcaacctgggctgcacgcgcctgctccgcctgcttctcagtacacccctatgctccctaacacttatcaaccccagcccgattccgtgtatctcgttcccaccccctctaaggcccagcaaggcctgtaccaggtacctggtccatccccccagttccagtcaccccctgcgaaacagacaagcaccttctctaaacagacccctcatcacccatttccctcccccgccactgatttgtaccaggtaccccctggaccgggcggacctgcacaggacatttaccaagttcctccttccgcaggaatgggacacgacatttatcaagtcccaccctcaatggacaccaggtcctgggaaggcactaagccacccgctaaggtggtggtgcccaccagagttggtcaggggtacgtgtacgaggcagcccagccagagcaggacgagtatgacattcccaggcatctgttagccccaggcccacaggatatctatgatgtgcctcctgttagggggctgttgcccagtcagtacggccaggaggtctatgatactccacctatggccgtgaagggaccgaatggacgagatcctcttctggaagtttacgatgtgccccctagcgtcgagaagggactacctccatccaatcatcatgcggtctatgatgtgcccccatctgtcagcaaagacgtgccggatggcccacttctgcgcgaagaaacatacgatgtgcctcccgctttcgcaaaagccaaaccttttgaccctgccaggactccactggtactggccgcaccgcctccagattcaccgcccgccgaggacgtgtacgatgtgcctcctcctgcacccgatctgtacgatgtaccccctgggctgaggcgccccggccccggaactctctacgatgtgccgagagaaagagtgctgccaccggaggtggcagatggaggagtagtggactcaggggtgtacgccgtccctccccccgcagaaagggaggccccggctgagggcaaacggctgtccgccagctccactggctctactcggagcagccaaagcgccagctccctggaggtggctggccccgggcgggaacctctcgagctggaggtcgctgttgaggccttagcacggttacagcagggtgtgtctgccaccgtagcgcacttactggatcttgctggttccgccggcgccacaggaagctggcgctcccccagtgagccccaagaacctctggtgcaagatctgcaggctgccgtggccgctgttcaatctgctgtccatgaactgctggaattcgctcgcagtgcggtagggaatgcggcccacacgtctgacagagccttgcacgctaaactgagccggcagttacagaagatggaggacgtacaccaaacccttgtggcccatgggcaggcactcgatgctggacggggggggagtggagcaacgttagaggacttggaccggctggtggcctgctctcgcgccgtccctgaagacgctaagcagctggccagtttcctgcatggcaacgccagcctgctgttccggcgtactaaggctaccgcccccggcccggaagggggagggaccctgcatccaaatcccacggacaagactagctccattcagtcacgtcctcttccaagtccccccaaatttacttcccaagacagccccgatgggcagtatgaaaacagtgaaggcgggtggatggaagattacgattacgtccacctccaggggaaagaggagttcgagaaaacacagaaagagctgctcgaaaagggatctatcactcgccaaggaaaatcacagctggagcttcagcagcttaagcagtttgagaggctggagcaggaggtctcccggccaatcgaccatgatctggctaattggactcccgcgcaacctttggccccggggcggacaggtggactcggtccttctgaccgccaactcctgcttttctatctggagcaatgcgaagccaacttgacaaccttaactaacgctgttgacgcgttcttcactgcagtagccacaaaccagccccccaaaatcttcgtcgctcatagtaagttcgttatcctgagcgcacacaaactcgttttcattggagacactttatctcggcaagccaaggccgctgatgtgcggtcccaggtgactcattactcaaacttgctctgtgacttattgcggggtatagtggccaccacgaaggccgcggcgttgcagtatccaagtcctagtgcagcccaagacatggttgaacgcgtgaaggaactgggccacagcacgcagcagttccgcagggttttaggacagctagccgcagcctag

SEQ ID NO: 180696 - DNA, 2613 bp, Artificial Sequence
  derived and/or modified sequence
atgaaccacctgaatgtgctggccaaggccctgtatgacaacgtggccgagagcccagatgagctgtccttcaggaagggggacatcatgacagtgctggagcaggacacccagggcctggatggctggtggctgtgcagcctgcacggccggcagggcatcgtgcccggcaaccggctgaagatcctggtgggcatgtatgacaagaagccagctggccctggccctggccccccagccaccccagcccagccccagcccggcctgcacgccccagcccccccagccagccagtacacccccatgctgcccaacacctaccagccccagccagattctgtgtacctggtgcccacccccagcaaggcccagcagggcctgtaccaggtgcccggccccagcccccagttccagagccccccagccaagcagaccagcaccttcagcaagcagaccccccaccaccccttccccagccctgccacagacctgtaccaggtgcccccaggccctgggggccctgcccaggacatctaccaggtgccccccagcgctggcatgggccatgacatctaccaggtgcccccatccatggacaccaggtcctgggagggcaccaagcccccagccaaggtggtggtgcccaccagggtgggccagggctacgtgtatgaggccgcccagcctgagcaggatgaatatgacatccccaggcacctgctggcccctggcccccaggacatctatgatgtgccccctgtgcggggcctgctgcccagccagtatggccaggaggtgtatgacaccccacccatggctgtgaagggccccaacggccgggaccccctgctggaggtgtatgatgtgccccccagcgtggagaagggcctgccccccagcaaccaccacgctgtgtatgatgtgcccccatctgtgtccaaggatgtgcctgatggccccctgctgcgggaggagacctatgatgtgcccccagcctttgccaaggccaagccctttgatcctgcccggacccccctggtgctggccgcccctcctccagacagccccccagcagaagatgtgtatgatgtgcccccaccagccccagacctgtatgatgtgcccccaggcctgcggcggcccggccctggcaccctgtatgatgtgccccgggagcgggtgctgcccccagaggtggctgatggaggagtggtggacagcggcgtgtatgctgtgcccccacctgctgagcgggaggccccagctgagggcaagaggctgagcgccagcagcacaggcagcaccaggagcagccagagcgccagcagcctggaggtggccggccctggccgggagcccctggagctggaggtggccgtggaggccctggcccggctgcagcagggcgtgtctgccaccgtggcccacctgctggacctggccggcagcgctggggccaccggctcctggaggagccccagcgagccccaggagcccctggtgcaggacctgcaggccgctgtggccgctgtgcagagcgctgtgcatgagctgctggagtttgcccggtctgctgtgggcaatgctgcccacaccagtgaccgggccctgcacgccaagctgagccggcagctgcagaagatggaggatgtgcaccagaccctggtggcccacggccaggccctggatgctggccggggcggcagcggggccaccctggaggacctggaccggctggtggcctgcagcagagctgtgcctgaagatgccaagcagctggccagcttcctgcacggcaatgccagcctgctcttccggaggaccaaggccacagcccctggccctgagggcggcggcaccctgcaccccaaccccacagacaagaccagcagcatccagagccggcccctgcccagcccccccaagttcaccagccaggacagcccagatggccagtatgagaacagcgagggcggctggatggaggactatgactatgtgcacctgcagggcaaggaggagtttgagaagacccagaaggagctgctggagaagggcagcatcacccggcagggcaagagccagctggagctgcagcagctgaagcagtttgagcggctggagcaggaggtgtcccggcccatcgaccatgacctggccaactggaccccagcccagcccctggcccctggccgcactggaggcctgggccccagcgaccggcagctgctgctcttctacctggagcagtgtgaggccaacctgaccaccctgaccaatgctgtggatgccttcttcaccgctgtggccaccaaccagccccccaagatctttgtggcccacagcaagtttgtgatcctgagcgcccacaagctggtgttcatcggggacaccctgagccggcaggccaaggccgcagatgtgcgcagccaggtgacccactacagcaacctgctgtgtgacctgctgcggggcatcgtggccaccaccaaggctgctgccctgcagtaccccagccccagcgctgcccaggacatggtggagcgggtgaaggagctgggccacagcacccagcagttcagaagagtgctgggccagctggccgccgcctag

SEQ ID NO: 180697 - DNA, 2613 bp, Artificial Sequence
  derived and/or modified sequence
atgaaccacctgaacgtgctggccaaggccctgtacgacaacgtggcagaatctccagatgaactgagctttaggaagggagacatcatgaccgtgctggagcaagacacccaaggtttggatgggtggtggttgtgttcactgcatgggaggcaggggatagtgcccggtaaccggctaaagatacttgtgggtatgtacgataaaaaacctgccggcccgggtcccggcccccctgcgactcctgcccagccccaaccgggcctgcacgctcccgctccaccagcttcccagtatacccccatgctgccaaatacttaccaaccccaacccgattcggtctacttagtgccaacacccagtaaggcccaacaggggctttatcaggttccgggaccttctccccaatttcagtctcctcctgctaagcagacctcaacgttctcgaagcaaacgccccaccacccattccctagcccagcaacagacctctaccaggtgcctcctggcccgggaggtcccgcacaggatatttaccaggtgcccccaagcgctggcatgggacatgatatctatcaagtccccccaagtatggacacacgatcctgggagggtaccaagccacctgccaaagtggttgttcccacccgcgtgggtcaggggtacgtctacgaggccgcccaacccgagcaagatgagtatgacattcctaggcatctcctggcccccggcccacaggatatctacgatgtgcctcctgtcagggggctcctgcccagtcagtacggtcaggaagtgtatgatacgccaccgatggctgtcaaaggacccaacggcagggaccctctcctggaggtgtatgatgttcccccaagcgtcgagaaaggcctccctccatcaaaccaccacgcagtctatgatgtaccaccctcagtctctaaggacgttcctgacggccccctcctgcgcgaagaaacctatgatgtacctccagcattcgcgaaagctaagccgtttgatcccgctcgcacccctctggtgttagctgctccccctcctgattctcctccagctgaggacgtctatgatgtgccaccgccggcacccgatctctacgatgtccccccaggtctgcgaagaccaggccccgggaccctctacgatgtgcctcgtgaacgggtgctccccccagaggtggccgatggtggcgtggttgactctggggtgtacgcagttccaccacccgctgaacgggaggcacccgcagaaggcaagagactgtccgcctcatctacagggtcgacgcggagtagccagagtgcttctagtttagaagttgctggtccggggcgcgaacccctggaactggaagtcgccgtggaagcactggcacggcttcagcaaggcgtcagcgccacagtggctcaccttctggatttagcggggagtgccggcgctacaggctcgtggaggtctcctagcgagccccaagaaccccttgtccaggacctgcaagccgccgtggccgccgtgcagagcgcagtccacgagctcctcgagtttgccaggtccgccgttggtaacgccgcccatacctcagaccgcgctttacacgccaaactatcccgccagctccaaaagatggaggatgtgcatcaaaccctggtcgcgcatggccaggccctggacgctggtaggggaggatccggggctacactcgaggatttggaccgattggtcgcctgttcacgagcagtccccgaggacgcaaagcagctggcctcctttcttcacggaaacgcttcactgctgttccgacgtacgaaagctacagcacccggacccgagggcggcggcacgctccatccaaatccgacggacaagacttcatctattcagagcagacccctgccctcccctcccaaatttacaagccaggactcgccagacggacagtacgagaactctgaggggggatggatggaggactatgattacgtgcacctgcaaggtaaagaggagtttgagaaaacacagaaagagctccttgagaagggctcaattacacgccaggggaagtcccaactggagctacagcagcttaagcagtttgagcgactggagcaggaggtgtcccgacccatcgatcacgatctggcaaactggacacccgctcaacctctcgctcccggccggacgggcggattggggccttccgatcgccaactgctgcttttttatctggagcaatgcgaggccaaccttaccacactgaccaacgccgtggacgccttcttcaccgctgtggccacaaatcaaccaccaaaaatctttgtcgcccatagcaagttcgtcattctgtccgcacataaactagtgtttattggcgacacactctcgcggcaggcaaaagcagcggatgtgagatctcaagtgactcactactctaacctgttgtgcgacctcctgcgcgggattgtcgccactactaaggccgcggcactccagtaccctagcccgtcagccgcgcaagatatggttgagcgcgtgaaggagttaggacactccactcagcaattcaggcgggtgcttggccaactcgcggcggcctag

SEQ ID NO: 180698 - DNA, 2613 bp, Artificial Sequence
  derived and/or modified sequence
atgaatcacctgaatgtattagcaaaggcactttatgataacgtcgctgaaagtcccgacgagctaagtttccgaaagggcgacatcatgacagtgctggaacaagacacccaaggcctggatggctggtggctctgtagcctgcatggtaggcagggcatcgttcccggaaatcggctcaaaatccttgtgggcatgtacgataagaaaccagcaggtccaggccctgggccacccgctacccccgcacagccccagcccggtctgcatgctccagcaccgcctgcaagccagtatacccctatgctgcccaatacctatcaacctcaaccagacagtgtgtacttggtgcctaccccatctaaagcccagcagggattgtatcaagtgccaggacctagcccccaattccagtcacccccagctaaacagactagcacatttagcaaacagacgccccaccatccgtttcccagtcctgctacggatctgtatcaggtgccccctggaccaggcggtcctgcacaagatatttatcaggttccccctagtgccggaatgggacatgatatttaccaagtacctccatcaatggacacacgctcttgggaaggcactaaacctcctgccaaggtggtcgttccgactcgagtgggacaaggatatgtttatgaagccgctcaacccgagcaggacgaatacgacatccccaggcatcttctcgctcccggaccccaggacatatacgatgtgccaccagtcaggggacttctgccttcgcaatatggccaagaagtatacgacactccaccaatggccgttaaagggccaaacggaagggatccgctgctggaggtatacgacgttccaccatctgtggagaagggcctgcctccgagcaaccatcatgctgtctacgatgtcccaccaagcgtgtctaaggatgtacccgacggcccactcctgagggaggaaacttatgatgtgccgccagcattcgctaaagctaagcctttcgaccccgctcggacgcccctggtcctcgctgctccccctcccgacagtccccctgctgaggacgtctatgatgtgccacctcccgctccagatttgtatgacgtacctccaggtctgcgccgacccggacccggaaccctttacgacgtgccaagagagcgagtcctgccccctgaagtggcagacgggggagtcgtggactcaggcgtgtatgctgtgccgccacccgcagagcgagaagctcctgctgagggaaagcgtttgtctgcttccagcaccgggtccacaaggtccagccagtccgcgtcaagcctggaggtggccggaccgggacgggagccgttggaactggaagtggccgtggaagctttggccaggctccagcagggagtgagtgccacggtcgctcacctgctcgacctcgccggatcggctggcgctactggttcatggcgctcccctagcgaaccccaggagccgctggtgcaggacctgcaggctgccgtggccgctgtgcagtctgctgttcacgagctcctggaatttgccaggtccgccgtggggaatgccgctcacacttcagatagggccctgcacgccaagctgagccgtcaactgcagaaaatggaggacgtccatcaaaccttggtcgcccatggccaggccctggacgcagggcgtggtggcagcggagcgacgctggaagatctggatcgtctggtcgcttgctcccgggctgtaccagaggacgctaagcagcttgcttcttttttacacggcaatgccagtttgctctttcgaagaacaaaggcgactgcacctggtccggaaggagggggtaccctgcatccaaaccccacggacaaaacatcatctattcagagcagacctctgccgagcccgcctaagttcacctctcaggattcacccgacggccagtacgaaaactcagaaggcggttggatggaggactatgactacgttcatctccaaggcaaggaagaatttgagaagacccagaaggaactcctggagaagggctctattacccggcaggggaaatctcagctggaactgcaacagttaaagcaatttgaacggctggaacaagaggttagccgccctatcgaccacgacctcgccaattggacacctgcacagccactggcccctgggagaacagggggactgggccctagtgataggcagttgttgctgttctacttggagcagtgtgaagctaacttaacgactctaaccaacgccgttgacgcgtttttcactgccgtggctacaaaccagccgcctaagatctttgtggcccactctaaattcgttatcctgagtgcgcacaaactagtgtttataggcgatactttatctcggcaggctaaggccgctgacgtacgaagtcaggtaactcactactccaacctgctgtgcgacctgttgcgcggaatcgttgcaaccaccaaggcagcagccctacagtaccccagtccctcagctgcccaagacatggtcgaaagggtgaaagaactagggcattctacccaacagttcagaagagttctcggacagctcgccgcagcttag

SEQ ID NO: 180699 - DNA, 2613 bp, Artificial Sequence
  derived and/or modified sequence
atgaatcacttgaatgtgctggctaaggccctctacgataatgtggcagaatcgcccgatgagttatcttttcgcaaaggagatataatgaccgttctcgagcaggacacccaagggttagacggatggtggctttgctcccttcatggaaggcagggaatcgtcccaggaaatcgtttaaagattctagtgggcatgtatgataagaagcctgccgggccgggaccaggtccacccgccaccccagctcaaccacaacccggcctccacgcgcccgcgcctcccgctagtcagtatactccaatgctccccaacacataccaaccccagcctgattctgtatatctggtcccaacccccagcaaggctcaacagggcctttatcaggtccctggtccgagtccccagtttcagtctccaccggctaaacaaacatctactttctctaaacagaccccacatcatccattcccctcgcccgcaactgacctgtatcaagtcccaccagggcctggaggaccagctcaggatatatatcaggtaccaccatctgccgggatgggccatgacatctaccaggtccctccgagcatggacactcgatcttgggaagggacaaagccacctgcaaaggtggtcgtacccaccagggtggggcaagggtatgtttatgaggctgcccagcccgaacaggatgaatacgacatccctcgtcacttactggctccaggcccacaggatatatacgacgtgcctcccgtacgcggactcctcccctcccaatacgggcaggaagtgtacgataccccaccaatggcagtgaaagggcctaacggtcgggaccccctactggaggtctatgacgtcccaccctcagtggagaaaggcttaccaccctccaaccaccacgctgtgtacgacgtacccccctcagtgtctaaagatgtccctgatggaccgctgctgagggaggaaacttacgacgttcctcccgccttcgctaaggctaagccatttgaccccgccaggacacccctcgtccttgctgcccctcctcccgactctcccccagcagaggatgtctacgacgttcccccgcctgcgccggacctctatgatgtgccccccgggcttaggcgcccgggccccggcactctgtatgacgtgcctcgtgagcgcgtcttgccacctgaagtagcagacggcggcgtggttgactctggtgtctatgctgtccctcctcccgctgaaagagaggccccagcagagggcaaaaggctgtccgcctcatctacgggcagtacccgatcatctcaatccgcctcttctcttgaagtggcagggccaggacgggaaccactcgaattggaggtggccgtggaggcccttgcccggctgcagcagggggtgtcagctacagtggctcatctactggatctagccggtagtgccggagcaaccggaagctggaggtctccctctgaacctcaggagccactggttcaagacttgcaggctgccgtcgccgctgtccagagtgccgttcacgaactgttagagtttgcacgatcggccgtgggaaacgcagcacacaccagtgatagggccttgcatgctaagctttctcgacaactccagaaaatggaagacgtccaccagaccttggtagcccatggacaggctttggatgctgggcggggtggtagtggggcaacccttgaagaccttgaccggttggtagcttgcagtcgggccgtcccggaagacgccaagcaactggcgagttttctgcacggcaacgcaagcctactattcagacggactaaagctacagcaccaggcccggagggaggtggaactctccatcctaatccgactgacaaaacttcctcaattcaatctagaccactgccttctccccctaagtttacatctcaggatagtcccgatggtcagtacgagaatagcgaaggaggttggatggaggattacgattatgtgcacctgcagggcaaggaagaattcgagaagacccagaaagagctgctggagaaaggaagtatcacccgacaaggtaagagtcagttagaactgcagcagttaaaacagtttgagagattggaacaggaagtatctaggcctattgaccacgacttggcgaattggacaccggcgcagccattggcacccgggcgtactggcggcctcggcccttcagataggcagctgctactgttttacctcgaacaatgcgaggctaatttgacaaccctaactaatgccgtcgatgcattcttcacggccgtggcaactaaccagccacctaaaatcttcgtggcacactcgaagtttgtaattctgtcagcccataaactggtgtttatcggggacaccctctctaggcaagcaaaggctgccgacgtccgttcccaagtaacacactatagcaacctcttgtgcgatctacttcgtggcatagtagctactacgaaagctgccgcgcttcagtaccccagtccaagcgccgcgcaagatatggtagagcgtgttaaggaactggggcactcaactcaacaatttaggcgcgtgttgggccaactggctgcagcctag

SEQ ID NO: 180700 - DNA, 2613 bp, Artificial Sequence
  derived and/or modified sequence
atgaaccacttgaatgtgctcgctaaggctctatatgataatgtggccgagtcacccgatgaactgtcttttcgaaagggcgacatcatgacagtgcttgaacaggatacccaaggactagatggatggtggttatgctctctgcacgggcgtcaggggattgttcccgggaataggttgaaaatcctcgttggcatgtacgataaaaagcctgccggtccagggccaggacctcctgcaactcctgcgcagccgcaaccaggcctgcatgcacctgcccccccagcttcccagtataccccaatgctcccaaacacatatcaaccccaaccagatagtgtctatctagttcctactccctccaaggctcagcaaggcctgtaccaggttccgggcccatctccacaattccaaagccctccagccaaacaaacctcaacctttagtaaacagaccccccaccacccatttccctcccccgccactgatctgtatcaggtgcctcctggcccgggaggccccgcccaagacatctatcaagtgcctccctctgctggtatgggacacgacatctaccaggtgccaccatcaatggatactcgaagttgggagggcactaaaccaccagcaaaggtggtcgtgcctacaagagtaggacagggttatgtgtatgaggcagcccagcccgagcaagatgagtacgatataccacgtcaccttctggccccaggtccacaggacatatacgacgtacctccagtcagaggcctgttaccatcccaatacggccaggaagtctatgacaccccccctatggcggttaaaggccccaacgggcgtgaccccttattggaagtttatgatgtacctccctcagtggaaaagggcctccctccgtcaaaccatcacgctgtgtatgacgtgcctcccagcgtgtccaaagatgtccccgatgggccactgctgcgggaggaaacttatgacgttcccccggcatttgctaaagccaaaccatttgatcctgctagaacccccctcgtgctcgctgctccccctcccgactcccccccagccgaggatgtgtatgatgtgccgcccccagccccagatctgtatgacgttccacctgggctgcgccgacctggaccagggaccctgtacgacgttccgcgcgaacgagtgctccccccggaggtcgccgacgggggagtggtcgacagtggagtgtacgccgtaccacctcctgccgagcgggaagcccctgccgagggaaaaagacttagcgcatcttcaacgggctctacacgtagctcacagtctgccagttccttagaagttgcaggccccggtcgggagcccttggagcttgaggtggctgtcgaagctctggcccgattgcaacagggagtgtccgccactgtggctcatctgctcgaccttgctggttccgccggagccaccggctcgtggagaagcccctccgaaccccaggaaccattagtgcaagatttacaagcagctgtggccgctgtgcagagcgccgtgcatgaactcctggagttcgctcggagtgccgttggtaacgccgctcacacctcagatagagccctccacgccaaactgtcacggcaattacagaagatggaggacgtccaccagacgcttgtagcccacggccaagcactcgacgctggacggggtggttccggggctactttggaagatctggacagactcgttgcctgcagtagggcagtacctgaagatgctaaacaacttgccagctttctgcacggcaacgcaagcctactattcagacggactaaagctacagcaccaggcccggagggaggtggaactctccatcctaatccgactgacaaaacttcctcaattcaatctagaccactgccttctccccctaagtttacatctcaggatagtcccgatggtcagtacgagaatagcgaaggaggttggatggaggattacgattatgtgcacctgcagggcaaggaagaattcgagaagacccagaaagagctgctggagaaaggaagtatcacccgacaaggtaagagtcagttagaactgcagcagcttaaacaatttgaaagactcgagcaggaagtatcccgacccattgaccacgacctagccaactggacacctgctcagcccctcgctcctggacggaccggaggcctagggcccagtgaccgacagttgttgcttttttacctggaacagtgtgaagcaaacctgacaactctcaccaacgcggtggatgcatttttcacagcagtggcaactaatcagcccccaaaaatcttcgtggcacacagcaaatttgtaatcttgagcgcacacaagttggtctttatcggcgacaccctttctagacaagctaaagccgcagacgtgaggagccaagttacccactattcaaatcttctgtgtgatctgctacgcggtatcgtcgccacaaccaaggcagccgcccttcagtacccgagccctagcgcagctcaggatatggtggaacgagtaaaggagttgggccattctacacaacagttccgacgggtgttgggtcagctcgctgctgcctag

SEQ ID NO: 180701 - DNA, 3221 bp, Artificial Sequence
  derived and/or modified sequence
ggccgaggcggcagctgcgcggcggcaccggggcggctgcggcgcgctcggagccccgagggcacgcggcccgggcagctcggtgtgcgcccccgcgagagccggggccccaggcccgccggacaccatgaaccacctgaacgtgctggccaaagcgctctatgacaatgtggccgagtccccggatgagctctccttccgcaagggtgacatcatgacggtgctggagcaggacacgcagggcctggacggctggtggctctgctcgctgcatgggcgccagggcatcgtgcctgggaaccgcctcaagatcttggtgggcatgtatgataagaagccagcagggcctggccccggccctcccgccaccccggcccagcctcagcctggcctccatgccccagcgcctccggcctcccagtacacgcccatgctccccaacacctaccagccccagccagacagcgtctacctggtgcccactcccagcaaggctcagcaaggcctctaccaagtcccgggtcccagccctcagttccagtctcccccagccaagcagacatccaccttctcgaagcagacaccccatcacccgtttcccagcccggccacagacctgtaccaggtgcccccagggcctggaggccctgcccaggatatttaccaggtgccaccttctgccgggatggggcatgacatctaccaggtccccccgtccatggacacacgcagctgggagggcacgaagcccccggcaaaggtggtggtgcccacccgcgtggggcagggctatgtatacgaggccgcccagccggagcaggacgagtacgacatcccgcgacacctgctggccccggggccacaggacatctatgatgtgcccccggttcgggggctgcttcccagccagtatggccaggaggtgtatgacacaccccccatggctgtcaagggtcccaatggccgagacccgttgctggaggtgtatgacgtgccccccagtgtggagaagggcctgccaccgtccaaccaccacgcagtctacgacgttcctccatcggtgagcaaggatgtgcccgatggcccactgctgcgtgaggagacctacgatgtgccccccgccttcgccaaggccaagccctttgacccggcccgcaccccactggtactggctgcgccccctccagactccccgccggccgaggacgtgtatgacgtgccgcccccggctcctgacctctacgacgtgccccctggcttgcggcggcctggcccgggcaccctgtacgatgtgccccgtgaacgggtgcttcctcctgaggtggctgatggtggcgtggtcgacagtggtgtgtatgcggtgcctcccccagctgaacgtgaagccccggcagagggcaagcgcctgtcggcctccagcaccggcagcacacgcagcagccagtctgcgtcctccttggaggtggcagggccgggccgggaacccctggagctggaagttgctgtggaggccctggcacggctgcagcagggtgtgagcgccaccgttgcccaccttctggacctggcaggcagcgccggtgcgactgggagctggcgtagcccctctgagccacaggagccgctggtgcaggacctgcaggctgctgtggccgctgtccagagtgccgtccacgagctgttggagtttgcccgcagcgcggtgggcaatgctgcccacacatctgaccgtgccctgcatgccaagcttagccggcagctgcagaagatggaggacgtgcaccagacgctggtggcacatggtcaggccctcgacgctggccggggaggctctggagccacccttgaggacctggaccggctggtggcctgctcgcgggctgtgcccgaggacgccaagcagctggcctccttcctgcacggcaatgcctcactgctcttcagacggaccaaggccactgccccggggcctgaggggggtggcaccctgcaccccaaccccactgacaagaccagcagcatccagtcacgacccctgccctcaccccctaagttcacctcccaggactcgccagatgggcagtacgagaacagcgaggggggctggatggaggactatgactacgtccacctacaggggaaggaggagtttgagaagacccagaaggagctgctggaaaagggcagcatcacgcggcagggcaagagccagctggagttgcagcagctgaagcagtttgaacgactggaacaggaggtgtcacggcccatagaccacgacctggccaactggacgccagcccaacccctggccccggggcgaacaggcggcctggggccctcggaccggcagctgctgctcttctacctggagcagtgtgaggccaacctgaccacactgaccaacgccgtggacgccttctttaccgccgtggccaccaaccagccgcccaagatctttgtggcgcacagcaagttcgtcatcctcagcgcccacaagctggtgttcatcggggacacactgtcacggcaggccaaggctgctgacgtgcgcagccaggtgacccactacagcaacctgctgtgcgacctcctgcgcggcatcgtggccaccaccaaggccgctgccttgcagtacccatcgccttccgcggcccaggacatggtggagagggtcaaggagctgggccacagcacccagcagttccgccgcgtcctaggccagctggcagccgcctgagggtggtgaccccaggagggaggcaggggaggggtgcggcggtcccagctccctggctcccatgtcaagagtcgctgtgccacaggcttagggacaggaccccagctctgcgtcggtcctggtgccctggatgcccaggaatctgtatatatttatggccgggcagggtgtggggccatgcctcctcaggagccgaagcccaggggccggccagtggccttccccagcatgcaccacgggcccgggttgggtcaccagacggggctggagtgtgagggtcctgcagcctgcaggacctcgtgccaccccgagggctgagcctggtcccacgagggtgccgtgtcccctgacagggccagtgcagtttggtgtgtcctccgccttaccaggagaagaacctgaagaactatttttcgttattggttttccaatcatttgactaagagtctccatttaaataaagtttttaaaaggaagagca

SEQ ID NO: 180702 - DNA, 2613 bp, Artificial Sequence
  derived and/or modified sequence
atgaaccacctgaacgtgctggccaaggccctgtacgacaacgtggccgagagccccgacgagctgagcttcagaaagggcgacatcatgaccgtgctggagcaggacacccagggcctggacggctggtggctgtgcagcctgcacggcagacagggcatcgtgcccggcaacagactgaagatcctggtgggcatgtacgacaagaagcccgccggccccggccccggcccccccgccacccccgcccagccccagcccggcctgcacgcccccgccccccccgccagccagtacacccccatgctgcccaacacctaccagccccagcccgacagcgtgtacctggtgcccacccccagcaaggcccagcagggcctgtaccaggtgcccggccccagcccccagttccagagcccccccgccaagcagaccagcaccttcagcaagcagaccccccaccaccccttccccagccccgccaccgacctgtaccaggtgccccccggccccggcggccccgcccaggacatctaccaggtgccccccagcgccggcatgggccacgacatctaccaggtgccccccagcatggacaccagaagctgggagggcaccaagccccccgccaaggtggtggtgcccaccagagtgggccagggctacgtgtacgaggccgcccagcccgagcaggacgagtacgacatccccagacacctgctggcccccggcccccaggacatctacgacgtgccccccgtgagaggcctgctgcccagccagtacggccaggaggtgtacgacaccccccccatggccgtgaagggccccaacggcagagaccccctgctggaggtgtacgacgtgccccccagcgtggagaagggcctgccccccagcaaccaccacgccgtgtacgacgtgccccccagcgtgagcaaggacgtgcccgacggccccctgctgagagaggagacctacgacgtgccccccgccttcgccaaggccaagcccttcgaccccgccagaacccccctggtgctggccgcccccccccccgacagcccccccgccgaggacgtgtacgacgtgcccccccccgcccccgacctgtacgacgtgccccccggcctgagaagacccggccccggcaccctgtacgacgtgcccagagagagagtgctgccccccgaggtggccgacggcggcgtggtggacagcggcgtgtacgccgtgcccccccccgccgagagagaggcccccgccgagggcaagagactgagcgccagcagcaccggcagcaccagaagcagccagagcgccagcagcctggaggtggccggccccggcagagagcccctggagctggaggtggccgtggaggccctggccagactgcagcagggcgtgagcgccaccgtggcccacctgctggacctggccggcagcgccggcgccaccggcagctggagaagccccagcgagccccaggagcccctggtgcaggacctgcaggccgccgtggccgccgtgcagagcgccgtgcacgagctgctggagttcgccagaagcgccgtgggcaacgccgcccacaccagcgacagagccctgcacgccaagctgagcagacagctgcagaagatggaggacgtgcaccagaccctggtggcccacggccaggccctggacgccggcagaggcggcagcggcgccaccctggaggacctggacagactggtggcctgcagcagagccgtgcccgaggacgccaagcagctggccagcttcctgcacggcaacgccagcctgctgttcagaagaaccaaggccaccgcccccggccccgagggcggcggcaccctgcaccccaaccccaccgacaagaccagcagcatccagagcagacccctgcccagcccccccaagttcaccagccaggacagccccgacggccagtacgagaacagcgagggcggctggatggaggactacgactacgtgcacctgcagggcaaggaggagttcgagaagacccagaaggagctgctggagaagggcagcatcaccagacagggcaagagccagctggagctgcagcagctgaagcagttcgagagactggagcaggaggtgagcagacccatcgaccacgacctggccaactggacccccgcccagcccctggcccccggcagaaccggcggcctgggccccagcgacagacagctgctgctgttctacctggagcagtgcgaggccaacctgaccaccctgaccaacgccgtggacgccttcttcaccgccgtggccaccaaccagccccccaagatcttcgtggcccacagcaagttcgtgatcctgagcgcccacaagctggtgttcatcggcgacaccctgagcagacaggccaaggccgccgacgtgagaagccaggtgacccactacagcaacctgctgtgcgacctgctgagaggcatcgtggccaccaccaaggccgccgccctgcagtaccccagccccagcgccgcccaggacatggtggagagagtgaaggagctgggccacagcacccagcagttcagaagagtgctgggccagctggccgccgcctag

SEQ ID NO: 180703 - RNA, 2613 nt, Artificial Sequence
  derived and/or modified sequence
augaaucacuugaaugugcuggcuaaggcccucuacgauaauguggcagaaucgcccgaugaguuaucuuuucgcaaaggagauauaaugaccguucucgagcaggacacccaaggguuagacggaugguggcuuugcucccuucauggaaggcagggaaucgucccaggaaaucguuuaaagauucuagugggcauguaugauaagaagccugccgggccgggaccagguccacccgccaccccagcucaaccacaacccggccuccacgcgcccgcgccucccgcuagucaguauacuccaaugcuccccaacacauaccaaccccagccugauucuguauaucuggucccaacccccagcaaggcucaacagggccuuuaucaggucccugguccgaguccccaguuucagucuccaccggcuaaacaaacaucuacuuucucuaaacagaccccacaucauccauuccccucgcccgcaacugaccuguaucaagucccaccagggccuggaggaccagcucaggauauauaucagguaccaccaucugccgggaugggccaugacaucuaccaggucccuccgagcauggacacucgaucuugggaagggacaaagccaccugcaaagguggucguacccaccaggguggggcaaggguauguuuaugaggcugcccagcccgaacaggaugaauacgacaucccucgucacuuacuggcuccaggcccacaggauauauacgacgugccucccguacgcggacuccuccccucccaauacgggcaggaaguguacgauaccccaccaauggcagugaaagggccuaacggucgggacccccuacuggaggucuaugacgucccacccucaguggagaaaggcuuaccacccuccaaccaccacgcuguguacgacguaccccccucagugucuaaagaugucccugauggaccgcugcugagggaggaaacuuacgacguuccucccgccuucgcuaaggcuaagccauuugaccccgccaggacaccccucguccuugcugccccuccucccgacucucccccagcagaggaugucuacgacguucccccgccugcgccggaccucuaugaugugccccccgggcuuaggcgcccgggccccggcacucuguaugacgugccucgugagcgcgucuugccaccugaaguagcagacggcggcgugguugacucuggugucuaugcugucccuccucccgcugaaagagaggccccagcagagggcaaaaggcuguccgccucaucuacgggcaguacccgaucaucucaauccgccucuucucuugaaguggcagggccaggacgggaaccacucgaauuggagguggccguggaggcccuugcccggcugcagcagggggugucagcuacaguggcucaucuacuggaucuagccgguagugccggagcaaccggaagcuggaggucucccucugaaccucaggagccacugguucaagacuugcaggcugccgucgccgcuguccagagugccguucacgaacuguuagaguuugcacgaucggccgugggaaacgcagcacacaccagugauagggccuugcaugcuaagcuuucucgacaacuccagaaaauggaagacguccaccagaccuugguagcccauggacaggcuuuggaugcugggcggggugguaguggggcaacccuugaagaccuugaccgguugguagcuugcagucgggccgucccggaagacgccaagcaacuggcgaguuuucugcacggcaacgcaagccuacuauucagacggacuaaagcuacagcaccaggcccggagggagguggaacucuccauccuaauccgacugacaaaacuuccucaauucaaucuagaccacugccuucucccccuaaguuuacaucucaggauagucccgauggucaguacgagaauagcgaaggagguuggauggaggauuacgauuaugugcaccugcagggcaaggaagaauucgagaagacccagaaagagcugcuggagaaaggaaguaucacccgacaagguaagagucaguuagaacugcagcaguuaaaacaguuugagagauuggaacaggaaguaucuaggccuauugaccacgacuuggcgaauuggacaccggcgcagccauuggcacccgggcguacuggcggccucggcccuucagauaggcagcugcuacuguuuuaccucgaacaaugcgaggcuaauuugacaacccuaacuaaugccgucgaugcauucuucacggccguggcaacuaaccagccaccuaaaaucuucguggcacacucgaaguuuguaauucugucagcccauaaacugguguuuaucggggacacccucucuaggcaagcaaaggcugccgacguccguucccaaguaacacacuauagcaaccucuugugcgaucuacuucguggcauaguagcuacuacgaaagcugccgcgcuucaguaccccaguccaagcgccgcgcaagauaugguagagcguguuaaggaacuggggcacucaacucaacaauuuaggcgcguguugggccaacuggcugcagccuag

SEQ ID NO: 180704 - RNA, 2613 nt, Artificial Sequence
  derived and/or modified sequence
augaaccacuugaaugugcucgcuaaggcucuauaugauaauguggccgagucacccgaugaacugucuuuucgaaagggcgacaucaugacagugcuugaacaggauacccaaggacuagauggauggugguuaugcucucugcacgggcgucaggggauuguucccgggaauagguugaaaauccucguuggcauguacgauaaaaagccugccgguccagggccaggaccuccugcaacuccugcgcagccgcaaccaggccugcaugcaccugcccccccagcuucccaguauaccccaaugcucccaaacacauaucaaccccaaccagauagugucuaucuaguuccuacucccuccaaggcucagcaaggccuguaccagguuccgggcccaucuccacaauuccaaagcccuccagccaaacaaaccucaaccuuuaguaaacagaccccccaccacccauuucccucccccgccacugaucuguaucaggugccuccuggcccgggaggccccgcccaagacaucuaucaagugccucccucugcugguaugggacacgacaucuaccaggugccaccaucaauggauacucgaaguugggagggcacuaaaccaccagcaaagguggucgugccuacaagaguaggacaggguuauguguaugaggcagcccagcccgagcaagaugaguacgauauaccacgucaccuucuggccccagguccacaggacauauacgacguaccuccagucagaggccuguuaccaucccaauacggccaggaagucuaugacacccccccuauggcgguuaaaggccccaacgggcgugaccccuuauuggaaguuuaugauguaccucccucaguggaaaagggccucccuccgucaaaccaucacgcuguguaugacgugccucccagcguguccaaagauguccccgaugggccacugcugcgggaggaaacuuaugacguucccccggcauuugcuaaagccaaaccauuugauccugcuagaaccccccucgugcucgcugcucccccucccgacucccccccagccgaggauguguaugaugugccgcccccagccccagaucuguaugacguuccaccugggcugcgccgaccuggaccagggacccuguacgacguuccgcgcgaacgagugcuccccccggaggucgccgacgggggaguggucgacaguggaguguacgccguaccaccuccugccgagcgggaagccccugccgagggaaaaagacuuagcgcaucuucaacgggcucuacacguagcucacagucugccaguuccuuagaaguugcaggccccggucgggagcccuuggagcuugagguggcugucgaagcucuggcccgauugcaacagggaguguccgccacuguggcucaucugcucgaccuugcugguuccgccggagccaccggcucguggagaagccccuccgaaccccaggaaccauuagugcaagauuuacaagcagcuguggccgcugugcagagcgccgugcaugaacuccuggaguucgcucggagugccguugguaacgccgcucacaccucagauagagcccuccacgccaaacugucacggcaauuacagaagauggaggacguccaccagacgcuuguagcccacggccaagcacucgacgcuggacggggugguuccggggcuacuuuggaagaucuggacagacucguugccugcaguagggcaguaccugaagaugcuaaacaacuugccagcuuucugcacggcaacgcaagccuacuauucagacggacuaaagcuacagcaccaggcccggagggagguggaacucuccauccuaauccgacugacaaaacuuccucaauucaaucuagaccacugccuucucccccuaaguuuacaucucaggauagucccgauggucaguacgagaauagcgaaggagguuggauggaggauuacgauuaugugcaccugcagggcaaggaagaauucgagaagacccagaaagagcugcuggagaaaggaaguaucacccgacaagguaagagucaguuagaacugcagcagcuuaaacaauuugaaagacucgagcaggaaguaucccgacccauugaccacgaccuagccaacuggacaccugcucagccccucgcuccuggacggaccggaggccuagggcccagugaccgacaguuguugcuuuuuuaccuggaacagugugaagcaaaccugacaacucucaccaacgcgguggaugcauuuuucacagcaguggcaacuaaucagcccccaaaaaucuucguggcacacagcaaauuuguaaucuugagcgcacacaaguuggucuuuaucggcgacacccuuucuagacaagcuaaagccgcagacgugaggagccaaguuacccacuauucaaaucuucugugugaucugcuacgcgguaucgucgccacaaccaaggcagccgcccuucaguacccgagcccuagcgcagcucaggauaugguggaacgaguaaaggaguugggccauucuacacaacaguuccgacggguguugggucagcucgcugcugccuag

SEQ ID NO: 180705 - protein, 940 aa, Artificial Sequence
  derived and/or modified sequence
MNRIRKFFRGSGRVLAFIFVASVIWLLFDMAALRLSFSEINTRVIKEDIVRRERIGFRVQPDQGKIFYSSIKEMKPPLRGHGKGAWGKENVRKTEESVLKVEVDLDQTQRERKMQNALGRGKVVPLWHPAHLQTLPVTPNKQKTDGRGTKPEASSHQGTPKQTTAQGAPKTSFIAAKGTQVVKISVHMGRVSLKQEPRKSHSPSSDTSKLAAERDLNVTISLSTDRPKQRSQAVANERAHPASTAVPKSGEAMALNKTKTQSKEVNANKHKANTSLPFPKFTVNSNRLRKQSINETPLGSLSKDDGARGAHGKKLNFSESHLVIITKEEEQKADPKEVSNSKTKTIFPKVLGKSQSKHISRNRSEMSSSSLAPHRVPLSQTNHALTGGLEPAKINITAKAPSTEYNQSHIKALLPEDSGTHQVLRIDVTLSPRDPKAPGQFGRPVVVPHGKEKEAERRWKEGNFNVYLSDLIPVDRAIEDTRPAGCAEQLVHNNLPTTSVIMCFVDEVWSTLLRSVHSVINRSPPHLIKEILLVDDFSTKDYLKDNLDKYMSQFPKVRILRLKERHGLIRARLAGAQNATGDVLTFLDSHVECNVGWLEPLLERVYLSRKKVACPVIEVINDKDMSYMTVDNFQRGIFVWPMNFGWRTIPPDVIAKNRIKETDTIRCPVMAGGLFSIDKSYFFELGTYDPGLDVWGGENMELSFKVWMCGGEIEIIPCSRVGHIFRNDNPYSFPKDRMKTVERNLVRVAEVWLDEYKELFYGHGDHLIDQGLDVGNLTQQRELRKKLKCKSFKWYLENVFPDLRAPIVRASGVLINVALGKCISIENTTVILEDCDGSKELQQFNYTWLRLIKCGEWCIAPIPDKGAVRLHPCDNRNKGLKWLHKSTSVFHPELVNHIVFENNQQLLCLEGNFSQKILKVAACDPVKPYQKWKFEKYYEA

SEQ ID NO: 180706 - DNA, 2823 bp, Artificial Sequence
  derived and/or modified sequence
atgaacagaatcagaaagttcttcagaggcagcggcagagtgctggccttcatcttcgtggccagcgtgatctggctgctgttcgacatggccgccctgagactgagcttcagcgagatcaacaccagagtgatcaaggaggacatcgtgagaagagagagaatcggcttcagagtgcagcccgaccagggcaagatcttctacagcagcatcaaggagatgaagccccccctgagaggccacggcaagggcgcctggggcaaggagaacgtgagaaagaccgaggagagcgtgctgaaggtggaggtggacctggaccagacccagagagagagaaagatgcagaacgccctgggcagaggcaaggtggtgcccctgtggcaccccgcccacctgcagaccctgcccgtgacccccaacaagcagaagaccgacggcagaggcaccaagcccgaggccagcagccaccagggcacccccaagcagaccaccgcccagggcgcccccaagaccagcttcatcgccgccaagggcacccaggtggtgaagatcagcgtgcacatgggcagagtgagcctgaagcaggagcccagaaagagccacagccccagcagcgacaccagcaagctggccgccgagagagacctgaacgtgaccatcagcctgagcaccgacagacccaagcagagaagccaggccgtggccaacgagagagcccaccccgccagcaccgccgtgcccaagagcggcgaggccatggccctgaacaagaccaagacccagagcaaggaggtgaacgccaacaagcacaaggccaacaccagcctgcccttccccaagttcaccgtgaacagcaacagactgagaaagcagagcatcaacgagacccccctgggcagcctgagcaaggacgacggcgccagaggcgcccacggcaagaagctgaacttcagcgagagccacctggtgatcatcaccaaggaggaggagcagaaggccgaccccaaggaggtgagcaacagcaagaccaagaccatcttccccaaggtgctgggcaagagccagagcaagcacatcagcagaaacagaagcgagatgagcagcagcagcctggccccccacagagtgcccctgagccagaccaaccacgccctgaccggcggcctggagcccgccaagatcaacatcaccgccaaggcccccagcaccgagtacaaccagagccacatcaaggccctgctgcccgaggacagcggcacccaccaggtgctgagaatcgacgtgaccctgagccccagagaccccaaggcccccggccagttcggcagacccgtggtggtgccccacggcaaggagaaggaggccgagagaagatggaaggagggcaacttcaacgtgtacctgagcgacctgatccccgtggacagagccatcgaggacaccagacccgccggctgcgccgagcagctggtgcacaacaacctgcccaccaccagcgtgatcatgtgcttcgtggacgaggtgtggagcaccctgctgagaagcgtgcacagcgtgatcaacagaagccccccccacctgatcaaggagatcctgctggtggacgacttcagcaccaaggactacctgaaggacaacctggacaagtacatgagccagttccccaaggtgagaatcctgagactgaaggagagacacggcctgatcagagccagactggccggcgcccagaacgccaccggcgacgtgctgaccttcctggacagccacgtggagtgcaacgtgggctggctggagcccctgctggagagagtgtacctgagcagaaagaaggtggcctgccccgtgatcgaggtgatcaacgacaaggacatgagctacatgaccgtggacaacttccagagaggcatcttcgtgtggcccatgaacttcggctggagaaccatcccccccgacgtgatcgccaagaacagaatcaaggagaccgacaccatcagatgccccgtgatggccggcggcctgttcagcatcgacaagagctacttcttcgagctgggcacctacgaccccggcctggacgtgtggggcggcgagaacatggagctgagcttcaaggtgtggatgtgcggcggcgagatcgagatcatcccctgcagcagagtgggccacatcttcagaaacgacaacccctacagcttccccaaggacagaatgaagaccgtggagagaaacctggtgagagtggccgaggtgtggctggacgagtacaaggagctgttctacggccacggcgaccacctgatcgaccagggcctggacgtgggcaacctgacccagcagagagagctgagaaagaagctgaagtgcaagagcttcaagtggtacctggagaacgtgttccccgacctgagagcccccatcgtgagagccagcggcgtgctgatcaacgtggccctgggcaagtgcatcagcatcgagaacaccaccgtgatcctggaggactgcgacggcagcaaggagctgcagcagttcaactacacctggctgagactgatcaagtgcggcgagtggtgcatcgcccccatccccgacaagggcgccgtgagactgcacccctgcgacaacagaaacaagggcctgaagtggctgcacaagagcaccagcgtgttccaccccgagctggtgaaccacatcgtgttcgagaacaaccagcagctgctgtgcctggagggcaacttcagccagaagatcctgaaggtggccgcctgcgaccccgtgaagccctaccagaagtggaagttcgagaagtactacgaggcctag

SEQ ID NO: 180707 - DNA, 2823 bp, Artificial Sequence
  derived and/or modified sequence
atgaaccggatccgaaagttctttcgcggatctggaagagtccttgcctttatttttgtggcctctgtgatctggctgcttttcgacatggctgccttgaggctcagttttagcgaaatcaatacgagggtgattaaagaagatatcgtaaggcgagagagaataggatttcgagtccagcccgatcaaggaaagatattctactccagtattaaggagatgaagccaccactaaggggacatgggaaaggggcttggggcaaagagaacgtgcgcaagacggaagaatccgtactgaaggttgaggtcgacttggaccaaactcaaagggaacggaaaatgcagaatgccttaggaaggggcaaggtggtaccgctctggcatcctgcccacctgcagacgctgccggttacgccgaacaaacagaaaacagacgggcgcgggactaaaccagaagcatcatcccaccagggtactcctaagcagaccacagcccaaggggcaccaaagacaagctttatcgctgccaagggtacccaggtggtcaagatttccgtgcatatgggaagagtgtccttgaagcaggagccacggaagtcgcattcaccttcttccgataccagcaaactcgccgcggagcgtgacctcaatgtgacgatctcattgtctacggataggcctaaacagcgaagccaagcggtagccaatgagcgggctcaccctgcctccacagccgtccccaagagcggcgaggctatggcactgaataagacaaaaacccagtctaaagaagttaacgctaacaaacacaaagcaaatacctcccttccatttccgaagtttacagttaactctaatcgactacgcaaacaatccatcaatgaaactcccctgggatcattgagtaaggacgacggagcccggggggcacacggaaaaaaactgaactttagtgaatcacacctggtcattatcaccaaggaggaagagcagaaagccgatcctaaagaagtgtccaactcgaagaccaagactatttttccgaaggtgctgggaaagagccaatctaagcacatttcccggaatcgaagcgagatgagttccagttctttagcgccacatagagtcccgcttagtcagactaaccatgctctgacaggagggctggaacccgcgaaaatcaacatcacagcgaaggcgccaagtactgagtacaaccaatcccacatcaaggcccttctccccgaagactccggtacccaccaggttttaagaattgatgtgactctgtcccctcgcgacccaaaagctccaggccagttcggccgccctgtggtggtcccacacggcaaagaaaaggaggccgagaggcggtggaaggaaggtaatttcaacgtgtatctgtccgacctgattccagttgacagagctattgaagacacccgccccgctgggtgtgctgagcagctcgtgcataataacctccctaccacatcagtcatcatgtgctttgtcgacgaagtatggagcacacttttgcgctcagttcattcagtgatcaaccgttctccaccccatctgataaaggaaattcttctggttgacgacttttcaacgaaagattatttgaaagataatctggataagtacatgtcgcagtttcccaaagtgagaattttaaggttgaaggagcgccacgggctgatcagagctagactggccggcgcacagaatgcaaccggggacgttctgaccttcctcgatagtcacgtcgaatgcaacgttgggtggcttgaaccactactggagagggtgtacctttcccgaaaaaaagtcgcctgcccggttatcgaggttattaatgataaagatatgagttatatgactgttgacaactttcaaagggggatcttcgtgtggccaatgaacttcggatggagaactatcccccctgatgtgatcgctaagaaccggattaaggagacagacacgattagatgccccgtgatggcggggggcctcttcagcattgataaaagctacttctttgagctgggaacgtacgatcccgggttggatgtttggggcggcgagaatatggagttatccttcaaggtatggatgtgtggcggtgagatcgagataatcccatgttctagggtcgggcacatctttagaaacgacaatccatactccttccctaaagacagaatgaagacagttgagcgcaacctcgtgagggtggccgaggtgtggttggacgaatataaagaactattctacggccacggggaccatctcatagaccagggactggatgtcgggaatctgacacagcagcgagaactgcggaagaagctcaagtgtaagagcttcaaatggtatctggaaaacgtattcccagatcttcgggcaccaatcgtccgagctagtggtgtgctgatcaatgttgcactaggcaaatgcataagtattgagaataccaccgtgatcctggaagactgtgatggcagtaaagaacttcagcaattcaactatacctggctaaggctgattaaatgcggcgagtggtgcattgctccaatcccagacaaaggagctgttagattgcatccctgtgacaatcggaataaaggcctcaaatggctgcataagtcaacgagcgtgttccaccccgaacttgtgaaccatatagtgtttgagaacaaccaacaactgctttgcctggaagggaatttttctcagaagatcctgaaagtggcagcatgtgaccctgtgaaaccataccagaagtggaagtttgaaaaatattatgaggcctag

SEQ ID NO: 180708 - DNA, 2823 bp, Artificial Sequence
  derived and/or modified sequence
atgaaccgcatcaggaagttcttccggggcagcggccgggtgctggccttcatctttgtggccagcgtcatctggctgctgtttgacatggccgccctgcggctgtccttcagcgagatcaacaccagggtcatcaaggaggacatcgtgagaagagaaagaattggcttccgggtgcagcctgaccagggcaagatcttctacagcagcatcaaggagatgaagccacccctgcggggccatggaaaaggagcctggggcaaggaaaatgtgaggaagacagaggagagcgtgctgaaggtggaggtggacctggaccagacccagcgggagaggaagatgcagaatgccctgggccggggcaaggtggtgcccctgtggcacccagcccacctgcagaccctgcctgtgacccccaacaagcagaagacagatggccggggcaccaagccagaggccagcagccaccagggcacccccaagcagaccacagcccagggcgcccccaagaccagcttcatcgccgccaagggcacccaggtggtgaagatctctgtgcacatgggccgggtgtccctgaagcaggagcccaggaagagccacagccccagcagtgacaccagcaagctggccgctgagcgggacctgaatgtgaccatcagcctgagcacagaccggcccaagcagaggagccaggccgtggccaatgaaagagcccacccagccagcacagctgtgcccaagtctggagaggccatggccctgaacaagaccaagacccagagcaaggaggtgaatgccaacaagcacaaggccaacaccagcctgcccttccccaagttcaccgtgaacagcaaccggctgaggaagcagagcatcaatgagacccccctgggcagcctgagcaaggatgatggagcccggggggcccacggcaagaagctgaacttcagcgagagccacctggtgatcatcaccaaggaggaggagcagaaggctgaccccaaggaggtgagcaacagcaagaccaagaccatcttccccaaggtgctgggcaagagccagagcaagcacatcagcaggaacagaagtgagatgagcagcagcagcctggccccccaccgggtgcccctgagccagaccaaccacgccctgaccggcggcctggagcccgccaagatcaacatcacagccaaggcccccagcacagagtacaaccagagccacatcaaggccctgctgcctgaggacagcggcacccaccaggtgctgagaattgatgtgaccctgagcccccgggaccccaaggcccctggccagtttggccggcctgtggtggtgccccacggcaaggagaaggaggccgagcggcgctggaaggagggcaacttcaacgtgtacctgagtgacctgatccctgtggaccgggccatcgaggacaccaggcctgctggctgtgccgagcagctggtgcacaacaacctgcccaccaccagcgtcatcatgtgctttgtggatgaggtgtggagcaccctgctgcggtctgtgcacagcgtcatcaacagaagccccccccacctgatcaaggagatcctgctggtggatgacttcagcaccaaggactacctgaaggacaacctggacaagtacatgagccagttccccaaggtgcgcatcctgcggctgaaggagcggcacggcctcatccgggcccggctggccggggcccagaatgccactggagatgtgctgaccttcctggacagccacgtggagtgcaatgtgggctggctggagcccctgctggagcgggtgtacctgagcaggaagaaggtggcctgccctgtgattgaagtcatcaatgacaaggacatgagctacatgacagtggacaacttccagaggggcatctttgtgtggcccatgaactttggctggaggaccatccccccagatgtgattgccaagaaccgcatcaaggagacagacaccatccgctgccctgtgatggccggcggcctcttcagcattgacaagagctacttctttgagctgggcacctatgaccccggcctggatgtgtggggcggggagaacatggagctgtccttcaaggtgtggatgtgtggcggggagattgagatcatcccctgcagccgggtgggccacatcttcagaaatgacaacccctacagcttccccaaggacaggatgaagacagtggagaggaacctggtgcgggtggccgaggtgtggctggatgagtacaaggagctgttctacggccatggagaccacctgattgaccagggcctggatgtgggcaacctgacccagcagcgggagctgaggaagaagctgaagtgcaagagcttcaagtggtacctggagaatgtgtttcctgacctgcgggcccccatcgtgcgggccagcggcgtgctgatcaacgtggccctgggcaagtgcatcagcattgagaacaccaccgtcatcctggaggactgtgatggcagcaaggagctgcagcagttcaactacacctggctgcggctcatcaagtgtggggagtggtgcatcgcccccatcccagacaagggagctgtgcggctgcacccctgtgacaacagaaacaagggcctgaagtggctgcacaagagcaccagcgtcttccaccctgagctggtgaaccacatcgtgtttgagaacaaccagcagctgctgtgcctggagggcaacttcagccagaagatcctgaaggtggccgcctgtgaccctgtgaagccctaccagaagtggaagtttgagaagtactatgaggcctag

SEQ ID NO: 180709 - DNA, 2823 bp, Artificial Sequence
  derived and/or modified sequence
atgaaccggatccggaagttcttccggggcagcggccgggtgctggcttttatattcgtggcctccgttatctggcttttatttgacatggcggcactacggctctcctttagcgagataaatacccgcgtgattaaggaagatattgtgaggcgagagagaatcggcttccgcgtacagccagaccagggcaagatattctatagctcaatcaaggagatgaagcctcctttaagaggccacggaaagggtgcatgggggaaggaaaacgtgagaaagactgaggagtctgttcttaaagtcgaagtggacctggatcaaacacagagggagcgcaaaatgcagaatgccttaggacgcggcaaagtggtgcccctgtggcatcctgcgcacctgcagactctacccgtcacgcccaacaagcagaagactgatgggagaggaactaaaccagaagcgagcagccatcagggaacccccaagcagacaacagcccagggggcaccaaagacgagcttcatcgctgcaaaaggcactcaagtggttaaaattagtgttcatatgggaagagttagcctgaagcaggagcccaggaagtcccattcgccttcttcagatacctctaagttagccgccgagcgggatctgaatgtgaccatttctctttcaacagatcggcccaaacagaggtcacaggctgtcgctaacgagagagcccatcccgcatccaccgccgtgcccaagtctggggaggctatggcccttaataaaacaaaaacccagtctaaggaggtgaatgcaaacaagcataaagcaaacaccagcctcccttttccgaaatttacagtcaactccaacaggttacgtaaacagtcaattaatgagaccccattaggatcattatccaaggatgatggggcaaggggggcgcatggtaagaaacttaacttctctgagagtcatctggtgattattacgaaggaagaagagcaaaaggcagatccaaaggaagttagcaactccaagacaaagacaatctttccgaaagtcctcggcaagtcccagtcaaagcacattagtagaaacagaagtgagatgtctagttctagccttgcccctcacagggtcccactctcgcagactaaccacgccctcaccggggggctggagccggcaaaaatcaatatcactgccaaagctcctagcaccgaatacaaccagtctcacattaaagctctactgccggaggacagtggcacacaccaggtcctacgaatcgacgtaaccctgagcccacgagatccaaaagctccgggtcagttcggccgcccagtggtggtgcctcacggaaaggaaaaagaagccgagagaaggtggaaagagggcaacttcaatgtctatctgtccgacctaattccagtggacagagccatcgaagacaccaggcccgcaggatgtgccgaacaacttgtgcacaacaatctaccgaccacctccgtgatcatgtgcttcgtagacgaggtgtggagtactctgctgcggagtgtgcacagcgtaatcaatcgtagtccacctcatcttattaaggagatcctccttgtggatgatttttccaccaaggattacttgaaagataatctggataagtacatgtcccagtttccgaaggttcgcatcctaaggctcaaagagcggcacgggctcatcagagctcgcctagccggagcacagaatgcaactggtgatgtcttgacttttctggattctcatgtcgagtgcaacgtgggatggctggaaccgttgctcgagcgggtttacctcagccggaagaaagtcgcttgccccgtgatcgaagtaatcaacgacaaggacatgtcatacatgaccgtcgacaatttccaacgtggaatatttgtgtggccgatgaacttcgggtggcgcacaattccccccgacgtgattgctaagaaccgcattaaagaaacggatactatccgctgcccggttatggccggagggctgttctctatagataaatcctacttttttgagttgggaacatacgatccaggcttggacgtgtggggcggtgagaatatggaattatcatttaaagtctggatgtgtggcggggagatcgagataataccatgctctagggttggccatattttcaggaatgacaacccctactccttccccaaagaccgaatgaagaccgttgaaaggaacctggtgagagtggcagaagtgtggctggatgagtacaaggagctgttctacggtcacggagaccatttgatcgaccaaggattggatgtgggcaatctaacccagcagcgcgagctccggaaaaaactgaagtgtaagagttttaaatggtatctagaaaatgtgttcccggacttgagggcgcccatcgtccgggcatcaggcgttttgataaacgtggctctgggcaagtgcatcagtatcgaaaatacgacagtgatcctggaggactgtgacgggagtaaagagctgcagcagttcaattatacttggctgagactcattaagtgtggcgagtggtgcattgcgccaatcccagacaaaggagcagtgcggcttcatccatgcgacaaccgcaacaagggcctgaagtggctccacaaaagtacttcagtgtttcacccagaactggtgaatcatatcgtcttcgagaataatcagcagctcctgtgcctcgagggcaatttcagtcagaagatactgaaggtagctgcctgcgaccccgtcaagccttatcagaagtggaagttcgaaaaatactatgaagcctag

SEQ ID NO: 180710 - DNA, 2823 bp, Artificial Sequence
  derived and/or modified sequence
atgaatcggatccgtaaattcttccggggatcaggtagagtgctggcctttatcttcgtggcaagtgtaatatggctgctcttcgacatggccgctttaagactgtcatttagcgaaatcaacactagagttataaaggaagacatagtgcgacgagagcgtattggcttccgagtgcagcccgatcaggggaagatcttctatagctccatcaaggaaatgaagccgcctctacggggtcacgggaaaggcgcatggggaaaagagaatgtgagaaaaacagaagagagcgtgctgaaagtcgaagtagatttagatcagactcagcgcgagcggaaaatgcagaatgcactcggacgcggaaaagtagtgccactgtggcaccctgcgcacctgcagaccctacctgtaacacccaacaaacagaaaaccgatggtcgcggaacaaaacccgaagcttcatcccaccaaggcacacctaagcaaacgacggcccaaggggcacccaagaccagcttcatcgcagcaaaaggtacacaggtggtgaagatcagtgttcatatgggaagggtgagcctaaaacaggaaccacgaaagtctcactctccctccagtgacacaagcaagcttgccgcagagagagacttgaatgttactatttccctttctacagaccgcccaaagcagagatcccaagctgtggcaaatgagcgcgcacatccagctagcacagccgttccgaagtccggagaggcgatggctctgaacaaaacaaagacccagtccaaggaggtgaacgctaacaagcacaaggctaacacgagtctgccatttcctaagttcaccgtcaacagtaatcgactgcgcaagcagtctatcaatgaaactcccttgggcagcctgtcaaaggacgatggggcaaggggggcacacggaaagaaacttaacttctcagagtcccacctagtgattataacgaaggaagaggaacagaaggcagatcccaaggaggtgagtaattccaaaaccaaaaccatcttccccaaagtgctgggcaagtcgcagagcaagcacatttctaggaaccgcagcgaaatgtcttcgtcctccctggccccacacagggtcccgctctcacagaccaatcacgcccttaccggagggctggaacctgctaaaatcaatatcactgcaaaggccccatccaccgaatacaatcagtcgcacatcaaggctttgctccccgaggactcgggtactcaccaggtgttaagaatcgatgttactcttagccctcgcgacccgaaagcacccggtcaattcggcaggccagtggttgttccacacgggaaggagaaggaagcagagcgtcgatggaaggaaggcaatttcaacgtgtacctaagcgatttgatccctgtggacagggccatcgaagataccagacctgccggttgcgcggagcagctggtccacaacaatctccctacaacgtcagtcatcatgtgtttcgtggacgaagtgtggtccactcttctgcgttccgtgcattctgtcatcaaccggagcccccctcacctcataaaagaaatcctgctcgtggacgatttcagcacaaaggactatttaaaagataatctggataagtatatgtctcagttccctaaagtcaggatactacgccttaaagagagacacggtctcatcagggcccgtcttgcgggagctcaaaacgcgacaggcgacgtgctgacctttctggattcacatgttgaatgtaacgtagggtggctcgagcctctgctggaacgagtgtacctttcaaggaaaaaggtggcttgcccagttatagaggtgattaacgacaaggatatgtcttacatgacagtggacaatttccaacgcggtatttttgtttggccaatgaatttcgggtggagaacaattcctcccgacgtaattgcaaaaaatcgcataaaagagaccgacaccattcggtgtcccgttatggctggagggctgttcagtatagacaaatcctatttctttgaacttggcacttacgaccctggccttgatgtgtggggtggagaaaacatggagttatcatttaaggtttggatgtgcggaggtgaaatcgagataataccctgcagccgagtcgggcacatcttccggaacgataatccctattcattccccaaggatcggatgaagaccgtggagcggaacctggtcagagtcgcagaagtctggttggacgaatataaggagctattctacggtcatggagatcacctcatagaccagggccttgatgtgggtaacctcacccaacagcgggagttgcgcaagaagctcaagtgcaaatcattcaaatggtacctggagaatgtttttccagaccttagagcccctatcgttagagcgagcggcgtcctgatcaacgttgccttaggcaagtgcatatcaatagagaacactactgtgatacttgaggactgtgacggttcaaaagaactccagcaatttaactatacttggcttaggctgatcaagtgcggggaatggtgcatcgcacctattcccgacaagggagcggtccgcctgcatccatgtgataaccggaataagggcttgaagtggttgcacaagagcacatcggtgttccaccccgagttggtaaaccatattgtgttcgagaataaccagcagctgttgtgcctggaggggaacttttcacagaagatactgaaggtcgctgcctgtgatccagtgaagccgtaccagaaatggaagttcgaaaaatattacgaagcatag

SEQ ID NO: 180711 - DNA, 6171 bp, Artificial Sequence
  derived and/or modified sequence
gctgaatgaagttttctgggtaatggcatgaaatgttttccttatgagaagtggtgttgagttacagcgtgcagacggagaacggggaggagagaaacggcagtctcaatctggcccccaccttttcttgggcttgtaggaaggtggacatgggctcccggagacaagacaagtgatatgttgaactgttcggtggctggaatcaactgctcctggagtgacctaaggccagtgtttatcagaacttagccagggccagccaagcaggcacagatgctctgctatgaaatgccacgcaggcagagactgacaagcggtaggaactgagctttccccttggactgctgcttcctgctgtgttcaggggagggggtcactttctggcaactctgctgctgctgctgctgctgctgctacttcagcttcctctccactcaaggtaagcaggctaagggagggcaggctgctagggaaagctttgtaccatgaacaggatccgaaagtttttccgaggaagtgggcgagtcttggcatttatctttgtagcttctgtcatctggctcctctttgacatggcagctctccgcctctcattcagtgagatcaacactcgggtcatcaaggaagacattgtgaggagggagcggataggattcagagttcagccagaccaaggaaaaattttttacagcagcataaaagagatgaaacctcccctaaggggacatgggaaaggggcatggggcaaagagaatgttagaaaaactgaggagagtgtgctcaaggttgaggtggacttggaccaaacccagagggaaagaaaaatgcagaatgccctgggaaggggcaaggttgtgccgttgtggcatcctgcacatctgcagaccctccctgtgactcctaacaagcagaagacagacgggagaggcaccaaacctgaagcctcctctcaccaggggacaccaaagcaaacgacagctcagggggctccaaagacctcattcatagcagcaaaaggaactcaggtagtcaaaatatcagtacacatgggacgtgtcagtttaaaacaggagccccggaagagtcatagtcccagcagtgacacatcaaaactagcagctgaaagggacttgaatgtgaccatcagtcttagtactgatagaccaaagcagcgatcacaggcagtagcaaacgagagggcacaccctgccagcacagcagtgccgaagtctggggaagccatggccttaaacaaaactaagactcagagcaaagaagtcaatgcaaataaacacaaagccaatacgagtcttccttttcctaagttcactgtcaattcaaatcgcttaaggaagcaatctattaatgagacacctttgggaagtttgtcaaaggatgatggagctagaggggctcatgggaagaaactcaatttctctgaaagccatcttgtgattataaccaaagaggaagagcaaaaggcagaccccaaagaggtctctaattctaaaaccaaaacaatatttcctaaagtattgggtaaaagccaaagtaaacacatttccaggaatagaagtgagatgtcttcctcttcacttgctccacatagagtgccactgtcccaaactaaccatgctttaactggagggctagagccagcaaaaatcaacataactgccaaagccccctctacagaatacaaccagagtcatataaaagcccttttacctgaagacagtggaacgcaccaggtgttaagaattgatgtgacactttctccaagggaccccaaagctccagggcagtttgggcgtcctgtagttgtcccccatggaaaggagaaggaggcagaaagaagatggaaagaaggaaacttcaatgtctaccttagcgatttgatcccagtggatagagccattgaagacaccagacctgctggatgtgcagagcagctagttcacaataacctcccaaccaccagtgtcatcatgtgctttgtggatgaagtgtggtccactctcctgagatctgttcacagtgtcatcaatcgctctcctccacacctcatcaaggagattctgctggtagatgacttcagcaccaaagactatctaaaagataatttggataaatacatgtcccagtttccaaaagttcggattcttcgcctcaaagagagacatggcttaataagggccaggctggcaggagcacagaatgcaacaggtgatgtgttgacatttttagattctcatgtggaatgtaacgttggttggttggaacctcttctggaaagagtttatttaagtagaaagaaagtggcctgtccagtaatcgaagtcatcaatgataaggatatgagttacatgacagtggataactttcaaagaggcatctttgtgtggcccatgaactttggttggagaacaattcctccagatgtcattgcaaaaaacagaattaaagaaactgatacaataaggtgccctgtcatggctggtggattgttttctattgacaaaagttacttttttgaacttggaacatacgaccctggccttgatgtttggggtggggaaaatatggagctctcattcaaggtgtggatgtgtggtggtgaaattgagatcattccctgctcccgagtgggccatatattcagaaatgacaatccatattccttccccaaagaccggatgaagacagtggagcggaacttggtgcgggttgccgaggtctggctggatgagtataaggagctgttctatggccacggagaccacctcatcgaccaagggctagatgttggcaacctcacccagcaaagggagctgcgaaagaaactgaagtgcaaaagtttcaaatggtacttggagaatgtctttcctgacttaagggctcccattgtgagagctagtggtgtgcttattaatgtggctttgggtaaatgcatttccattgaaaacactacagtcattctggaagactgcgatgggagcaaagagcttcaacaatttaattacacctggttaagacttattaaatgtggagaatggtgtatagcccccatccctgataaaggagccgtaaggctgcacccttgtgataacagaaacaaagggctaaaatggctgcataaatcaacatcagtctttcatccagaactggtgaatcacattgtttttgaaaacaatcagcaattattatgcttggaaggaaatttttctcaaaagatcctgaaagtagctgcctgtgacccagtgaagccatatcaaaagtggaaatttgaaaaatattatgaagcctgaagtgtaactgatgtttttatatagtaaacccattaaatactgtgaaaataacactgaacttggaaactatatttctcagcggtagtttaaattttcaattttaataacatttgaatggaagattttttataaatcacaatatttggaataccaaaagatgactcaggaaaacagtccaacattggactgaagtccttcttcggaactgggtggcctttgaattgcctgctttccaccctatgctagacctcatcatgcaaatttccctgtgaaagctaacaggtaactggaaatgaagacagaaggacttgagaaagcatgaggatattcccaatgactatgtttggtaataatcagctcttctggcccacaagtaggaatgatcaatgagaacttaacttagtcctttatttggggattttttcatcaaacaaaaatttcttgagttcttatggctagaagacctcagatgcccacagctgtcacgtttgtgaaatccctccagactacatgcatgcttacctaacagtttgaaatagtattgatctactgctggtaaccctgcttgatggcagcattttgatctaaattacataatggtttttcccaatctgaatcagtggaaaaaaatttaagtgaggaagaagaggccttcaaatgcttatttaattctaggtatgaacactatttcagttcattttgtgcttttaaaactacagttttaaagatttatgataccaataacttcctagattcatgtggattttttttaaggcaatgaaaaaaggctggattataacacactgtagtaatcaaaaatgcatttaagcattgaatgcactctagtgcagggccaagtaagaggagttgaaatgagtaaagcagaaatagagctgctgaaagtttcttttatataaaaataataaaatactactttagatatagtagcattcacagggatgaaatatgcgaaaaatgggttctaaaatatttcaaagggaaaatgaagtgaaggaaacatcatgaaaggggaaaggaatgaggtaaacaagtcttaggaagagagttaagaaaaaattccgctggacttggccaaagaaagaaggggatctagtatctctatgaaggaaaaaagagtaaagccctcagtgtgaacccagtgagaacactgacaaatttgggaaaagttaaatactgatttcatccaaataaagcctctaatcttaagcataccaatactttggcataccagaagacaccttagaaatcaggatagcctttgcattcattttggtaagaaaactgatgctgagaggataaattacctaaaaatcttaaaacccaggcaagttagtcaaagaatcaagattagaattcaggtttccagagacagggctcattctaatgcctcaggtcactggcccgaacaaatctgcttcacagaattccttagaaagagatacacaattctttgctgggattgggtccctggaggacaaccatactatattcttgttaatatgttttttctttttttaaatttaaacttttgttcagttgagatgattgtgaaactaggtatctttcattctgactcctagtttaacatttaattttgactcccaatgagttacgtaaaagcaaaactataactaagaatgggaaaaagaactatttctgcacatttgtaacatatttaagatgttttcttcatataattgaaaactgcagatgagtaagagaatgactaggaaatgagatacagttatatgacacataatgatgttttagtcaacaatgaaccacatatttgacattggtcccaaaagattatattaataatatggtatctttagtgtgcttttctatgtttagacacacaaatactcaccatgatgttacaatagcctacagtgttcaatacagtaacatgcacaagtttgtaacctaggagcaacagggattccatatagcctaggtgtgtagtaggctacctacaccatctaggtttgtgtaagtacactctgatattcacacaatgatgaaattgcctaatgacacatttctcagaatgtatttgtgttattaaatgatgcatgactctaattcttttcaaaacagagccatatggggcaagggggatggggggacgcaagtcagttgtcaaaagactaattgagttactgacaaactgaacatgctaggtgcctcatgtaattcttcatgtaactaaaaaatgttgagaggtttttttcccccgggtatataggctctctttttatccgaaaatagtttccacaaagaagtcaactctgttctgaaaaaaaatgaattgcattttgaatacacttatctttgggtatatcaactaaaggaagttggatttttttccttaacagaaacttctgcagtcctctcagttcacatcctttctgactttaccctgacaaacttattatataaagctatatttaaatctatattgtcaatataacaaaggattgtttttgaacatcacaaatttgttcttggatagaattttatacattgcttttcatcatatatttgctcagttactctaagaagcaaggaactgatcactagttgggaatctatatgggcctaaacttgagtgtattgatttattattacatctactaccaacattttcttaagcatagccttctaaattttttcaggagattagaataaaggtatacatgctactcggtcttctggtaattctagtgataaacctttggatgagacaggtcctaatcagcactgaattcttcaataggaggctgtgttacaggagctacagatttttccctggattagcttaggtcattgcctttacttt

SEQ ID NO: 180712 - protein, 516 aa, Artificial Sequence
  derived and/or modified sequence
MGDPSKQDILTIFKRLRSVPTNKVCFDCGAKNPSWASITYGVFLCIDCSGSHRSLGVHLSFIRSTELDSNWSWFQLRCMQVGGNASASSFFHQHGCSTNDTNAKYNSRAAQLYREKIKSLASQATRKHGTDLWLDSCVVPPLSPPPKEEDFFASHVSPEVSDTAWASAIAEPSSLTSRPVETTLENNEGGQEQGPSVEGLNVPTKATLEVSSIIKKKPNQAKKGLGAKKGSLGAQKLANTCFNEIEKQAQAADKMKEQEDLAKVVSKEESIVSSLRLAYKDLEIQMKKDEKMNISGKKNVDSDRLGMGFGNCRSVISHSVTSDMQTIEQESPIMAKPRKKYNDDSDDSYFTSSSSYFDEPVELRSSSFSSWDDSSDSYWKKETSKDTETVLKTTGYSDRPTARRKPDYEPVENTDEAQKKFGNVKAISSDMYFGRQSQADYETRARLERLSASSSISSADLFEEPRKQPAGNYSLSSVLPNAPDMAQFKQGVRSVAGKLSVFANGVVTSIQDRYGS

SEQ ID NO: 180713 - DNA, 1551 bp, Artificial Sequence
  derived and/or modified sequence
atgggggatccatcgaaacaggacatcctcactatcttcaaacgcctgcgatccgttcctacaaacaaggtgtgcttcgattgtggagcgaagaacccaagttgggcatcaattacctatggcgtgtttctatgcatagactgctctgggtcccaccgctcactgggagtccacctgagtttcatcagatccacagaactagactctaattggtcttggttccagcttaggtgcatgcaggttgggggcaacgcgtctgctagcagttttttccatcagcacgggtgttcgactaatgacacaaacgcgaagtacaactctagggccgcacagctgtacagagaaaaaattaaatcattggcaagtcaggcgacacgcaagcatggtactgacctctggctggatagctgcgtcgtgccccccctaagtcctccccctaaggaagaggacttcttcgcatcccatgtgagccccgaggtgagcgataccgcctgggcttcggctattgccgagccctcctctctcacctctcgtcctgttgagactaccctggaaaacaacgaaggaggccaggaacagggacccagtgtagaaggcttgaatgtgcccacaaaagctaccctggaagtgagtagcattatcaagaagaaacccaatcaggccaaaaagggactgggagccaaaaagggcagcctgggtgcacaaaagttagctaacacctgtttcaatgaaattgagaagcaggcccaagccgctgataagatgaaagaacaggaggacctggcaaaggtggtttctaaagaagaaagcattgtgtctagcttgcgccttgcttacaaagacctcgagatccagatgaaaaaggacgaaaagatgaatattagcggcaagaaaaacgttgatagtgacagacttggaatgggttttggcaattgcaggtcagtgatctcacactcagtcactagcgacatgcagacaatcgagcaggaatctccgattatggctaagccccgcaagaagtataatgatgatagtgacgactcttactttacatccagtagttcctacttcgacgagccagttgagctccgctcgagtagctttagctcatgggatgatagctccgactcttattggaaaaaagaaacatctaaggacaccgaaacagtcttgaagacaaccgggtacagcgacaggccgacagcaaggaggaagccagattatgagcctgttgaaaatacagatgaggcccagaagaagttcggcaacgtgaaagctatcagttcagatatgtacttcggtaggcaaagccaggcggactacgaaacccgcgcccggctagaaagactttcggccagttcaagtattagttccgccgatctgttcgaggagcctcggaagcaaccggccgggaattactccctctcctctgtgctgcccaacgccccagatatggcgcagtttaaacagggcgtccgttccgtcgcaggaaaactgtcagtcttcgctaacggggtggtgacctccatccaggataggtacggcagctag

SEQ ID NO: 180714 - DNA, 2857 bp, Artificial Sequence
  derived and/or modified sequence
gggccagcggcgcggctgaagcgagggcggggagggaaagcgagcggcgcctgcgccccggcggtggacgggcccggtcgtgggcggggattggggcggagcctgaccgttacgcgcagccccgcccccgcggcctcgtcgctcctgctgaggcggtagccgcttttcgtcgactcttaccggttggctgggccagctgcgccgcggctcacagctgacgatgggggaccccagcaagcaggacatcttgaccatcttcaagcgcctccgctcggtgcccactaacaaggtgtgttttgattgtggtgccaaaaatcccagctgggcaagcataacctatggagtgttcctttgcattgattgctcagggtcccaccggtcacttggtgttcacttgagttttattcgatctacagagttggattccaactggtcatggtttcagttgcgatgcatgcaagtcggaggaaacgctagtgcatcttccttttttcatcaacatgggtgttccaccaatgacaccaatgccaagtacaacagtcgtgctgctcagctctatagggagaaaatcaaatcgctcgcctctcaagcaacacggaagcatggcactgatctgtggcttgatagttgtgtggttccacctttgtcccctccaccaaaggaggaagatttttttgcctctcacgtttctcctgaggtgagtgacacagcgtgggcatcagcaatagcagaaccatcttctttaacatcaaggcctgtggaaaccactttggaaaataatgaaggtggacaagagcaaggaccaagtgtggaaggtcttaatgtaccaacaaaggctactttagaggtatcctctatcataaaaaagaaaccaaatcaagctaaaaaaggccttggggccaaaaaaggaagtttgggagctcagaaactggcaaacacatgctttaatgaaattgaaaaacaagctcaagctgcggataaaatgaaggagcaggaagacctggccaaggtggtatctaaagaagaatcaattgtttcatcattacgattagcctataaggatcttgaaattcaaatgaagaaagacgaaaagatgaacattagtggcaaaaaaaatgttgactcagacagactcggcatgggatttggaaattgcagaagtgttatttcacattcagtgacttcagatatgcagaccatagagcaggaatcacccattatggcaaaaccaagaaaaaagtataatgatgacagtgacgattcatattttacttccagctcaagttactttgacgagccagtggagttaaggagcagttctttctctagctgggatgacagttcagattcctattggaaaaaagagaccagcaaagatactgaaacagttctgaaaaccacaggctattcagacagacctactgctcgccgcaagccagattatgagccagttgaaaatacagatgaggcccagaagaagtttggcaatgtcaaggccatttcatcagatatgtattttggaagacaatcccaggctgattatgagaccagggcccgcctagagaggctgtcggcaagttcctccataagctcggctgatctgttcgaggagccgaggaagcagccagcagggaactacagcctgtccagtgtgctgcccaacgcccccgacatggcgcagttcaagcagggagtgagatcggttgctggaaaactctccgtctttgctaatggagtcgtgacttcaattcaggatcgctacggttcttaatactgaagtcatgatgtgtatttcctggagaaattcctctttaaatgaacaagtaaccacatctcaggcggcagtgaagtccagatagttttgcagattgttttgctactttttcatatggtatatgtttctgatttttaatatttcttttgagaaattctgagttctgatgtaggagctttcctgtgatttctgtttcacgttccttcctgtcacaccctcctttggcgtctctgtgtatatccttgctttattttcttggaacctttgatttcaacactgagggcctggagacctcggctcctcctgctcctgaaccaggaggcttcatgtgggggaggaggagaggtctccatgtgacacatgggctcagggctgccagaatcagcggatgctggatgggcctgcagaaacaacactcaccacacacacttccttcaaaagaccaaaagtgactggtgtctcgtgtgacagattgcttcatttatgtttctacatagtaaggtgactgccaaataatatttgaagtcatctgtctctttgtaaattattttatatgacctataaatttaaaaatgtttttcagtgagtgcttttaacaaacttaagcttctgccctgccaagggaattaatgttatcttgtgaaaggtgttgctgtttgaattgatgagaaatggaagatgagaactccctaagagttctcataataaatcatctcatcacaaatcaatacggtatacagagttaaagtggaatgaggtaagaagatacagctacagaaaatagttgcgtgtatgggagaacagtcattgtaattgggtagttttgttaataaatatttttaaatcttgcttttcagaaattaccgaatgtgtataaacaaataaagaaaaataatttagctgtgttttagacagcattagaatatattgttcagcacagtaaaatatatttgaaatttgataagccaaaaatgtggttttgaatgaatattttgtgaatctttcttaaaagctcaaatttgtagacttctaaatagaataaacacttgcagcagatggcattgcctacatttttccctgaaa

SEQ ID NO: 180715 - DNA, 1551 bp, Artificial Sequence
  derived and/or modified sequence
atgggagaccccagcaagcaggacatcctgaccatcttcaagaggctgcggtctgtgcccaccaacaaggtgtgctttgactgtggggccaagaaccccagctgggccagcatcacctacggcgtcttcctgtgcatcgactgcagcggcagccacaggagcctgggcgtgcacctgtccttcatccgcagcacagagctggacagcaactggagctggttccagctgcgctgcatgcaggtgggcggcaatgccagcgccagcagcttcttccaccagcacggctgcagcaccaatgacaccaatgccaagtacaacagcagagctgcccagctgtaccgggagaagatcaagagcctggccagccaggccaccaggaagcacggcacagacctgtggctggacagctgtgtggtgccccccctgagccccccacccaaggaggaggacttctttgccagccacgtgtccccagaggtgtctgacacagcctgggccagcgccatcgccgagcccagcagcctgaccagcaggcctgtggagaccaccctggagaacaatgaaggaggccaggagcagggccccagcgtggagggcctgaatgtgcccaccaaggccaccctggaggtgagcagcatcatcaagaagaagcccaaccaggccaagaagggcctgggcgccaagaagggcagcctgggcgcccagaagctggccaacacctgcttcaatgaaattgagaagcaggcccaggccgctgacaagatgaaggagcaggaggacctggccaaggtggtgtccaaggaggagagcatcgtgagcagcctgcggctggcctacaaggacctggagatccagatgaagaaggatgagaagatgaacatcagcggcaagaagaatgtggacagcgaccggctgggcatgggctttggaaactgccgcagcgtcatcagccacagcgtgaccagtgacatgcagaccatcgagcaggagagccccatcatggccaagcccaggaagaagtacaatgatgacagtgatgacagctacttcaccagcagcagcagctactttgatgagcctgtggagctgcggagcagcagcttcagctcctgggatgacagcagtgacagctactggaagaaggagaccagcaaggacacagaaacagtgctgaagaccaccggctacagcgaccggcccacagcccggaggaagccagactatgagcctgtggagaacacagatgaggcccagaagaagtttggaaatgtgaaggccatcagcagtgacatgtacttcggccggcagagccaggccgactatgagacccgggcccggctggagcggctgagcgccagcagcagcatcagcagcgctgacctgtttgaggagcccaggaagcagcctgctggcaactacagcctgagctctgtgctgcccaatgccccagacatggcccagttcaagcagggcgtgcgctctgtggccggcaagctgtctgtgtttgccaacggggtggtgaccagcatccaggacagatatggcagctag

SEQ ID NO: 180716 - DNA, 1551 bp, Artificial Sequence
  derived and/or modified sequence
atgggcgaccccagcaagcaggacatcctgaccatcttcaagcggctcaggtctgtcccgacaaacaaagtgtgctttgactgcggcgccaaaaacccctcctgggcttctattacatatggcgtcttcctctgcatcgattgttcagggtcccatagatcacttggggtacacttgagtttcattcgctccaccgaactcgattccaactggtcctggtttcaactgcggtgtatgcaggttggaggaaatgcatctgcctcaagttttttccaccagcatggttgctcgactaacgataccaacgcgaaatataacagtagggcagctcaattatacagagaaaagattaagagtctggctagccaggcaacccgtaaacacggcaccgacttatggttagactcgtgcgtggtccctccgctctctcctccccccaaagaggaagacttttttgccagtcatgtgtccccagaggttagtgatacagcctgggcttccgctattgctgaaccatcatctctcacaagtagacccgtagaaaccaccttggagaataacgaaggagggcaagagcaaggaccgtcagtggaggggctcaatgttcccactaaggcaacactcgaggtgagctcaatcataaagaaaaagccaaaccaggcgaaaaaggggctcggagcgaaaaaagggagtctcggagctcagaagctagcgaatacatgtttcaacgagatcgaaaagcaggcacaggccgccgacaagatgaaggagcaagaggatttggccaaagtggtctcaaaggaagaatcaatcgtctcgtcactcagactggcatacaaagaccttgagattcagatgaaaaaagacgaaaagatgaacatttctggcaaaaaaaacgttgacagtgatcggttaggcatgggattcgggaactgcaggtcagttatcagtcatagtgtgacaagtgacatgcagaccatcgagcaagagtcacctattatggcgaaaccccggaaaaagtataatgacgacagcgatgactcttattttacgtctagctcctcttactttgatgaacctgtcgaactgcgcagttcttcttttagcagttgggacgactcctccgattcatactggaaaaaggaaacctcaaaggatacagagacagtcttaaaaacaacgggctacagcgatagacctaccgccagacgtaagccggattacgagcctgtggagaacacagacgaagcacaaaaaaagttcggaaacgtcaaggctatctcctccgacatgtacttcgggaggcagtcgcaggccgattatgagactagggccaggctggagaggctttctgcttcatcatctatctcctcagccgacctctttgaggaacctcggaaacagcctgcggggaactattctcttagctccgtgcttcccaacgctcccgacatggcacagttcaagcagggagtgcgtagcgttgccgggaaacttagtgtcttcgccaatggggtcgtcaccagcatccaggatcgctatggttcatag

SEQ ID NO: 180717 - DNA, 1551 bp, Artificial Sequence
  derived and/or modified sequence
atgggggatccaagtaagcaggatatcctaacaatcttcaagagactgcgttctgtgcccaccaacaaggtctgttttgactgtggggcaaagaacccttcttgggcgtcgataacctatggcgttttcttgtgcattgattgttccggcagtcatcggtctctgggcgtgcacctgtcattcatccgctcaacagagctagactctaattggtcctggttccagctgaggtgcatgcaggtgggaggtaacgctagcgcttcctcttttttccatcagcacgggtgtagcaccaacgataccaatgccaagtacaatagccgggcagcccaactgtacagagagaaaattaaaagcttagcttcacaggccactcgcaagcacggaaccgacttatggctggactcctgcgtcgtgcctcccctgtcaccacctcctaaggaagaagacttttttgcttcccacgtgtctccggaggtgagcgacaccgcctgggcctcggccatcgccgaaccatcctccctgacatctaggccggtggagaccaccttagagaataatgaaggtggacaggaacaaggacctagtgttgagggtctgaatgtgcctactaaggcaacactggaggtgtcatcaataattaagaagaaacccaatcaagcaaaaaaaggactcggagcaaagaaggggtctctgggggctcaaaagcttgccaatacttgtttcaatgaaattgagaagcaggcgcaggctgccgacaagatgaaggaacaagaggatctagctaaagtggtcagcaaggaggagagtatcgtaagcagccttagactggcttataaagatcttgaaatacagatgaaaaaagacgaaaaaatgaatatttctggaaaaaagaatgtcgactctgatcgcctggggatgggatttggcaactgcagatcagtaatctcgcactctgtgacttccgacatgcagacgattgagcaggaaagcccgatcatggccaagccaaggaaaaaatataacgacgactctgatgattcatacttcacgagcagctcctcatatttcgacgaaccagtggaactgaggtccagttccttttcatcctgggacgatagttccgactcatattggaaaaaggagacttccaaagatacagagaccgtccttaaaactacagggtattctgatagacccacagcgaggcgtaagcccgattacgagccagtcgaaaacacagatgaagctcaaaagaaattcgggaatgtgaaggccatttcgtcagatatgtattttggcaggcaaagccaggcagactacgaaacgcgcgctcggttggagcggctctcggcatccagctcaatcagttctgccgacctctttgaagaaccgagaaagcagccagctgggaattatagtctgagctccgtgctccccaatgccccagacatggcacagtttaaacagggcgtgaggagcgtggcgggaaagttgtcagtgttcgccaacggagtcgtcacttccatccaggacagatatggatcctag

SEQ ID NO: 180718 - DNA, 1551 bp, Artificial Sequence
  derived and/or modified sequence
atgggcgaccccagcaagcaggacatcctgaccatcttcaagagactgagaagcgtgcccaccaacaaggtgtgcttcgactgcggcgccaagaaccccagctgggccagcatcacctacggcgtgttcctgtgcatcgactgcagcggcagccacagaagcctgggcgtgcacctgagcttcatcagaagcaccgagctggacagcaactggagctggttccagctgagatgcatgcaggtgggcggcaacgccagcgccagcagcttcttccaccagcacggctgcagcaccaacgacaccaacgccaagtacaacagcagagccgcccagctgtacagagagaagatcaagagcctggccagccaggccaccagaaagcacggcaccgacctgtggctggacagctgcgtggtgccccccctgagccccccccccaaggaggaggacttcttcgccagccacgtgagccccgaggtgagcgacaccgcctgggccagcgccatcgccgagcccagcagcctgaccagcagacccgtggagaccaccctggagaacaacgagggcggccaggagcagggccccagcgtggagggcctgaacgtgcccaccaaggccaccctggaggtgagcagcatcatcaagaagaagcccaaccaggccaagaagggcctgggcgccaagaagggcagcctgggcgcccagaagctggccaacacctgcttcaacgagatcgagaagcaggcccaggccgccgacaagatgaaggagcaggaggacctggccaaggtggtgagcaaggaggagagcatcgtgagcagcctgagactggcctacaaggacctggagatccagatgaagaaggacgagaagatgaacatcagcggcaagaagaacgtggacagcgacagactgggcatgggcttcggcaactgcagaagcgtgatcagccacagcgtgaccagcgacatgcagaccatcgagcaggagagccccatcatggccaagcccagaaagaagtacaacgacgacagcgacgacagctacttcaccagcagcagcagctacttcgacgagcccgtggagctgagaagcagcagcttcagcagctgggacgacagcagcgacagctactggaagaaggagaccagcaaggacaccgagaccgtgctgaagaccaccggctacagcgacagacccaccgccagaagaaagcccgactacgagcccgtggagaacaccgacgaggcccagaagaagttcggcaacgtgaaggccatcagcagcgacatgtacttcggcagacagagccaggccgactacgagaccagagccagactggagagactgagcgccagcagcagcatcagcagcgccgacctgttcgaggagcccagaaagcagcccgccggcaactacagcctgagcagcgtgctgcccaacgcccccgacatggcccagttcaagcagggcgtgagaagcgtggccggcaagctgagcgtgttcgccaacggcgtggtgaccagcatccaggacagatacggcagctag

SEQ ID NO: 180719 - protein, 176 aa, Artificial Sequence
  derived and/or modified sequence
MGAPATRRCVEWLLGLYFLSHIPITLFMDLQAVLPRELYPVEFRNLLKWYAKEFKDPLLQEPPAWFKSFLFCELVFQLPFFPIATYAFLKGSCKWIRTPAIIYSVHTMTTLIPILSTFLFEDFSKASGFKGQRPETLHERLTLVSVYAPYLLIPFILLIFMLRSPYYKYEEKRKKK

SEQ ID NO: 180720 - DNA, 210 bp, Artificial Sequence
  derived and/or modified sequence
atgaccaccctgatccccatcctgagcaccttcctgttcgaggacttcagcaaggccagcggcttcaagggccagagacccgagaccctgcacgagagactgaccctggtgagcgtgtacgccccctacctgctgatccccttcatcctgctgatcttcatgctgagaagcccctactacaagtacgaggagaagagaaagaagaagtag

SEQ ID NO: 180721 - DNA, 531 bp, Artificial Sequence
  derived and/or modified sequence
atgggagctcctgctacacgtcgttgtgttgaatggcttctgggactttattttctgagccacatcccaatcaccctgttcatggatctccaagccgttctgcctagggagctgtacccagttgagtttagaaaccttttgaagtggtatgccaaagaattcaaggaccccctgctgcaggaaccccccgcctggttcaaatctttcctgttttgtgaactggtcttccagctgccttttttccctatcgccacatacgcctttttgaagggcagctgcaagtggattcggaccccggccattatctatagcgtgcacaccatgacaaccctgattcccattctgagcactttcctatttgaggatttctccaaggcttcaggtttcaaaggccagcgacccgagacactgcatgaacgcctgactctggtctccgtctatgcaccttatttgctcattcctttcattctgttgatattcatgctgcggtctccatactacaagtatgaagagaaacgcaagaagaagtag

SEQ ID NO: 180722 - DNA, 210 bp, Artificial Sequence
  derived and/or modified sequence
atgactactcttatacctattctgtcaacattcctgtttgaggacttctctaaagccagtggttttaagggacagcggcctgaaaccctgcatgaaaggctaactctggtctccgtgtacgccccgtacttattaataccgttcattctcttaatttttatgctgcggtctccgtattataagtatgaggagaagaggaagaagaagtag

SEQ ID NO: 180723 - DNA, 531 bp, Artificial Sequence
  derived and/or modified sequence
atgggcgccccagccacccggcgctgtgtggagtggctgctgggcctgtacttcctgagccacatccccatcaccctcttcatggacctgcaggccgtgctgccccgggagctgtaccctgtggagttcaggaacctgctgaagtggtacgccaaggagttcaaggaccccctgctgcaggagcccccagcctggttcaagagcttcctgttctgtgagctggtgttccagctgcccttcttccccatcgccacctacgccttcctgaagggcagctgcaagtggatccgcaccccagccatcatctacagcgtgcacaccatgaccaccctcatccccatcctgagcaccttcctgtttgaggacttcagcaaggccagcggcttcaagggccagaggcctgagaccctgcacgagcggctgaccctggtgtctgtgtatgccccctacctgctgatccccttcatcctgctgatcttcatgctgcggagcccctactacaagtatgaggagaagaggaagaagaagtag

SEQ ID NO: 180724 - DNA, 210 bp, Artificial Sequence
  derived and/or modified sequence
atgaccaccctcatccccatcctgagcaccttcctgtttgaggacttcagcaaggccagcggcttcaagggccagaggcctgagaccctgcacgagcggctgaccctggtgtctgtgtatgccccctacctgctgatccccttcatcctgctgatcttcatgctgcggagcccctactacaagtatgaggagaagaggaagaagaagtag

SEQ ID NO: 180725 - DNA, 531 bp, Artificial Sequence
  derived and/or modified sequence
atgggcgcccccgccacccggcggtgcgtggagtggctgctgggcctgtacttcctgagtcacatccccataactctgttcatggacctgcaggccgtgctgcccagggagctttaccctgtggagtttcgtaacctgctaaaatggtatgcgaaagagttcaaggacccactcttgcaggagcctcccgcctggttcaagtcattcctgttttgcgagttagttttccagctgccttttttcccgatcgccacgtatgcctttcttaagggttcctgtaaatggatccgcacccccgctataatatactccgttcataccatgacaacacttatcccaatccttagcaccttccttttcgaggatttttcaaaagccagcggatttaaaggtcaaaggcccgaaaccctccacgaacggttgactctcgtgtctgtgtacgctccgtacttgttaatcccctttattttactgatatttatgcttcgctcaccctactacaaatatgaagaaaagaggaagaagaaatag

SEQ ID NO: 180726 - DNA, 210 bp, Artificial Sequence
  derived and/or modified sequence
atgaccaccctgatccccatcctgagcaccttcctgttcgaggacttttctaaggcaagcgggttcaaggggcagcgccctgagactctgcacgagcggctgactctggtctctgtctatgcgccctacctccttattccctttattctgctgatattcatgctccggagcccttattacaagtatgaggaaaaacgcaaaaaaaagtag

SEQ ID NO: 180727 - DNA, 531 bp, Artificial Sequence
  derived and/or modified sequence
atgggggctcccgcaacaagacggtgtgttgagtggcttttaggactgtacttcctaagccacatcccaattacacttttcatggacctgcaggctgtcctgccaagggaactctaccccgttgagttccggaatctgctcaaatggtacgcaaaagagtttaaagatccattgctgcaggagccaccagcatggtttaagtccttcttattttgtgaattagtgttccagctgccatttttccctatcgccacttatgctttcctcaaaggtagttgtaaatggatcagaaccccagctattatatacagtgttcatacaatgacaacgctcatccccattctgtctacattcttgttcgaagatttcagcaaggcctcagggtttaaaggccagagacccgaaacactgcacgagcgtctcaccttagtgagcgtgtatgctccttaccttctcatccccttcatcttactaatctttatgctccgtagcccttactataagtatgaggagaagcgcaagaaaaagtag

SEQ ID NO: 180728 - DNA, 210 bp, Artificial Sequence
  derived and/or modified sequence
atgacgacactaatacccattctgtcaacctttctgtttgaggacttctcaaaagccagtggcttcaaaggacaacgacctgagacattgcacgaaaggttaacactcgtatccgtgtacgccccatacctgttgatcccctttattctcctgatttttatgctccggagtccgtattataagtacgaagaaaaacggaaaaagaaatag

SEQ ID NO: 180729 - DNA, 2528 bp, Artificial Sequence
  derived and/or modified sequence
agccctcgcgggggcaaggcggcgaccgaggcgcgtgggtctgggaaggcgcgcggatttggcccctcttctcacatcagcgggtccaggcccaaccgacagactatgggggctccggcaaccaggcgctgcgtggagtggctgctgggcctctacttcctcagccacatccccatcaccctgttcatggacctgcaggcggtgctgccgcgcgagctctacccagtcgagtttagaaacctgctgaagtggtatgctaaggagttcaaagacccactgctacaggagcccccagcctggtttaagtcctttctgttttgcgagcttgtgtttcagctgcctttctttcccattgcaacgtatgccttcctcaaaggaagctgcaagtggattcgaactcctgcaatcatctactctgttcacaccatgacaaccttaattccgatactctccacatttctgtttgaggatttctccaaagccagtggtttcaagggacaaagacctgagactttgcatgaacggttaacccttgtgtctgtctatgccccctacttactcatcccattcatacttttaattttcatgttgcggagcccctactacaagtatgaagagaaaagaaaaaaaaaatgaaggaaacaaccactggcccagggtagagatgcctacagggtggttgcttgttggatacaatacaaggaacactgctcagaacccacgtcttcagcagcatttgaaacactggcagcaatgcacaagagcaagatggtgtcaggaaccatgtcaaaccctcaccttcttccattttttttttttttttaagacagtctcactctgttgcccaggctggagtaaagggcagtggcatgatctcggctcactgcaacctccgcctcctgggctcaagccatcttccttagcctcccaagtagctagaactacaggtgtgtaccaacacgtatggctaatttgttttgttttttttgtgtgtgtggagacagggttttgccatgttgcccaggttggtctcgaacgcctaggctcaagtgatctgcccacctcagtctccctaagtgctgggattacagacgtgaaccactgggcccagcccaaaccttcaccttctaagggcactgggatgaacagaccgatcggcttgagggtgggcaaaggggtgtgggctaggttataaggaagtggtaccaaataactgtgtgcctgagttccaccgcaagattactaaaagcaggaccagaccagaaactgctaaagaacatggcctgtttgacatgttcatgagtcacctgacccacagcatatatgcttatgactaaaccctccactcctgattctcaagagtgtatcacctgtcagcaaaatgaatagtgggatattttgggccattttaaatgtgaaattttgcctctttaatgttaattcaaaactatatcaatgttttcttgttcccacctctaacccaaggaaaaaagagaaaacatactatgcaaaggaagtttaaacttaagttttccttaagggtcagcccaacaatgactttcagtcaaatggattaaactggaaaatgtttttgtttctgttgtaaacagatcatcctaggcgaaagttttttttgtttgtttgcttttaaattagtttatttctaaatcttagtcttccacatttctagaggccacctgacacaagtccctgtatctgaagtctagcatctcaaggctgatctggaagtgtgctagtatgctccctagtggataacttaatcttttaatacagttccgtcattcccatcttgttttcagaagagaaggtggctacagccaggcataacatatccactgtgtgcatagagggtctcttcacgttgatgcttggcattccatcagctttctctaagtctttgctcaagttcaaccttaaaatgatgttagacaacaggtcccagtcagttccctctattttcacccattttgctcacaagccatattggcccgattagtggtactgtctgactcacgtgtgtgatccaaataaaggtagctgctgaccactgcctggtttgttttgtggactaggggatagagaatccagggttctctcatgaggagttaaacatatttcaagagcaacaggaaaaaaggtacatcaagccatttgaaaacaaaaatttattgcttctccttccaaagctttgtgaatttacaaaaaaaaggatgaaagtttacaaactgcttagttccaactaagcataagaggtgagaacgtacactgcagggccaccagcagcagctgtgcactgatgttaaaactggctcccccagacttgtagtgctgtcttcagggggctgcattccttacacgccacctcttgtgacataggtcattggtcaagccgctggaatgctacagaggtttttttggttttgagaggcttttttttgttttgccttcctactataaaagcgaaattttcagttcatttctgaaaaataaattggtcaataaattca

SEQ ID NO: 180730 - DNA, 2114 bp, Artificial Sequence
  derived and/or modified sequence
gggttccagttgcctctctcgggtcctgcccatgcctcccccgctcctaacccaactttagttcggtgttttcctcgggctttgtctctatcccagccccttctcccaagcggcgggggcgaacgctttgtttcctttaaagtcacttcttccctgggtttaaggtttcccgcgattccacctctggccggttgtcagtgtctgagggaagtagtctggatgaagtggtgtccaaagtcacatgtcagcatggatccgcatcctttttatttgacaagtttagaaacctgctgaagtggtatgctaaggagttcaaagacccactgctacaggagcccccagcctggtttaagtcctttctgttttgcgagcttgtgtttcagctgcctttctttcccattgcaacgtatgccttcctcaaaggaagctgcaagtggattcgaactcctgcaatcatctactctgttcacaccatgacaaccttaattccgatactctccacatttctgtttgaggatttctccaaagccagtggtttcaagggacaaagacctgagactttgcatgaacggttaacccttgtgtctgtctatgccccctacttactcatcccattcatacttttaattttcatgttgcggagcccctactacaagtatgaagagaaaagaaaaaaaaaatgaaggaaacaaccactggcccagggtagagatgcctacagggtggttgcttgttggatacaatacaaggaacactgctcagaacccacgtcttcagcagcatttgaaacactggcagcaatgcacaagagcaagatggtgtcaggaaccatgtcaaaccctcaccttcttccattttttttttttttttaagacagtctcactctgttgcccaggctggagtaaagggcagtggcatgatctcggctcactgcaacctccgcctcctgggctcaagccatcttccttagcctcccaagtagctagaactacaggtgtgtaccaacacgtatggctaatttgttttgttttttttgtgtgtgtggagacagggttttgccatgttgcccaggttggtctcgaacgcctaggctcaagtgatctgcccacctcagtctccctaagtgctgggattacagacgtgaaccactgggcccagcccaaaccttcaccttctaagggcactgggatgaacagaccgatcggcttgagggtgggcaaaggggtgtgggctaggttataaggaagtggtaccaaataactgtgtgcctgagttccaccgcaagattactaaaagcaggaccagaccagaaactgctaaagaacatggcctgtttgacatgttcatgagtcacctgacccacagcatatatgcttatgactaaaccctccactcctgattctcaagagtgtatcacctgtcagcaaaatgaatagtgggatattttgggccattttaaatgtgaaattttgcctctttaatgttaattcaaaactatatcaatgttttcttgttcccacctctaacccaaggaaaaaagagaaaacatactatgcaaaggaagtttaaacttaagttttccttaagggtcagcccaacaatgactttcagtcaaatggattaaactggaaaatgtttttgtttctgttgtaaacagatcatcctaggcgaaagttttttttgtttgtttgcttttaaattagtttatttctaaatcttagtcttccacatttctagaggccacctgacacaagtccctgtatctgaagtctagcatctcaaggctgatctggaagtgtgctagtatgctccctagtggataacttaatcttttaatacagttccgtcattcccatcttgttttcagaagagaaggtggctacagccaggcataacatatccactgtgtgcatagagggtctcttcacgttgatgcttggcattccatcagctttctctaagtctttgctcaagttcaaccttaaaatgatgttagacaacaggtcccagtcagttccctctattttcacccattttgctcacaagccatattggcccgattagtggtactgtctgactcacgtgtgtgatccaaataaaggtagctgctgacc

SEQ ID NO: 180731 - DNA, 531 bp, Artificial Sequence
  derived and/or modified sequence
atgggcgcccccgccaccagaagatgcgtggagtggctgctgggcctgtacttcctgagccacatccccatcaccctgttcatggacctgcaggccgtgctgcccagagagctgtaccccgtggagttcagaaacctgctgaagtggtacgccaaggagttcaaggaccccctgctgcaggagccccccgcctggttcaagagcttcctgttctgcgagctggtgttccagctgcccttcttccccatcgccacctacgccttcctgaagggcagctgcaagtggatcagaacccccgccatcatctacagcgtgcacaccatgaccaccctgatccccatcctgagcaccttcctgttcgaggacttcagcaaggccagcggcttcaagggccagagacccgagaccctgcacgagagactgaccctggtgagcgtgtacgccccctacctgctgatccccttcatcctgctgatcttcatgctgagaagcccctactacaagtacgaggagaagagaaagaagaagtag

SEQ ID NO: 180732 - protein, 713 aa, Artificial Sequence
  derived and/or modified sequence
MDELAGGGGGGPGMAAPPRQQQGPGGNLGLSPGGNGAAGGGGPPASEGAGPAAGPELSRPQQYTIPGILHYIQHEWARFEMERAHWEVERAELQARIAFLQGERKGQENLKKDLVRRIKMLEYALKQERAKYHKLKYGTELNQGDLKMPTFESEETKDTEAPTAPQNSQLTWKQGRQLLRQYLQEVGYTDTILDVRSQRVRSLLGLSNSEPNGSVETKNLEQILNGGESPKQKGQEIKRSSGDVLETFNFLENADDSDEDEENDMIEGIPEGKDKHRMNKHKIGNEGLAADLTDDPDTEEALKEFDFLVTAEDGEGAGEARSSGDGTEWAEPITFPSGGGKSFIMGSDDVLLSVLGLGDLADLTVTNDADYSYDLPANKDAFRKTWNPKYTLRSHFDGVRALAFHPVEPVLVTASEDHTLKLWNLQKTVPAKKSASLDVEPIYTFRAHIGPVLSLAISSNGEQCFSGGIDATIQWWNMPSPSVDPYDTYEPNVLAGTLVGHTDAVWGLAYSGIKNQLLSCSADGTVRLWNPQEKLPCICTYNGDKKHGIPTSVDFIGCDPAHMVTSFNTGSAVIYDLETSQSLVILSSQVDSGLQSNNHINRVVSHPTLPVTITAHEDRHIKFFDNKTGKMIHSMVAHLDAVTSLAVDPNGIYLMSGSHDCSIRLWNLDSKTCVQEITAHRKKLDESIYDVAFHSSKAYIASAGADALAKVFV

SEQ ID NO: 180733 - DNA, 2142 bp, Artificial Sequence
  derived and/or modified sequence
atggacgagctggccggcggcggcggcggcggccccggcatggccgccccccccagacagcagcagggccccggcggcaacctgggcctgagccccggcggcaacggcgccgccggcggcggcggcccccccgccagcgagggcgccggccccgccgccggccccgagctgagcagaccccagcagtacaccatccccggcatcctgcactacatccagcacgagtgggccagattcgagatggagagagcccactgggaggtggagagagccgagctgcaggccagaatcgccttcctgcagggcgagagaaagggccaggagaacctgaagaaggacctggtgagaagaatcaagatgctggagtacgccctgaagcaggagagagccaagtaccacaagctgaagtacggcaccgagctgaaccagggcgacctgaagatgcccaccttcgagagcgaggagaccaaggacaccgaggcccccaccgccccccagaacagccagctgacctggaagcagggcagacagctgctgagacagtacctgcaggaggtgggctacaccgacaccatcctggacgtgagaagccagagagtgagaagcctgctgggcctgagcaacagcgagcccaacggcagcgtggagaccaagaacctggagcagatcctgaacggcggcgagagccccaagcagaagggccaggagatcaagagaagcagcggcgacgtgctggagaccttcaacttcctggagaacgccgacgacagcgacgaggacgaggagaacgacatgatcgagggcatccccgagggcaaggacaagcacagaatgaacaagcacaagatcggcaacgagggcctggccgccgacctgaccgacgaccccgacaccgaggaggccctgaaggagttcgacttcctggtgaccgccgaggacggcgagggcgccggcgaggccagaagcagcggcgacggcaccgagtgggccgagcccatcaccttccccagcggcggcggcaagagcttcatcatgggcagcgacgacgtgctgctgagcgtgctgggcctgggcgacctggccgacctgaccgtgaccaacgacgccgactacagctacgacctgcccgccaacaaggacgccttcagaaagacctggaaccccaagtacaccctgagaagccacttcgacggcgtgagagccctggccttccaccccgtggagcccgtgctggtgaccgccagcgaggaccacaccctgaagctgtggaacctgcagaagaccgtgcccgccaagaagagcgccagcctggacgtggagcccatctacaccttcagagcccacatcggccccgtgctgagcctggccatcagcagcaacggcgagcagtgcttcagcggcggcatcgacgccaccatccagtggtggaacatgcccagccccagcgtggacccctacgacacctacgagcccaacgtgctggccggcaccctggtgggccacaccgacgccgtgtggggcctggcctacagcggcatcaagaaccagctgctgagctgcagcgccgacggcaccgtgagactgtggaacccccaggagaagctgccctgcatctgcacctacaacggcgacaagaagcacggcatccccaccagcgtggacttcatcggctgcgaccccgcccacatggtgaccagcttcaacaccggcagcgccgtgatctacgacctggagaccagccagagcctggtgatcctgagcagccaggtggacagcggcctgcagagcaacaaccacatcaacagagtggtgagccaccccaccctgcccgtgaccatcaccgcccacgaggacagacacatcaagttcttcgacaacaagaccggcaagatgatccacagcatggtggcccacctggacgccgtgaccagcctggccgtggaccccaacggcatctacctgatgagcggcagccacgactgcagcatcagactgtggaacctggacagcaagacctgcgtgcaggagatcaccgcccacagaaagaagctggacgagagcatctacgacgtggccttccacagcagcaaggcctacatcgccagcgccggcgccgacgccctggccaaggtgttcgtgtag

SEQ ID NO: 180734 - DNA, 2142 bp, Artificial Sequence
  derived and/or modified sequence
atggacgagctggccggaggcggcggtggcggcccaggcatggccgcgccacctaggcaacagcagggtcccggcgggaatctgggcttatcccctggaggcaatggggcagccgggggcggcggcccccccgccagtgaaggggctggacctgccgctggaccagaactctcccggcctcagcagtacacaatcccagggatcctgcattatatccagcatgagtgggcccgtttcgagatggagcgagcgcattgggaggtggagcgggccgagctgcaggcccgcatcgcttttctgcagggagagcgcaagggacaggagaacctgaaaaaggatctggtccgaagaatcaagatgctggagtacgcactgaagcaggagagggcaaaatatcacaagctgaaatacgggacagagctgaaccaaggagatttgaagatgcctacctttgaaagcgaggaaactaaggacactgaagctcccactgctcctcagaatagccaactcacctggaagcaaggccgacaacttttgagacagtatttgcaggaggtcggatacacagatacaattctggacgtgaggagccagagagtaagatcactcctgggactgagcaactcagagcctaacggatcagtggagactaaaaacctggagcagattctgaacggcggcgagagcccgaagcaaaaagggcaggagatcaagcggtcatccggggacgtgctggagacctttaatttcttagagaatgctgacgactctgatgaagatgaggagaatgatatgatcgaagggatccctgaggggaaagacaagcaccgaatgaacaaacacaaaattggtaacgaaggccttgcagccgatctcactgacgatcccgacaccgaagaagctctgaaggaattcgacttccttgtgactgcagaggatggagagggggccggcgaggctcgcagctccggcgacggaaccgaatgggctgagcctatcacttttccatccgggggaggtaagtcatttattatgggtagcgatgacgtcttgctcagtgtactaggcctaggtgacctcgcagatcttacggtaaccaacgatgctgactactcctatgatctgccggctaacaaggatgcctttcgaaagacatggaatcccaaatatactctccgctctcacttcgatggagtccgcgcactggctttccaccccgtggagccggtgctcgtaacagcttcagaggaccacactctgaagctgtggaatctgcaaaaaactgtgcccgcaaaaaaaagcgcttcactggatgtggaacccatctacacattccgagcgcatatcggacctgtcttgtcgctcgctataagctcaaacggcgaacagtgcttcagcggtggaatcgatgccactatccagtggtggaatatgccatcgccatctgtggacccttatgacacctacgaacccaatgttctcgcgggtaccttggtcggccataccgacgccgtctggggcctggcctatagtggcatcaagaaccagctgctgtcttgcagcgccgacggcacagtccgactgtggaatccccaggagaaactgccttgcatctgcacttacaatggcgacaaaaagcacgggattcccacctctgtggattttattggttgcgaccccgcacacatggtaacctccttcaacactggatcggctgtcatctacgacctggagacatcacagtcactggtgattcttagcagtcaggtggacagcggcctgcagagcaacaaccacattaatcgcgtcgtgagccatcctaccttgcccgtcaccattaccgcacatgaggatcggcacatcaagtttttcgataataaaactggaaaaatgatccatagcatggtggcccatctggatgccgtgacttccctcgcggtggatccaaacgggatttatctcatgtccgggagccatgactgctctatacggctctggaatctggattcgaaaacatgtgttcaggaaatcaccgcgcatcgtaagaagttggacgagagcatctatgatgtggcctttcatagttccaaagcatatattgcatcggcaggcgccgacgcgctggccaaggtattcgtatag

SEQ ID NO: 180735 - DNA, 2142 bp, Artificial Sequence
  derived and/or modified sequence
atggatgagctggccggcggcggcggcggcggccctggcatggccgccccaccccggcagcagcagggccctgggggcaacctgggcctgagccctggaggaaatggagctgctgggggcggcggccccccagccagcgagggcgccggccctgctgctggccctgagctgagccggccccagcagtacaccatccctggcatcctgcactacatccagcacgagtgggccaggtttgagatggagcgggcccactgggaggtggagagagctgagctgcaggccagaattgccttcctgcagggcgagaggaagggccaggagaacctgaagaaggacctggtgcggcgcatcaagatgctggagtatgccctgaagcaggagcgggccaagtaccacaagctgaagtatggaacagagctgaaccagggcgacctgaagatgcccacctttgaaagtgaggagaccaaggacacagaggcccccacagccccccagaacagccagctgacctggaagcagggccggcagctgctgcggcagtacctgcaggaggtgggctacacagacaccatcctggatgtgcgcagccagagggtgcgcagcctgctgggcctgagcaacagcgagcccaacggctctgtggagaccaagaacctggagcagatcctgaatggaggagagagccccaagcagaagggccaggagatcaagaggagcagtggagatgtgctggagaccttcaacttcctggagaatgctgatgacagtgatgaagatgaggagaatgacatgattgagggcatccctgagggcaaggacaagcacaggatgaacaagcacaagattggaaatgaaggcctggccgctgacctgacagatgatcctgacacagaggaggccctgaaggagtttgacttcctggtgacagcagaagatggagagggcgctggggaggcccggagcagtggagatggaacagagtgggccgagcccatcaccttccccagcggcggcggcaagagcttcatcatgggcagtgatgatgtgctgctgtctgtgctgggcctgggggacctggccgacctgactgtgaccaatgatgctgactacagctatgacctgcctgccaacaaggatgccttcaggaagacctggaaccccaagtacaccctgcggagccactttgatggagtgcgggccctggccttccaccctgtggagcctgtgctggtgacagccagcgaggaccacaccctgaagctgtggaacctgcagaagacagtgcctgccaagaagagcgccagcctggatgtggagcccatctacaccttccgggcccacatcggccctgtgctgagcctggccatcagcagcaatggagagcagtgcttcagcggcggcattgatgccaccatccagtggtggaacatgcccagccccagcgtggacccctatgacacctatgagcccaacgtgctggccggcaccctggtgggccacacagatgctgtgtggggcctggcctacagcggcatcaagaaccagctgctgagctgcagcgcagatggcaccgtgcggctgtggaacccccaggagaagctgccctgcatctgcacctacaacggggacaagaagcacggcatccccacctctgtggacttcatcggctgtgaccctgcccacatggtgaccagcttcaacacaggcagcgctgtgatctatgacctggagaccagccagagcctggtgatcctgagcagccaggtggacagcggcctgcagagcaacaaccacatcaacagagtggtgagccaccccaccctgcctgtgaccatcacagcccatgaagatagacacatcaagttctttgacaacaagacaggcaagatgatccacagcatggtggcccacctggatgctgtgaccagcctggccgtggaccccaacggcatctacctgatgagcggcagccatgactgcagcatccggctgtggaacctggacagcaagacctgtgtgcaggagatcacagcccacaggaagaagctggatgagagcatctatgatgtggccttccacagcagcaaggcctacatcgccagcgctggagcagatgccctggccaaggtgtttgtgtag

SEQ ID NO: 180736 - DNA, 2142 bp, Artificial Sequence
  derived and/or modified sequence
atggacgagctggccggcggcggcggcggcggccccggcatggccgctcctcctaggcaacagcagggccccggtggaaatcttgggctcagccccgggggcaatggagcagccggcggaggtggaccccccgccagcgagggcgcgggcccagccgccggcccagagctgtccaggccacagcaatacaccatccccggcatccttcattacatacaacacgaatgggcccggtttgagatggaacgggcacattgggaggtcgagagagccgagctgcaggctcggattgcttttctccaaggggagaggaagggccaggagaacttgaaaaaagacttagtgagacgcatcaagatgctcgagtacgctctgaagcaagaaagagctaaataccataagctaaaatatggaactgaactgaaccaaggggaccttaagatgcccacattcgagagcgaagaaaccaaggacacagaggcgcctactgccccccagaactcccagctgacttggaaacagggccgccagctgcttagacagtatcttcaggaagtaggttacactgacacaattctggatgtgcggtcccagagagtgaggagtctgttgggtttgtccaacagtgagcccaatggcagcgtcgagaccaaaaacctggaacagatactgaacgggggcgagtcaccaaagcagaaggggcaggagatcaaacgatcctcaggtgacgtgttggaaactttcaacttcttagaaaacgccgatgactctgacgaggacgaagaaaacgacatgatcgaagggatcccagagggcaaggacaagcacaggatgaacaagcacaagatcggcaatgagggcttggctgctgatctcaccgatgatcctgatactgaagaagccttgaaggaattcgactttctcgtgacagccgaggatggtgagggagccggagaggcccggagtagcggggatggaactgaatgggcagagcccattacattcccttccggcggtggtaaatcattcataatgggttcagatgacgtgctgttaagcgttttaggactaggagatctggccgatcttaccgtgaccaatgacgctgattatagctatgacctgcccgccaacaaggacgcatttcgcaagacatggaatcccaagtataccttgcggtcacattttgacggagtaagggccttagcgtttcacccagtggaacctgtcctggtgaccgcgagtgaggatcacactctgaaactgtggaatctccaaaaaactgtgcctgctaagaagtcagcatcactggacgttgagcctatctatactttccgtgcccacattggacccgtgctttccctggccatctcgtctaatggagagcagtgcttctctggcgggatcgatgctaccattcagtggtggaatatgccgtctcctagtgtggacccatatgacacttatgagccaaatgtgctggcaggcacactggtcgggcacaccgacgccgtttggggcctcgcgtattcaggtatcaagaaccagttgctgtcgtgcagcgccgacgggactgtcaggctgtggaaccctcaggagaaattaccgtgcatatgcacctataatggcgacaagaagcacggaatcccgacaagcgtcgattttatcggttgtgacccagcccacatggtgacaagcttcaatacaggctctgctgtaatctacgacttggaaacgtcccagtcgctggttatactctcctcacaggttgatagtggactgcagtctaataaccacataaatcgcgtggtgagccatcctaccctgcccgtgaccataactgcacacgaagatcgccatatcaaattctttgacaataagactgggaagatgattcactccatggtggctcatttggatgcggtgacctctctggctgtggacccgaatggcatttacctcatgagtggctcacacgactgctccatccgcctctggaatctagacagcaaaacgtgcgtacaggagataaccgcacaccgtaaaaagttagacgagtctatttacgacgttgctttccactcaagtaaggcttacatcgcttctgccggcgcagatgccctggcaaaagtattcgtctag

SEQ ID NO: 180737 - DNA, 2142 bp, Artificial Sequence
  derived and/or modified sequence
atggatgaactggctggtggtggcggaggagggccagggatggccgcaccacccagacagcagcagggacccggaggcaacctggggctaagccctggcggaaacggcgcagcaggcggtggcggtcccccagcatcagaaggagctggacctgctgcaggaccggaactgagtaggccacagcaatataccattcctggcattttgcattatattcaacatgaatgggctcgctttgagatggaacgagcccattgggaggtggaacgggctgaactgcaggcccgaattgcttttttgcagggtgagaggaaaggccaggagaacctgaaaaaagacctggttagaagaatcaaaatgctggagtacgccctgaagcaggaacgggctaaatatcataagttaaagtacggcacagaactgaatcagggcgatctgaagatgcccactttcgagtcagaagagactaaggataccgaggcacccactgctccacagaattcccaacttacctggaagcagggtcgtcaattgttgcggcagtatctgcaggaggtcggttatacagacacgatcctcgatgtaaggagccaacgcgttcgaagcttgctcggactctctaattcggagcccaatggcagtgtggaaaccaaaaacctggagcagatcctgaacggcggagaaagcccaaaacaaaaaggacaggagattaaacggagcagcggggatgtgttagagacgtttaactttctggagaatgctgacgactccgacgaggacgaagaaaatgatatgatagaaggaatcccagagggcaaggacaagcacaggatgaataaacataaaataggaaacgaaggactggctgcagatctcaccgatgatcctgataccgaggaggccctcaaagaatttgacttcctcgtgacagctgaggacggtgagggcgcaggcgaggccaggtcttccggagatggaactgagtgggccgagcctatcacatttccatccggcggaggaaaaagctttataatgggctccgacgatgtccttctcagcgtgctggggctcggcgacttggccgatctcaccgttacaaatgacgctgattattcctatgacctgccagcaaacaaagacgctttcaggaagacctggaacccaaagtacaccctgaggtcacacttcgacggtgtccgcgcactggcctttcatccggttgaaccagtgttggtcaccgcttccgaggaccacacactcaagctgtggaaccttcagaagacagtgcctgcaaagaaatcggccagcttagatgttgagcccatatatacgtttcgagcccacatcggacccgtcctgagtctggcaatttcttctaatggagagcagtgcttttctggagggatcgatgctaccattcagtggtggaacatgccctcacccagcgtggatccctacgacacatatgagcctaatgttctggccggaactttggtgggacacactgatgctgtgtggggattggcttatagtgggattaagaaccaacttttaagttgcagcgctgatggaaccgtacgtctctggaaccctcaggagaaactcccatgcatttgcacctataacggggataagaagcacggcatcccaacctccgtggacttcatcgggtgtgatcctgctcatatggtcaccagttttaacaccggctccgcagtgatatacgacctggagaccagtcagtctctcgtcattcttagttcccaagtggactccggcctgcaatcaaacaaccacatcaatcgcgtggtaagccatcccacacttccagtcaccattacagcgcatgaagaccgacatatcaagttttttgacaataagaccggaaaaatgattcactccatggttgcgcatttggacgccgtgacatcacttgcggttgaccccaatgggatttacctgatgtccggatcgcatgattgttcgataaggctctggaacctcgacagtaagacctgcgtacaggagataacagctcaccgcaagaaactagacgaatcgatctatgacgtggctttccattcttcaaaggcttatattgcttccgcaggtgccgatgctctggccaaagtcttcgtttag

SEQ ID NO: 180738 - DNA, 3970 bp, Artificial Sequence
  derived and/or modified sequence
aaagtgagtgagtgagacgggcagatggaggagggattgtaatggcggcagccggcagctccctgctctgacccacggcaggcacacagcaacgaccccttccccgcccctctcccggccggcctccgccccgcagccagcgcggggccaccctctccggcccttcccccagctgtcggcgtctcgccctgcgccccggccggggccccacacacaatggacgagcttgccggaggcggtggtggcggcccggggatggcggcccctccccggcagcagcagggacctggggggaacctgggcctttcgcccggggggaacggagcggcgggcggcgggggtcctccggcctccgagggagcgggtcccgcggcaggccccgagctgtcccggccgcagcagtacactatcccggggatactgcactacatccagcacgagtgggctcggttcgagatggagcgggcgcactgggaggtggaacgggccgaactgcaggcccggattgcatttctacaaggcgaaagaaaaggtcaagagaacctgaagaaggacttagtaagaagaataaagatgttagagtatgcattaaaacaagaaagggcaaaatatcacaaattaaaatatggcacggaactgaaccaaggtgacttgaaaatgccaacctttgagtcagaagaaaccaaagacacagaggctcccacagcacctcagaatagccagttaacgtggaagcaaggcagacagcttttaagacagtatcttcaggaagtaggttatacagatacaatattagatgtacggtctcagcgggtaaggtcattacttggactatctaattcagaaccaaatggatcagtagaaacaaagaatttagaacagatcctgaatggaggtgaatctcctaagcaaaagggacaagaaataaaaaggtcctctggtgatgttcttgagacgttcaatttcttagaaaatgccgatgacagtgatgaagatgaggaaaatgacatgatcgaaggcatcccagaaggaaaagacaaacatcggatgaataaacataaaataggtaatgaaggtttagctgctgacctaactgacgatcctgatactgaggaagcactgaaagaatttgattttttagtgactgctgaagatggtgaaggagctggagaagcacggagttcgggggatggcacagaatgggctgaaccaataacgtttccatctggaggaggcaagtcatttattatgggttctgatgatgttttgttaagtgtactgggccttggagaccttgcagacttgacggtaacaaatgatgcagactatagttatgatttgcctgctaataaagatgcctttcgaaagacatggaatcccaagtatacactacgtagccattttgatggagtacgggcattagcttttcatcctgtagaacctgtgctggttactgcttctgaggaccataccctgaaactttggaacctgcaaaaaacagttcctgccaaaaagagtgcctctttagatgtagagcctatctacacatttagggcccacatcggccctgttctgtcattagctattagttctaatggagaacagtgttttagtggtggtattgatgcaaccatccagtggtggaatatgccgagtcccagtgtagatccatatgatacatatgagccaaatgttctagctggcactttagttggtcatacagatgcagtttggggtcttgcttatagtggcataaaaaatcaattactgtcttgttcagcagatggcactgttaggttatggaatccacaagaaaaattgccatgtatttgcacttacaatggagataaaaagcatggaatacctacatcagttgactttataggctgtgatccagctcatatggtaacctctttcaacactggtagtgcagtaatttatgatttagaaacatcacagtcattggtgatactttcatcacaggtagattctggtttacaatctaataatcatatcaacagagtagtaagtcatcccacacttcctgttacaataactgctcatgaagatagacacatcaaattttttgacaataaaacgggtaaaatgatccattctatggtagctcacttggatgctgttacaagtctagcagtagatcctaatggaatctatttgatgtctggaagccatgactgttccatcagattatggaatttagacagcaagacatgtgtgcaagaaataacagctcacagaaagaaattggatgaatcaatttatgatgttgctttccactcgtcaaaagcatatatagctagtgcaggagctgatgctcttgccaaagtatttgtatgaatcaacaaaaacttgcatcgtaacaagatttgcttggacagaaagagggtctgcatcactgccatcagaaaggttactgatatgacactacatgtgatctgcctggtgaaggctatctggggcaggcacaaattggtggaaatcacatcttaatgtcaagctcattaagttaactgtaattactgtattttgtgggacaaagaaaaaaggactccagtatttgtggcctgtactggatgtgaactgagcgtatatctgtttttaggtgtctttaagccaatgtggagtctgatctttcaaaaaagtttttttttttctcttcttcttcttcttttttttttttttttttttttttttggactctgtgtgctgccttaggggttaggaatgtggtgctcttgttgggggaagtgagctccaagagtagctttttttcatctcttagtgatcttctgtttatcggttgaatgccacagattcccttttaaacttattttgctttaaaaaaaaaaaaaaagaaaaagaaaatttaacttaaaatattttagcattagttgcacaaaatgtttggataaaattctagtttttataagtctttttatatatttagcctgtcacaacagtgctcaagattgtattgaagtttttctgcattatacaaccctaaaacacagagatctcactgacccgttgccctgtaaccactttctttccttcttttgcctaatacagctcagctaagtccttccataaagatgctaaataactttcatcatcacataaatgtcttcataaaccaaggactattaagtgtattaaaatgaaacagtggggtttagtactccaaatgaactcttaaagaaaaaaactaatcttggcatcctatcactatgtgatattttgtacatcttactgtatttacaagtttatttatcaaggattatccatcttgctaatggcctattatttatttcactttttgttggtctttatatccttttattaatgtgctaaaggaacctgtatatctattttggaactctttgaatagtctaaaatagactaaaaatggagtattttatagtttaaattacaaaccaaggtggttccccctaagatatatatcttggtttaccatgattccaaacaaaactaacttgtttaaaaatatttggagtaaagttttatttgcattacaaataggatacaaaaatagttgaatcaggatacagaaatctgctgtgttttgactagttatccctgttttatttttttagatgtgcttaattttatggtgtaactaaagattttgtttgtgtaatgcatgattaagacaataaagtattttttctagtcttccgagaaacttttctgatcagtttgcgagttttgatgagttttgtaaggtttttgttttacaaactatgaatcagcaaatttttaagattgtaccacatagcaaacatacagctgttgaaaaataatgtatataaaatgcatataataaatattaaattgtgtacctgtatgttactgttggctacatcattttgtgttgaataataaagtgcaatactttattctccataattaaactaggaaatggagattt

SEQ ID NO: 180739 - protein, 487 aa, Artificial Sequence
  derived and/or modified sequence
MERSGQRVTTWDCDQGKHSDSDYREDGMDLGSDAGSSSSSSRASSQSNSTKVTPCSECKSSSSPGGSLDLVSALEDYEEPFPVYQKKVIDEWAPEEDGEEEEEEDERDQRGYRDDRSPAREPGDVSARTRSGGGGGRSATTAMPPPVPNGNLHQHDPQDLRHNGNVVVAGRPSCSRGPRRAIQKPQPAGGRRSGRGPAAGGLCLQPPDGGTCVPEEPPVPPMDWEALEKHLAGLQFREQEVRNQGQARTNSTSAQKNERESIRQKLALGSFFDDGPGIYTSCSKSGKPSLSSRLQSGMNLQICFVNDSGSDKDSDADDSKTETSLDTPLSPMSKQSSSYSDRDTTEEESESLDDMDFLTRQKKLQAEAKMALAMAKPMAKMQVEVEKQNRKKSPVADLLPHMPHISECLMKRSLKPTDLRDMTIGQLQVIVNDLHSQIESLNEELVQLLLIRDELHTEQDAMLVDIEDLTRHAESQQKHMAEKMPAK

SEQ ID NO: 180740 - DNA, 1464 bp, Artificial Sequence
  derived and/or modified sequence
atggagagaagcggccagagagtgaccacctgggactgcgaccagggcaagcacagcgacagcgactacagagaggacggcatggacctgggcagcgacgccggcagcagcagcagcagcagcagagccagcagccagagcaacagcaccaaggtgaccccctgcagcgagtgcaagagcagcagcagccccggcggcagcctggacctggtgagcgccctggaggactacgaggagcccttccccgtgtaccagaagaaggtgatcgacgagtgggcccccgaggaggacggcgaggaggaggaggaggaggacgagagagaccagagaggctacagagacgacagaagccccgccagagagcccggcgacgtgagcgccagaaccagaagcggcggcggcggcggcagaagcgccaccaccgccatgcccccccccgtgcccaacggcaacctgcaccagcacgacccccaggacctgagacacaacggcaacgtggtggtggccggcagacccagctgcagcagaggccccagaagagccatccagaagccccagcccgccggcggcagaagaagcggcagaggccccgccgccggcggcctgtgcctgcagccccccgacggcggcacctgcgtgcccgaggagccccccgtgccccccatggactgggaggccctggagaagcacctggccggcctgcagttcagagagcaggaggtgagaaaccagggccaggccagaaccaacagcaccagcgcccagaagaacgagagagagagcatcagacagaagctggccctgggcagcttcttcgacgacggccccggcatctacaccagctgcagcaagagcggcaagcccagcctgagcagcagactgcagagcggcatgaacctgcagatctgcttcgtgaacgacagcggcagcgacaaggacagcgacgccgacgacagcaagaccgagaccagcctggacacccccctgagccccatgagcaagcagagcagcagctacagcgacagagacaccaccgaggaggagagcgagagcctggacgacatggacttcctgaccagacagaagaagctgcaggccgaggccaagatggccctggccatggccaagcccatggccaagatgcaggtggaggtggagaagcagaacagaaagaagagccccgtggccgacctgctgccccacatgccccacatcagcgagtgcctgatgaagagaagcctgaagcccaccgacctgagagacatgaccatcggccagctgcaggtgatcgtgaacgacctgcacagccagatcgagagcctgaacgaggagctggtgcagctgctgctgatcagagacgagctgcacaccgagcaggacgccatgctggtggacatcgaggacctgaccagacacgccgagagccagcagaagcacatggccgagaagatgcccgccaagtag

SEQ ID NO: 180741 - DNA, 2633 bp, Artificial Sequence
  derived and/or modified sequence
agaaagagataatctgtgaaagccacagagcctgatttctgctgtgataatcttcagcagaccgaggctggggcgagaatgaggcagacctgtttacatggtgtgtgcagtgccttgtggaattcttaactctattttattgtattatttttaatcgaaaagtagatcagatgatagcatgaagtgaatcggctgctttggactaatgggatcttcttttctgcattaagatcaagaacttttctggaatcctctgttctccgagtagccttgtcttctctgtgtgttttatcaatttgaagaacactggcaaaaatcagcaaacttcatctcccaaaaagctctcgctcttttttgccaatacttgaagatttctgctccaaaatctactttgagctgcttgagcatggtggttgataaccgaagggcaaaagcatcacttatttagtgtgtgttatagaaattttttagacaaccttactagctaacccaggtgaccctttacggatttctttcaaagccaatttgaataaacaactcttccctctcaaatgggcaagagtaactcttcagcaccatggagaggtccgggcagcgtgttacaacgtgggactgtgaccagggcaagcactctgacagtgattaccgagaggatgggatggatctaggcagtgacgccggcagcagcagcagcagcagccgcgccagttcacagtccaactccaccaaagtgaccccttgctccgagtgcaaatcttcatcgtcgccggggggcagcctggacttggtgtctgccctggaggactatgaggagcccttcccggtctaccagaagaaggtgattgatgagtgggcgccggaggaggacggggaggaggaggaagaggaggacgagcgcgaccagcgagggtaccgggatgaccgctctccggcccgggaaccgggggacgtaagcgccaggacccgcagcggcggcggcgggggcaggagcgccaccaccgccatgccgcccccggtgcccaacggcaacctccaccagcacgacccccaggacctcaggcacaatggcaacgtggtggtggctggccggccgagctgttcccggggcccccgccgggcgatccaaaagccccagccggctgggggccggcgcagtggccgcggcccggcggctggggggctctgccttcagcccccagacggcgggacgtgcgtccccgaagagcccccggtgccacctatggattgggaggcgctggagaagcatctggccgggctgcagttccgggagcaggaggtacggaaccagggccaggcgaggaccaactccacctccgcacagaaaaatgagagagagtctatcagacagaagttggcacttggaagcttctttgatgatggcccaggaatttataccagctgtagcaaaagtgggaagccaagcctttcctcccgactgcagagtgggatgaacttgcagatatgctttgtcaacgacagtggcagtgataaggacagtgatgctgatgacagtaagactgaaaccagcttggacacccccttgtctcccatgagcaaacagagttcttcctattctgatagagacactactgaagaggagtctgaatccttggatgacatggacttccttacaaggcaaaagaaattgcaagctgaagccaaaatggcccttgccatggccaaaccaatggccaaaatgcaagtagaagtggagaaacagaacaggaaaaagtctcccgtcgctgatcttctgccacacatgcctcatataagtgaatgcttgatgaaaagaagtttaaaacccaccgacctgagagacatgactattgggcagctacaagtgatagtcaatgatctccattcccagatagaaagcttgaatgaagagttggtccagctgcttctcatccgagatgagctgcacacagagcaggatgccatgctggtggacattgaagacttgaccagacatgctgaaagtcagcagaagcacatggcagagaaaatgcctgcaaagtgaaaagaagccattcaaccagagaacaagctagaatttattttgcttctgtggttgtaaaaatgctgttgctaaaggtggcgcagaaacaaatatcagtgttagtcattgataatgtctgaagcttaatgtccagtgattggcctttgcttcttaatttattttaattttttacttgtgccacttaatatcaggcattttaataaaatattgttacaaaaaatgtacagtactgacaccaccacaaatcatggttaataaaagagagtagttttaactttatttttatttgtttagagattttaagttggaacagtattttcccattgactacttttcattcttcactgtagttttaaagaagaactgtaaatgacggtgctatacaagtcaaaaaatacatgcctgcctcgtagtgaagttgtagctctccgtaatatgtatattttactcagttttcaacattttgtgaatgttgactacctgaagttcctttttagatgtgctattaacattctgttggattcagagggttccttgaaagttttatgtataaatatgtaaaataaaaattaaaactttgtttcatatcata

SEQ ID NO: 180742 - DNA, 1464 bp, Artificial Sequence
  derived and/or modified sequence
atggagagaagtgggcagcgcgtgactacctgggactgcgaccaagggaaacacagcgacagtgattaccgtgaagacggcatggatctaggctctgatgccggcagctcctcatcttcaagtagagcctctagccagagcaactctactaaagtcaccccatgctccgagtgcaagtcgagctcctcacctggggggagcctggacctggtgtctgcgctggaagattacgaagaaccgtttcctgtgtaccagaagaaggtcatcgatgaatgggcccctgaggaagatggcgaggaggaagaagaggaggacgagagagaccaaaggggctatcgggacgaccggagccctgcccgcgagcccggcgacgtgagcgccagaacacggtcaggtggaggaggaggccggagcgccacaaccgcaatgcctcccccagtgccaaacggcaatctgcatcagcacgatccacaggacctccggcataacggcaatgtcgtcgtggccggacggcccagctgctccagaggcccccgccgcgcaatccagaagccccagcctgccgggggtcggcggagcggaaggggccctgccgccgggggattgtgtctgcagccaccggacgggggtacttgtgtgcccgaagagccccctgtgcctccaatggactgggaagccttggagaagcacctggcggggctacagttcagggagcaggaggtgagaaatcagggccaggctcggacaaatagtacaagcgcgcaaaaaaatgaaagggagtctatccggcaaaagttggcacttgggagttttttcgatgatggaccggggatttatacaagttgttccaagagtggaaaaccatcactcagcagtaggctccagagcgggatgaatctccagatttgtttcgtcaatgactccggatcagataaggatagcgacgcggacgactctaaaacagagacctccctggacacccccctctcccccatgtcaaagcagtcatcaagctactcagaccgggacaccacagaggaggaatccgagtccctggatgacatggatttcctgactagacaaaagaaactccaggccgaagccaaaatggcccttgctatggctaaaccaatggctaaaatgcaggtggaagtcgagaagcagaatcggaagaaatctcctgtggctgatctgctgcctcacatgcctcatatctccgagtgtctgatgaaaagatctctgaagccgacagacctccgggatatgactatcgggcagctccaggtgattgtgaatgatctccattctcagattgagtcactcaatgaggaactggttcagctgctcctgataagggacgaattacatactgagcaggacgccatgctggtggatattgaggacctgacaaggcacgcagagagccagcagaagcacatggctgaaaaaatgcccgccaagtag

SEQ ID NO: 180743 - DNA, 1464 bp, Artificial Sequence
  derived and/or modified sequence
atggagaggagcggccagagggtgaccacctgggactgtgaccagggcaagcacagcgacagcgactacagagaagatggcatggacctgggcagtgatgctggcagcagcagcagcagcagccgggccagcagccagagcaacagcaccaaggtgaccccctgcagcgagtgcaagagcagcagcagccctgggggcagcctggacctggtgtctgccctggaggactatgaggagcccttccctgtgtaccagaagaaggtgattgatgagtgggcccctgaggaggatggagaggaggaggaggaggaggatgagcgggaccagaggggctacagagatgacaggagccctgcccgggagcctggagatgtgtctgcccggaccaggtctgggggcggcggcggccgcagcgccaccacagccatgcctcctcctgtgcccaatggaaacctgcaccagcacgacccccaggacctgcggcacaatggaaatgtggtggtggccggccggcccagctgcagccggggcccccggcgggccatccagaagccccagcctgctgggggcagaagaagtggccggggccctgctgctgggggcctgtgcctgcagcccccagatggcggcacctgtgtgcctgaggagccccctgtgccccccatggactgggaggccctggagaagcacctggccggcctgcagttccgggagcaggaggtgaggaaccagggccaggcccggaccaacagcaccagcgcccagaagaatgaaagagagagcatccggcagaagctggccctgggcagcttctttgatgatggccctggcatctacaccagctgcagcaagagcggcaagcccagcctgagcagccggctgcagagcggcatgaacctgcagatctgctttgtgaatgacagcggcagtgacaaggacagtgatgctgatgacagcaagacagagaccagcctggacacccccctgagccccatgagcaagcagagcagcagctacagcgaccgggacaccacagaggaggagagcgagagcctggatgacatggacttcctgacccggcagaagaagctgcaggccgaggccaagatggccctggccatggccaagcccatggccaagatgcaggtggaggtggagaagcagaacaggaagaagagccctgtggccgacctgctgccccacatgccccacatcagtgaatgtctgatgaagaggagcctgaagcccacagacctgcgggacatgaccatcggccagctgcaggtgattgtgaatgacctgcacagccagatcgagagcctgaatgaggagctggtgcagctgctgctgatcagagatgagctgcacacagagcaggatgccatgctggtggacatcgaggacctgaccaggcatgctgagagccagcagaagcacatggccgagaagatgcctgccaagtag

SEQ ID NO: 180744 - DNA, 1464 bp, Artificial Sequence
  derived and/or modified sequence
atggagcggagcggccagcgggtgaccacctgggactgcgaccaggggaagcactctgactctgattaccgcgaagatggaatggacctgggatcagacgcgggctccagcagcagtagctccagggcaagttcccaatcaaatagtactaaagtgaccccctgtagtgagtgcaaaagtagcagtagtccaggcggctccttggatctggtctctgctttggaagattacgaagagccttttcccgtgtatcagaagaaggtgattgacgaatgggcccctgaggaagacggcgaagaggaggaggaggaagacgaaagagatcagcgaggttaccgcgacgatcgtagccctgccagggagcctggagacgtgagcgctcgcactcgatcaggaggcggcggtggccgctctgccactacagcaatgccaccccctgttcccaatggcaatcttcatcagcatgatcctcaggacctgagacataacggtaatgtcgtggtggccgggcgcccttcttgttcccgcggccccaggcgggcaattcagaagccccagcccgccggaggccggagatctgggcgggggcccgctgcgggagggttgtgccttcagcctcctgatggagggacttgcgtgccagaagagccgccagtgcccccaatggactgggaagctctcgagaaacacctcgctggccttcagttcagagagcaggaagttcgaaaccaggggcaagcacgaacaaatagtacatccgctcagaaaaacgaaagagagtccatccggcaaaagctggctctgggttccttctttgatgatgggccagggatatatacctcttgttccaaatcaggcaagccatccctgtcttcgagattgcagtcagggatgaacctgcagatctgctttgtgaacgattcaggatccgataaggactctgacgcagatgacagtaaaactgaaacttcccttgacaccccactctctccgatgagcaaacagtctagttcttactcggatcgtgataccactgaagaggagtctgagtccttggatgatatggactttctgaccagacaaaagaaactccaggcagaggccaagatggcgttagcgatggcaaagcccatggccaagatgcaggtggaggttgagaaacagaataggaaaaagagcccagtggcagacctgttgccccatatgcctcacattagtgaatgcctcatgaagcgctccctgaagcctaccgaccttcgggatatgactataggccagctgcaggttatcgtgaacgatctccactcgcaaatcgagtctctgaacgaggaactggtgcagttgcttttgatccgcgacgaattacacaccgaacaagacgcaatgctggtggacatcgaggatctgacccgccacgccgaatcccagcaaaaacacatggcagagaagatgcccgctaaatag

SEQ ID NO: 180745 - DNA, 1464 bp, Artificial Sequence
  derived and/or modified sequence
atggagcgaagcggacaaagggtaactacgtgggattgcgatcagggtaagcattccgattcagactaccgggaggatggtatggatcttggctctgatgcaggctccagcagcagctcatcacgggcttctagtcagagcaattctaccaaggtcacaccttgctcggaatgcaaaagtagctcctccccagggggttcccttgacctagtgtccgcactggaagattatgaagagccttttcccgtttatcagaaaaaagtgatcgacgagtgggctcctgaggaagacggagaagaagaggaggaggaggatgagcgagatcagagagggtatagggatgatcgatccccggcaagagagccgggagacgtgtcagcaaggactcgatcgggcggtggaggtggaagatcggctaccactgcgatgcctcctccagtccctaacggaaacctacatcagcatgatcctcaggacttgagacacaatgggaatgtggtcgtcgcgggtcgcccatcctgcagcagaggaccgcgacgggcaattcagaagccccagccagcaggcggaagacggtctgggagggggccagccgctggtggactctgtcttcagcctcccgacggtggaacctgtgtgccagaggagcctccggttcccccaatggattgggaagctctcgaaaagcacctagcaggcttacagttccgagaacaagaagtacggaaccagggtcaagcgagaactaatagtacttccgctcagaagaatgagcgagagagcatccgccagaagctggcactgggcagcttcttcgatgacggtcccggaatatacacgtcttgttcaaagtcaggcaaacccagcctctcctcccgcctccagagcggcatgaacttacagatctgcttcgtaaatgacagcggcagtgacaaggactctgatgccgacgacagcaagactgagacttccctagacacgcctcttagccctatgagtaagcaatcaagttcatactcagacagggatacaacagaggaggaaagcgagtcactagacgacatggacttcctgacccgacagaagaagctccaggccgaggcgaaaatggcattggccatggcaaagcctatggccaaaatgcaggtcgaggtggaaaagcaaaaccgtaagaaatcccccgtagctgatctgctcccacatatgccacacatttctgaatgtctgatgaaacggtcactgaagcccactgacttgcgggatatgaccatcggccagctgcaggtgatcgtaaatgatctccatagccagattgagagcttaaacgaagagttagtgcaactcctccttatacgcgacgaactccatacagagcaggacgctatgctggtggacattgaggacctcacacggcacgcagaatcacagcagaaacacatggctgagaaaatgccagccaagtag

SEQ ID NO: 180746 - protein, 210 aa, Artificial Sequence [sequence omitted]

SEQ ID NO: 180747 - DNA, 633 bp, Artificial Sequence
  derived and/or modified sequence
atgaccgccgcccaggccgccggcgaggaggccccccccggcgtgagaagcgtgaaggtggtgctggtgggcgacggcggctgcggcaagaccagcctgctgatggtgttcgccgacggcgccttccccgagagctacacccccaccgtgttcgagagatacatggtgaacctgcaggtgaagggcaagcccgtgcacctgcacatctgggacaccgccggccaggacgactacgacagactgagacccctgttctaccccgacgccagcgtgctgctgctgtgcttcgacgtgaccagccccaacagcttcgacaacatcttcaacagatggtaccccgaggtgaaccacttctgcaagaaggtgcccatcatcgtggtgggctgcaagaccgacctgtgcaaggacaagagcctggtgaacaagctgagaagaaacggcctggagcccgtgacctaccacagaggccaggagatggccagaagcgtgggcgccgtggcctacctggagtgcagcgccagactgcacgacaacgtgcacgccgtgttccaggaggccgccgaggtggccctgagcagcagaggcagaaacttctggagaagaatcacccagggcttctgcgtggtgacctag

SEQ ID NO: 180748 - DNA, 633 bp, Artificial Sequence
  derived and/or modified sequence
atgaccgcagcccaggctgccggggaggaagctcccccgggcgtcaggtcagtgaaggtggtgctggtcggcgatggaggctgcggcaaaacttcactgctgatggttttcgccgatggtgcattccctgaatcttacacccccaccgtgttcgaaaggtacatggtcaatctgcaagtcaaggggaagccagtccacctgcacatttgggacacagcggggcaggacgactacgatagactaaggcctctgttttaccccgacgccagcgtcctcctgctgtgctttgatgtgacatctccgaacagttttgataacatcttcaatagatggtatcctgaagtgaaccatttctgcaagaaggtgcctataatcgtggtgggatgtaagactgacctttgtaaagacaagtccctggttaacaagctgagacggaacggacttgagcctgtgacctatcatagagggcaggaaatggctaggtctgtgggagcggttgcgtatttagaatgcagcgcaaggctgcacgataatgtccatgctgttttccaggaagcggcggaggtggctctgtcctctcgcggccggaacttttggcggagaattactcagggcttctgtgtggtgacctag

SEQ ID NO: 180749 - DNA, 633 bp, Artificial Sequence
  derived and/or modified sequence
atgacagctgcccaggccgccggggaggaggcccctcctggggtgcgctctgtgaaggtggtgctggtgggagatggcggctgtgggaagaccagcctgctgatggtgtttgctgatggagccttccctgagagctacacccccaccgtgtttgagcgctacatggtgaacctgcaggtgaagggcaagcctgtgcacctgcacatctgggacacagctggccaggatgattatgaccggctgcggcccctcttctacccagatgcctctgtgctgctgctgtgctttgatgtgaccagccccaacagctttgacaacatcttcaaccgctggtacccagaggtgaaccacttctgcaagaaggtgcccatcatcgtggtgggctgcaagacagacctgtgcaaggacaagagcctggtgaacaagctgcggagaaatggcctggagcctgtgacctaccaccggggccaggagatggcccggtctgtgggcgctgtggcctacctggagtgcagcgcccggctgcatgacaacgtgcatgctgtgttccaggaggccgctgaggtggccctgagcagccggggcaggaacttctggaggcgcatcacccagggcttctgtgtggtgacctag

SEQ ID NO: 180750 - DNA, 633 bp, Artificial Sequence
  derived and/or modified sequence
atgaccgccgcccaggccgccggcgaggaggccccccccggcgtgcggagtgtgaaggtggtcctagtaggagatgggggctgtggcaaaactagtctgctgatggtgttcgccgacggggcatttcctgagagctacactccaactgtcttcgaacggtacatggtaaatctgcaggtgaaaggcaagccggtccacctgcatatatgggatacagcaggacaggacgactacgatcgccttcgcccactcttctatccagacgcaagcgtgctcttgctctgctttgatgtcacttcacccaactcctttgacaatatattcaaccgatggtaccccgaagttaatcacttttgtaaaaaggtcccaatcattgtggtgggctgtaaaaccgatctgtgcaaggataagtcattagtcaataagctgcgtaggaatggccttgaacctgttacttatcatcgtgggcaggaaatggcccgcagcgtgggcgctgtggcttatctggaatgtagtgcccggcttcacgacaatgtgcacgcagtttttcaggaggccgcagaagtggctctgagcagtcggggacggaatttctggaggcgaatcacccagggcttttgcgtggtgacctag

SEQ ID NO: 180751 - DNA, 633 bp, Artificial Sequence
  derived and/or modified sequence
atgactgccgctcaggccgcaggtgaggaggcaccgcctggggttaggtctgtgaaggttgtgctggtcggcgatggcggttgtggcaaaacctccctgttgatggtatttgcagatggggcattcccagaatcttataccccgaccgtcttcgaaagatacatggtcaacttgcaagttaaaggaaaacctgtccatttgcacatttgggacaccgccggtcaggatgactacgatagacttaggccgctgttctacccagacgccagcgtgcttcttctgtgtttcgacgtgactagtccgaattcctttgacaacatctttaatcggtggtacccagaagtcaaccacttctgcaagaaagtcccaataattgttgtagggtgcaaaaccgacctttgtaaagacaaaagcctggtgaacaagttacggagaaacggcctggagccagttacctatcaccgagggcaggaaatggctcgctcagtcggggcagtcgcctatctcgagtgctccgcacggctgcacgacaatgtgcatgctgtgtttcaggaggccgctgaggtcgcactgtccagccgagggcgtaacttttggcgtcgcattacacagggattttgcgtggttacgtag

SEQ ID NO: 180752 - DNA, 1129 bp, Artificial Sequence
  derived and/or modified sequence
attcctgccccgccgggcctgccccgcgcagtctgggtctctgcgccgcagccgcccgcccgcccgctcagcgcccggccccgggatgacggcggcccaggccgcgggtgaggaggcgccaccaggcgtgcggtccgtcaaggtggtcctggtgggcgacggcggctgcgggaagacgtcgctgctgatggtcttcgccgatggggccttccccgagagctacacccccacggtgtttgagcggtacatggtcaacctgcaagtgaaaggcaaacctgtgcacctccacatctgggacacagcagggcaagatgactatgaccgcctgcggcccctgttctaccctgacgccagcgtcctgctgctttgcttcgatgtcaccagcccgaacagctttgacaacatctttaaccggtggtacccagaagtgaatcatttctgcaagaaggtacccatcatcgtcgtgggctgcaagactgacctgtgcaaggacaaatcactggtgaacaagctccgaagaaacggattggagcctgtgacctaccacaggggccaggagatggcgaggtccgtgggcgcggtggcctacctcgagtgctcggctcggctccatgacaacgtccacgccgtcttccaggaggccgccgaggtggccctcagcagccgcggtcgcaacttctggcggcggattacccagggcttttgcgtggtgacctgagcggctcggggcgtcccagcgacgcgggaaggggcagggcgctgacctgctgctgagctggctgggctggacccggtccctaggctgtgaccgccgaactccactgcaacagacgggcgccaccaaagccaggccctgaggcctgggagtcctggactgagaaagggggttcctgggcccacctgctctgtgtagggctcgtcctgcggtgcccgagaatcactcgctaacccctatgcccggtcccggaccgacatcctggagccgcctgtgcagcctgatgccccctcgtggctgctcccagggctgcacctgccaggacctaatgttcttaggtccctctggccagaacccacacccggccccttcccacctgtcatactggtaactgtaacaagaaaaacgacatca

SEQ ID NO: 180753 - protein, 309 aa, Artificial Sequence
  derived and/or modified sequence
MEQLLGIKLGCLFALLALTLGCGLTPICFKWFQIDAARGHHRLVLRLLGCISAGVFLGAGFMHMTAEALEEIESQIQKFMVQNRSASERNSSGDADSAHMEYPYGELIISLGFFFVFFLESLALQCCPGAAGGSTVQDEEWGGAHIFELHSHGHLPSPSKGPLRALVLLLSLSFHSVFEGLAVGLQPTVAATVQLCLAVLAHKGLVVFGVGMRLVHLGTSSRWAVFSILLLALMSPLGLAVGLAVTGGDSEGGRGLAQAVLEGVAAGTFLYVTFLEILPRELASPEAPLAKWSCVAAGFAFMAFIALWA

SEQ ID NO: 180754 - DNA, 930 bp, Artificial Sequence
  derived and/or modified sequence
atggagcagcttttgggaatcaagctgggatgcctgttcgcattactggcattgacactggggtgcggcctcacgccaatttgctttaagtggtttcagattgatgctgcccgaggacaccaccgcttggtgctgcgcctgcttggctgcatttccgctggcgtcttcctcggcgcaggatttatgcatatgaccgccgaggccttagaagagattgagagtcagattcagaaatttatggttcagaatagatccgcttccgagcgcaacagttccggggatgcagatagtgcccatatggaatatccctacggcgagttaattatttctctaggattctttttcgtgttcttcctggagtctctggccctgcagtgctgccccggcgccgctggtggctccactgtacaggacgaagaatggggcggcgcgcacatcttcgagctgcattcacacggacacctccccagcccatctaagggccctctgagagccctcgttctcctgctcagtttgagttttcattcagtgttcgagggcctagccgtaggtctacagcccaccgtggccgcgacggtacaactatgtctcgccgtactggcccacaagggcctcgttgtgtttggggttgggatgaggctggtccatctgggtacctcctctaggtgggccgtcttctccatccttctgctggctctgatgagcccactgggtcttgctgttggactcgcggtgaccggaggtgactctgaaggaggaagagggcttgcgcaggccgtgctcgagggagtggccgccgggacctttctgtacgtaactttccttgagattctcccccgcgagctggccagtccagaagcccctctggctaagtggtcttgtgtagctgcgggttttgcgtttatggcatttattgcgttgtgggcctag

SEQ ID NO: 180755 - DNA, 930 bp, Artificial Sequence
  derived and/or modified sequence
atggagcagctgctgggcatcaagctgggctgcctgtttgccctgctggccctgaccctgggctgcggcctgacccccatctgcttcaagtggttccagattgatgctgcccggggccaccaccggctggtgctgcggctgctgggctgcatctctgctggggtcttcctgggcgccggcttcatgcacatgacagctgaggccctggaggagattgagagccagatccagaagttcatggtgcagaacagaagtgccagcgagaggaacagcagtggagatgctgacagcgcccacatggagtacccctacggggagctgatcatcagcctgggcttcttctttgtgttcttcctggagagcctggccctgcagtgctgccctggagctgctgggggcagcacagtgcaggatgaggagtggggcggggcccacatctttgagctgcacagccacggccacctgcccagccccagcaagggccccctgcgggccctggtgctgctgctgagcctgtccttccacagcgtgtttgagggcctggccgtgggcctgcagcccaccgtggccgccaccgtgcagctgtgcctggccgtgctggcccacaagggcctggtggtgtttggagtgggcatgaggctggtgcacctgggcaccagcagccgctgggccgtgttcagcatcctgctgctggccctgatgagccccctgggcctggccgtgggcctggccgtgactggaggagacagcgagggcggccggggcctggcccaggccgtgctggagggcgtggccgccggcaccttcctgtatgtgaccttcctggagatcctgccccgggagctggccagccctgaggcccccctggccaagtggagctgtgtggccgccggctttgccttcatggccttcatcgccctgtgggcctag

SEQ ID NO: 180756 - DNA, 930 bp, Artificial Sequence
  derived and/or modified sequence
atggagcagctgctgggcatcaagctgggctgcctgttcgccctgctggccctaactttgggatgtggattaactccaatctgtttcaagtggttccagattgatgctgccagaggccatcaccgcctggtactcagactgttgggctgtatcagtgcaggcgtcttcctcggagcgggcttcatgcacatgacagctgaggcgttggaggaaatcgaatcccagatccagaaatttatggtacaaaataggagtgcaagtgaacgtaactcttcaggtgatgccgacagtgcacatatggaatacccctacggcgagttgatcatttctctgggatttttcttcgtctttttcctggagagcttggccctacagtgttgtcctggagccgctggcggaagcaccgtgcaagatgaggagtggggcggggcgcatatctttgaactgcacagtcatggacaccttccctcgccatctaaagggcctctcagagccttggtgctgctgctcagcctgagctttcactccgtctttgaggggttagctgtgggacttcagcctacagtggcagctaccgtccagctatgcctcgcagtgctcgctcataaggggcttgtggtctttggcgtgggcatgcgtcttgtacatttgggtacctcctcccgatgggccgttttctccattcttcttctggcccttatgagccccttggggttggccgtgggactggcagtgactggaggcgatagtgaaggtgggcgcggcttagctcaggcagttctggagggagttgccgccggtaccttcctgtatgtaactttcctggaaattctgccaagggaacttgcttcacccgaggcccctctagcaaagtggagctgcgtcgcagcggggttcgcctttatggcgttcattgcactgtgggcctag

SEQ ID NO: 180757 - DNA, 930 bp, Artificial Sequence
  derived and/or modified sequence
atggagcaactgctgggtataaagttgggttgccttttcgcgctcctagcgctgacccttggatgtggacttacacccatttgcttcaagtggttccagatcgacgcagctaggggccatcaccggttagttctgaggctgttgggctgtataagcgcaggggtgtttctcggtgccggttttatgcacatgacggcggaagctctcgaggagattgaatcccagatccagaagtttatggtccagaacagatccgcttctgaacgtaatagctcgggggacgccgatagcgctcatatggagtatccctatggtgagctaatcattagtttgggattcttcttcgtcttcttcctggagagcttggctttgcaatgttgcccgggagctgcgggaggtagcacagtgcaggatgaagaatgggggggagcacacatttttgagcttcattctcacggacacctcccttccccctcaaaggggcctctgcgggcactcgtactgcttttgagtctgagctttcattcagtgttcgagggactggctgtcggcctccagcctaccgtggccgctacagtacagttgtgtctggccgtgctcgcacataagggcttggtggtgttcggggtgggaatgcgcctcgtgcaccttgggacatctagtaggtgggctgtcttttcaattctgctgctggcccttatgtctcctctgggacttgcagtcggattggccgtgaccggcggagattccgaagggggtagaggccttgctcaggccgtgctagaaggcgtggctgcgggtacattcctctacgtgactttcctcgaaattctccctagagagctcgccagtccagaggctcccttagctaaatggtcctgcgtcgcagctgggtttgcatttatggcgttcattgcactgtgggcctag

SEQ ID NO: 180758 - DNA, 1379 bp, Artificial Sequence
  derived and/or modified sequence
tgcagaagcagaagcaacacagaaagaagataccaacagcctcctgaaactcacgagagtggacactccagtgttgaccacctaagataccactcctgctccaaagattacagctcccttgtcattctgactcctgggcttaccctacaccccagagatggagcaactactaggaataaaacttggctgcctgtttgccctgttggctctcactctgggctgtggccttactcccatctgcttcaaatggttccagattgatgcagccagaggtcatcaccggctagtcctcagactcctgggctgtatttctgctggtgttttcctgggagcagggttcatgcatatgactgctgaagccctggaggaaattgaatcacagattcagaagttcatggtgcagaacagatcagcaagtgagagaaattcttctggtgatgctgattcagctcatatggagtatccctatggagagctcatcatctccctgggcttcttttttgtcttctttttggagtcgctggcattgcagtgctgtcctggggctgctggaggatcgacagtgcaggacgaagaatggggtggggctcatatcttcgaactccacagccatggacatttaccctcaccctcaaagggtcccctccgagcccttgtcctcttgctgtcactctcctttcactcagtgtttgaagggctagctgtggggctgcagccgacagtagcagctaccgtgcagctctgccttgctgtcctggctcataaggggcttgtggtgtttggtgtaggaatgcggctagtgcatttaggtaccagctcacgatgggcagtgttctccatactattattagctctcatgtcccccctgggcctagccgtagggctggctgtgactggaggggactctgaaggagggcggggcttagcccaggctgtgttagagggtgtggcagctggtaccttcctgtatgtcaccttcctagaaattcttccacgggagctagctagtcctgaggcccctctagctaagtggagctgtgtagccgctggttttgccttcatggcctttattgccttgtgggcctgagagattcctggcttttctgatggacctatttaggacaacctctctatccccagggagacctcccaaatggctttgaccctcagacatttctttactcagactaaatagcattcagtaggactggactggaccccaggtttcctttacatgagatcccatttctcaccctggactaagacaaagatatttaggttgagcagctattaattggagaattggtacagagacgctccagattttattcttatcccatttatgctactgtgtgtaataaaatgcccattttaccctc

SEQ ID NO: 180759 - DNA, 930 bp, Artificial Sequence
  derived and/or modified sequence
atggagcagctgctgggcatcaagctgggctgcctgttcgccctgctggccctgaccctgggctgcggcctgacccccatctgcttcaagtggttccagatcgacgccgccagaggccaccacagactggtgctgagactgctgggctgcatcagcgccggcgtgttcctgggcgccggcttcatgcacatgaccgccgaggccctggaggagatcgagagccagatccagaagttcatggtgcagaacagaagcgccagcgagagaaacagcagcggcgacgccgacagcgcccacatggagtacccctacggcgagctgatcatcagcctgggcttcttcttcgtgttcttcctggagagcctggccctgcagtgctgccccggcgccgccggcggcagcaccgtgcaggacgaggagtggggcggcgcccacatcttcgagctgcacagccacggccacctgcccagccccagcaagggccccctgagagccctggtgctgctgctgagcctgagcttccacagcgtgttcgagggcctggccgtgggcctgcagcccaccgtggccgccaccgtgcagctgtgcctggccgtgctggcccacaagggcctggtggtgttcggcgtgggcatgagactggtgcacctgggcaccagcagcagatgggccgtgttcagcatcctgctgctggccctgatgagccccctgggcctggccgtgggcctggccgtgaccggcggcgacagcgagggcggcagaggcctggcccaggccgtgctggagggcgtggccgccggcaccttcctgtacgtgaccttcctggagatcctgcccagagagctggccagccccgaggcccccctggccaagtggagctgcgtggccgccggcttcgccttcatggccttcatcgccctgtgggcctag

SEQ ID NO: 180760 - protein, 214 aa, Artificial Sequence
  derived and/or modified sequence
MAFQQLSGVNAVMFYAETIFEEAKFKDSSLASVVVGVIQVLFTAVAALIMDRAGRRLLLVLSGVVMVFSTSAFGAYFKLTQGGPGNSSHVAISAPVSAQPVDASVGLAWLAVGSMCLFIAGFAVGWGPIPWLLMSEIFPLHVKGVATGICVLTNWLMAFLVTKEFSSLMEVLRPYGAFWLASAFCIFSVLFTLFCVPETKGKTLEQITAHFEGR

SEQ ID NO: 180761 - protein, 477 aa, Artificial Sequence
  derived and/or modified sequence
MTPEDPEETQPLLGPPGGSAPRGRRVFLAAFAAALGPLSFGFALGYSSPAIPSLQRAAPPAPRLDDAAASWFGAVVTLGAAAGGVLGGWLVDRAGRKLSLLLCSVPFVAGFAVITAAQDVWMLLGGRLLTGLACGVASLVAPVYISEIAYPAVRGLLGSCVQLMVVVGILLAYLAGWVLEWRWLAVLGCVPPSLMLLLMCFMPETPRFLLTQHRRQEAMAALRFLWGSEQGWEDPPIGAEQSFHLALLRQPGIYKPFIIGVSLMAFQQLSGVNAVMFYAETIFEEAKFKDSSLASVVVGVIQVLFTAVAALIMDRAGRRLLLVLSGVVMVFSTSAFGAYFKLTQGGPGNSSHVAISAPVSAQPVDASVGLAWLAVGSMCLFIAGFAVGWGPIPWLLMSEIFPLHVKGVATGICVLTNWLMAFLVTKEFSSLMEVLRPYGAFWLASAFCIFSVLFTLFCVPETKGKTLEQITAHFEGR

SEQ ID NO: 180762 - DNA, 1434 bp, Artificial Sequence
  derived and/or modified sequence
atgacgccagaggacccagaggagacccaaccgctgctcggacctcccggggggagcgctccacgcgggcgaagggttttcctggcagctttcgcagcggctctggggcctctttcatttggtttcgctctcggatattctagtcctgcaatacccagtcttcagcgcgctgcaccacccgccccaaggctggatgacgcagctgcctcatggtttggagccgttgtgaccttgggtgctgccgctgggggggtcctcggaggctggcttgtagaccgcgccggtcgtaagctgtctctgcttctctgttccgtccccttcgtagcagggtttgccgtgataaccgctgcgcaggacgtatggatgcttttgggcggtcgtctgctgaccgggctggcttgtggagtggcctcattagtggctcccgtgtacatttctgaaatagcctaccccgcagtacgcggcttgcttggaagctgtgtgcagttaatggttgtagtgggtatccttctagcctatttagcgggatgggtgttagagtggagatggcttgcagtattgggatgcgtcccccccagtctaatgttacttttaatgtgtttcatgcctgagacccctagatttctgctcacccagcataggcggcaggaggccatggctgctctgaggttcctgtggggatcggaacagggttgggaagatccaccgatcggggctgagcagtcttttcacttagctcttctccgccaaccggggatctacaaacctttcatcattggggttagcctcatggcgtttcagcagttgagcggggtgaacgccgtcatgttctacgcagagacaatctttgaagaagctaagtttaaggattcttcactagccagcgtggtcgtgggggttattcaagtgctcttcaccgccgtcgccgccctaattatggaccgggccgggcgcaggctcttgctcgttctgtcgggagtcgtgatggtatttagcacatcagcattcggtgcctactttaagctcacacagggtggccccgggaactcctctcatgtagcgatttctgctccagtctccgcccagcccgtggacgcgagtgtgggactggcctggctggccgtgggaagtatgtgtttgtttatcgcaggctttgctgttggatggggccccatcccatggttgctgatgtctgaaattttcccactgcatgtaaagggagtggccaccggcatttgtgtgttgaccaactggcttatggcctttctggtaactaaggagttctcatcactgatggaagtgctgcgcccctacggagctttttggcttgcgtccgcgttctgcatctttagcgttctttttaccctgttctgcgtgcctgaaaccaagggtaagacattggagcagatcacggctcattttgaagggagatag

SEQ ID NO: 180763 - DNA, 1434 bp, Artificial Sequence
  derived and/or modified sequence
atgaccccagaggaccctgaggagacccagcccctgctgggccccccaggcggcagcgccccccggggccggcgggtcttcctggccgcctttgctgctgccctgggccccctgagctttggatttgccctgggctacagcagccctgccatccccagcctgcagagagctgcccccccagccccccggctggatgatgctgctgcctcctggtttggagctgtggtgaccctgggcgctgctgctgggggcgtgctgggcggctggctggtggaccgggccggcaggaagctgagcctgctgctgtgcagcgtgccctttgtggccggctttgctgtgatcacagctgcccaggatgtgtggatgctgctgggcggccgcctgctgaccggcctggcctgtggggtggccagcctggtggcccctgtgtacatcagcgagatcgcctacccagctgtgcggggcctgctgggcagctgtgtgcagctgatggtggtggtgggcatcctgctggcctacctggccggctgggtgctggagtggcgctggctggccgtgctgggctgtgtgccccccagcctgatgctgctgctgatgtgcttcatgcctgagaccccccgcttcctgctgacccagcaccggcggcaggaggccatggccgccctgcgcttcctgtggggcagcgagcagggctgggaggacccccccatcggggctgagcagagcttccacctggccctgctgcggcagcccggcatctacaagcccttcatcattggagtgtccctgatggccttccagcagctgagcggcgtgaatgctgtgatgttttatgcagagaccatctttgaggaggccaagttcaaggacagcagcctggcctctgtggtggtgggcgtcatccaggtgctcttcaccgctgtggccgccctgatcatggaccgggccggccggcggctgctgctggtgctgtctggagtggtgatggtgttcagcaccagcgccttcggggcctacttcaagctgacccagggcggccctggcaacagcagccacgtggccatcagcgcccctgtgtctgcccagcctgtggatgcctctgtgggcctggcctggctggccgtgggctccatgtgcctcttcatcgccggctttgctgtgggctggggccccatcccctggctgctgatgtctgagatcttccccctgcacgtgaagggcgtggccaccggcatctgtgtgctgaccaactggctgatggccttcctggtgaccaaggagttcagcagcctgatggaggtgctgcggccctacggggccttctggctggccagcgccttctgcatcttctctgtgctcttcaccctcttctgtgtgcctgagaccaagggcaagaccctggagcagatcacagcccactttgagggccgctag

SEQ ID NO: 180764 - DNA, 1434 bp, Artificial Sequence
  derived and/or modified sequence
atgacccccgaggaccccgaggagacccagcccctgctgggcccccctggaggctcggctcccagaggacgccgcgtctttttggcggcctttgcagccgcattgggcccactgagcttcggcttcgcactggggtattcttcgccagccataccaagtctgcagcgcgctgcccctcccgcacccaggctagatgacgccgctgcctcttggtttggcgctgtggtgacactgggagccgccgcaggcggggttttggggggctggctggttgaccgcgccggacgaaaattgtctctcctgttgtgttcggtaccattcgtggccgggttcgctgtgatcacggctgcccaggacgtttggatgttgctagggggcaggcttctaacagggcttgcctgtggggtagcctccctggtggcccctgtgtacattagcgagatcgcttaccctgccgtgcgcggtcttttaggctcttgtgttcagcttatggtagtcgtgggtatcctcctggcctatctggctggttgggtgcttgagtggagatggcttgctgtgctgggatgcgtgccaccgtcattgatgctactcctgatgtgtttcatgccagaaacacctagattcttgctgactcagcatcgacgccaggaagctatggcggcattgaggttcctgtgggggagtgaacagggttgggaggaccctcccattggagcggagcaatcattccatctggccctgttacggcagccgggcatttataagccatttataattggcgtcagtctgatggccttccagcagctttcaggagtaaacgcggttatgttttatgccgagacaattttcgaggaggccaagtttaaggactcttcactagccagtgtggttgttggagttatacaagtactgtttactgctgtggctgccctgattatggatagagctggacgaaggctgcttctggtgctttcaggggttgtaatggtattttctacatccgccttcggtgcatacttcaagctgactcagggtggcccaggaaattcttctcatgtggctatctccgctccagtcagtgctcagccagtcgatgcctccgtcggacttgcatggttggcggtggggtctatgtgcttgtttattgccggtttcgctgtgggatgggggcccataccttggttgctgatgagtgaaatctttccactccatgtgaagggcgtcgcaactgggatctgcgtcttgactaactggttgatggccttcctggtgaccaaagagtttagcagtttgatggaagttttgcggccttatggtgccttttggctcgctagcgccttctgcatcttttccgttctgttcacactattttgtgtgccggagaccaaggggaagactctagaacagattactgcgcacttcgagggcagatag

SEQ ID NO: 180765 - DNA, 1434 bp, Artificial Sequence
  derived and/or modified sequence
atgaccccggaggacccagaggaaacacagcctctcctcggtccacctggcggatctgctcctagggggaggcgggtattcctcgccgcttttgctgcggcattggggccattgtcttttggatttgcccttggctatagctcaccggctatccctagcctccagcgggctgctccaccggctcctcggttggatgacgctgcagcctcgtggtttggcgctgtggttactcttggggctgccgctggtggcgtgctgggaggatggctggtcgaccgcgctgggaggaaacttagcctgctactgtgctcagtgccctttgtggctggattcgccgtcataaccgctgctcaggacgtgtggatgctgcttggaggcaggttactgaccggactcgcttgcggcgtggcttctctcgtcgcaccagtgtatattagcgaaatcgcctacccggcagtacgaggactgttgggttcgtgcgtgcagttgatggtagttgtgggaattcttctggcctacctagctggatgggttctggagtggagatggctggctgtactgggctgtgttcctccgtccctaatgcttctcctcatgtgcttcatgccagagacaccacggttcctgctcacacagcataggaggcaggaagccatggccgctctgaggtttctctgggggtccgagcagggctgggaggatccccctattggagccgaacagtctttccacttggccctgctgcgacaacctggcatttacaaaccttttatcataggggtgtccctcatggccttccagcaattgtctggtgtcaacgccgttatgttttatgctgaaactatctttgaggaggcaaaatttaaggatagtagtctcgctagcgttgttgtgggagtgatccaggtgctctttacggcagtggcggcattaatcatggatcgggctgggcgaagacttcttctggtgctatcgggggtcgtcatggtcttttccacctcagcgtttggagcctatttcaagttaacacagggcggacccggaaattcctcccatgttgcaatttctgcacccgtgagcgctcagcctgtcgatgcatcagtaggactggcctggctagctgtaggcagtatgtgtctctttatagcaggctttgccgtgggctggggacccatcccatggctgttaatgagcgaaatctttcccctccatgtcaaaggagtggccacgggaatttgtgtgctcacaaattggctgatggcgtttctggtgactaaggagtttagctccctgatggaggtcctacggccatatggtgcattttggctcgcctccgcattctgcatctttagcgtcctgtttaccctgttctgtgtgcccgaaacgaagggcaaaacacttgagcaaattaccgcccactttgagggccgttag

SEQ ID NO: 180766 - DNA, 2172 bp, Artificial Sequence
  derived and/or modified sequence
attggctgcgagaggccggtgcgggccgcactcgcagggcccgtggcggttcaggcgccagagctggccgatcggcgttggccgccgacatgacgcccgaggacccagaggaaacccagccgcttctggggcctcctggcggcagcgcgccccgcggccgccgcgtcttcctcgccgccttcgccgctgccctgggcccactcagcttcggcttcgcgctcggctacagctccccggccatccctagcctgcagcgcgccgcgcccccggccccgcgcctggacgacgccgccgcctcctggttcggggctgtcgtgaccctgggtgccgcggcggggggagtgctgggcggctggctggtggaccgcgccgggcgcaagctgagcctcttgctgtgctccgtgcccttcgtggccggctttgccgtcatcaccgcggcccaggacgtgtggatgctgctggggggccgcctcctcaccggcctggcctgcggtgttgcctccctagtggccccggtctacatctccgaaatcgcctacccagcagtccgggggttgctcggctcctgtgtgcagctaatggtcgtcgtcggcatcctcctggcctacctggcaggctgggtgctggagtggcgctggctggctgtgctgggctgcgtgcccccctccctcatgctgcttctcatgtgcttcatgcccgagaccccgcgcttcctgctgactcagcacaggcgccaggaggccatggccgccctgcggttcctgtggggctccgagcagggctgggaagacccccccatcggggctgagcagagctttcacctggccctgctgcggcagcccggcatctacaagcccttcatcatcggcgtctccctgatggccttccagcagctgtcgggggtcaacgccgtcatgttctatgcagagaccatctttgaagaggccaagttcaaggacagcagcctggcctcggtcgtcgtgggtgtcatccaggtgctgttcacagctgtggcggctctcatcatggacagagcagggcggaggctgctcctggtcttgtcaggtgtggtcatggtgttcagcacgagtgccttcggcgcctacttcaagctgacccagggtggccctggcaactcctcgcacgtggccatctcggcgcctgtctctgcacagcctgttgatgccagcgtggggctggcctggctggccgtgggcagcatgtgcctcttcatcgccggctttgcggtgggctgggggcccatcccctggctcctcatgtcagagatcttccctctgcatgtcaagggcgtggcgacaggcatctgcgtcctcaccaactggctcatggcctttctcgtgaccaaggagttcagcagcctcatggaggtcctcaggccctatggagccttctggcttgcctccgctttctgcatcttcagtgtccttttcactttgttctgtgtccctgaaactaaaggaaagactctggaacaaatcacagcccattttgaggggcgatgacagccactcactaggggatggagcaagcctgtgactccaagctgggcccaagcccagagcccctgcctgccccaggggagccagaatccagccccttggagccttggtctgcagggtccctccttcctgtcatgctccctccagcccatgacccggggctaggaggctcactgcctcctgttccagctcctgctgctgctctgaggactcaggaacaccttcgagctttgcagacctgcggtcagccctccatgcgcaagactaaagcagcggaagaggaggtgggcctctaggatctttgtcttctggctggaggtgcttttggaggttgggtgctgggcattcagtcgctcctctcacgcggctgccttatcgggaaggaaatttgtttgccaaataaagactgacacagaaaatcaggtcagtgtctctgggctttgtgcaagctcagtttgaaaagggtttattcccatcactgcccaggacaccctgtggctttacttgctcatggtcagccaagcttacccttcacactgagaagtcatttctggctacttccttgggctcagttccctgggtcatcagccatcaaatcttgttgagtttaaaaaataaacagcaaaaaaaaacaaaacaaaacaaaaaaaaa

SEQ ID NO: 180767 - DNA, 1434 bp, Artificial Sequence
  derived and/or modified sequence
atgacccccgaggaccccgaggagacccagcccctgctgggcccccccggcggcagcgcccccagaggcagaagagtgttcctggccgccttcgccgccgccctgggccccctgagcttcggcttcgccctgggctacagcagccccgccatccccagcctgcagagagccgccccccccgcccccagactggacgacgccgccgccagctggttcggcgccgtggtgaccctgggcgccgccgccggcggcgtgctgggcggctggctggtggacagagccggcagaaagctgagcctgctgctgtgcagcgtgcccttcgtggccggcttcgccgtgatcaccgccgcccaggacgtgtggatgctgctgggcggcagactgctgaccggcctggcctgcggcgtggccagcctggtggcccccgtgtacatcagcgagatcgcctaccccgccgtgagaggcctgctgggcagctgcgtgcagctgatggtggtggtgggcatcctgctggcctacctggccggctgggtgctggagtggagatggctggccgtgctgggctgcgtgccccccagcctgatgctgctgctgatgtgcttcatgcccgagacccccagattcctgctgacccagcacagaagacaggaggccatggccgccctgagattcctgtggggcagcgagcagggctgggaggacccccccatcggcgccgagcagagcttccacctggccctgctgagacagcccggcatctacaagcccttcatcatcggcgtgagcctgatggccttccagcagctgagcggcgtgaacgccgtgatgttctacgccgagaccatcttcgaggaggccaagttcaaggacagcagcctggccagcgtggtggtgggcgtgatccaggtgctgttcaccgccgtggccgccctgatcatggacagagccggcagaagactgctgctggtgctgagcggcgtggtgatggtgttcagcaccagcgccttcggcgcctacttcaagctgacccagggcggccccggcaacagcagccacgtggccatcagcgcccccgtgagcgcccagcccgtggacgccagcgtgggcctggcctggctggccgtgggcagcatgtgcctgttcatcgccggcttcgccgtgggctggggccccatcccctggctgctgatgagcgagatcttccccctgcacgtgaagggcgtggccaccggcatctgcgtgctgaccaactggctgatggccttcctggtgaccaaggagttcagcagcctgatggaggtgctgagaccctacggcgccttctggctggccagcgccttctgcatcttcagcgtgctgttcaccctgttctgcgtgcccgagaccaagggcaagaccctggagcagatcaccgcccacttcgagggcagatag

SEQ ID NO: 180768 - protein, 170 aa, Artificial Sequence
  derived and/or modified sequence
MKTLFLGVTLGLAAALSFTLEEEDITGTWYVKAMVVDKDFPEDRRPRKVSPVKVTALGGGNLEATFTFMREDRCIQKKILMRKTEEPGKFSAYGGRKLIYLQELPGTDDYVFYCKDQRRGGLRYMGKLVGRNPNTNLEALEEFKKLVQHKGLSEEDIFMPLQTGSCVLEH

SEQ ID NO: 180769 - DNA, 513 bp, Artificial Sequence
  derived and/or modified sequence
atgaagactttgtttctgggcgttaccttggggctggctgcggccctctcgttcaccctcgaagaggaggatattaccggaacatggtatgtaaaggctatggtggtcgacaaagacttcccagaagatcgacggccacgtaaggtcagtcctgtcaaagtaactgcccttgggggaggcaacttagaagctacatttacgtttatgagagaggaccgatgcattcagaaaaaaatccttatgcgcaagaccgaggagcctggtaagttcagtgcctacgggggaagaaaactgatctatttgcaggaactacctggcacggacgactatgttttttattgtaaggaccagaggcgaggcggtctccgctatatgggcaagcttgtggggcggaatccaaatacgaatcttgaagccctagaggagtttaaaaaactcgtacaacacaagggcctatctgaggaggacatttttatgcctttgcaaacagggtcctgtgtgctggagcactag

SEQ ID NO: 180770 - DNA, 513 bp, Artificial Sequence
  derived and/or modified sequence
atgaagaccctgttcctcggggttacactgggccttgctgctgccctgagttttactctcgaggaggaagacattactgggacctggtacgtgaaggcaatggtggttgataaagactttcccgaagacagaaggcctcgcaaggttagcccggtgaaagtgactgcactgggtggtggaaacttggaggccacctttacctttatgcgggaggatcgatgcattcagaagaagattcttatgcggaagacggaggaacctggcaagttcagcgcctacggtggacgaaaactaatctacctgcaagagctgccaggaaccgacgactacgtgttctattgtaaggatcagagacgcggcggcctccgctatatgggcaagcttgttggccggaatccgaacacaaacctcgaagccctggaggaatttaagaaactcgtgcaacacaaggggctgagcgaggaagacattttcatgccactacagacagggagctgcgtgttagagcactag

SEQ ID NO: 180771 - DNA, 513 bp, Artificial Sequence
  derived and/or modified sequence
atgaagaccctcttcctgggcgtgaccctgggcctggccgccgccctgtccttcaccctggaggaggaggacatcaccggcacctggtacgtgaaggccatggtggtggacaaggacttccctgaggaccggcggcccaggaaggtgtcccctgtgaaggtgacagccctgggcggcggcaacctggaggccaccttcaccttcatgagagaagatcgctgcatccagaagaagatcctgatgaggaagacagaggagcccgggaagttcagcgcctatggaggcaggaagctgatctacctgcaggagctgcctggaacagatgattatgtgttctactgcaaggaccagaggcggggcggcctgcgctacatgggcaagctggtgggcaggaaccccaacaccaacctggaggccctggaggagttcaagaagctggtgcagcacaagggcctgtctgaggaggacatcttcatgcccctgcagacaggcagctgtgtgctggagcactag

SEQ ID NO: 180772 - DNA, 513 bp, Artificial Sequence
  derived and/or modified sequence
atgaagaccctgttcctgggcgtgaccctgggcctggccgccgccctcagcttcactctggaagaagaagacatcacaggaacatggtacgtgaaggccatggtcgttgataaagatttcccagaagaccgacgtccgaggaaagtctcaccagttaaggtcacagccctgggaggcgggaacttagaagctacctttacgtttatgagggaggatagatgtatccagaagaagattctcatgcgaaagaccgaagagccaggcaagttcagtgcctatggtggaagaaaactcatctatttgcaggaacttcctggcaccgacgattatgtcttctactgtaaagatcagagaagaggagggttgcgctatatggggaaactcgtgggcagaaaccccaacacaaacctggaggcactggaagaattcaaaaagctagtgcagcacaaggggctctctgaagaggacatttttatgcccttgcaaactgggtcttgtgtgttggaacattag

SEQ ID NO: 180773 - DNA, 513 bp, Artificial Sequence
  derived and/or modified sequence
atgaagaccctgttcctgggcgtgaccctgggcctggccgccgccttatccttcacattggaagaggaagacatcaccggaacctggtatgtaaaagccatggttgttgataaagatttccccgaggatagacggcccaggaaagtgagccccgtcaaagtaaccgctctcggcgggggtaatcttgaggctacgttcaccttcatgcgggaggacaggtgtattcagaagaagatcctgatgcgaaagacggaggagcccggcaagttctctgcttacggtgggcggaaactgatttatctgcaggaacttccagggacagacgattatgtgttctactgcaaggaccagaggcgtggcgggctccgctacatgggtaaactggtgggacgcaaccctaataccaatctcgaggcacttgaggagtttaagaagcttgtccaacataaagggcttagtgaggaggacatcttcatgccactgcagaccggaagttgtgtcttagagcactag

SEQ ID NO: 180774 - DNA, 689 bp, Artificial Sequence
  derived and/or modified sequence
cgcccagtgacctgccgaggtcggcagcacagagctctggagatgaagaccctgttcctgggtgtcacgctcggcctggccgctgccctgtccttcaccctggaggaggaggatatcacagggacctggtacgtgaaggccatggtggtcgataaggactttccggaggacaggaggcccaggaaggtgtccccagtgaaggtgacagccctgggcggtgggaacttggaagccacgttcaccttcatgagggaggatcggtgcatccagaagaaaatcctgatgcggaagacggaggagcctggcaaattcagcgcctatgggggcaggaagctcatatacctgcaggagctgcccgggacggacgactacgtcttttactgcaaagaccagcgccgtgggggcctgcgctacatgggaaagcttgtgggtaggaatcctaataccaacctggaggccctggaagaatttaagaaattggtgcagcacaagggactctcggaggaggacattttcatgcccctgcagacgggaagctgcgttctcgaacactaggcagcccccgggtctgcacctccagagcccaccctaccaccagacacagagcccggaccacctggacctaccctccagccatgacccttccctgctcccacccacctgactccaaataaagagcttctccccca

SEQ ID NO: 180775 - DNA, 914 bp, Artificial Sequence
  derived and/or modified sequence
gaggtcggcagcacagagctctggagatgaagaccctgttcctgggtgtcacgctcggcctggccgctgccctgtccttcaccctggaggaggaggatatcacagggacctggtacgtgaaggccatggtggtcgataaggactttccggaggacaggaggcccaggaaggtgtccccagtgaaggtgacagccctgggcggtgggaacttggaagccacgttcaccttcatgagggaggatcggtgcatccagaagaaaatcctgatgcggaagacggaggagcctggcaaattcagcgcctatgggggcaggaagctcatatacctgcaggagctgcccgggacggacgactacgtcttttactgcaaagaccagcgccgtgggggcctgcgctacatgggaaagcttgtgggtaggaatcctaataccaacctggaggccctggaagaatttaagaaattggtgcagcacaagggactctcggaggaggacattttcatgcccctgcagacgggaagctgcgttctcgaacactaggcgaggcctccctccggctccctcaggtgtcagctcggcccatcgccccctgcacctgtccccactcggtctactcccccccacccactcaccaaggatgctcagaggcctgcccagtcattggaggagctgaggctgctctggagccccgaggctgcccagcagtggccgatgtggaagctgcagagcctggggagggagctctgggcctggcctctgccctaccctgcagcctccctgacctctgctcctcttcccagcacagcagcccccgggtctgcacctccagagcccaccctaccaccagacacagagcccggaccacctggacctaccctccagccatgacccttccctgctcccacccacctgact

SEQ ID NO: 180776 - DNA, 513 bp, Artificial Sequence
  derived and/or modified sequence
atgaaaacactcttcttaggggtgacattgggcctagcagccgctctctcatttaccttagaagaagaagacattacaggtacatggtacgtcaaagcaatggttgtcgataaagactttccagaagaccgtcgtcctaggaaggtgtcgcccgtaaaggtaactgcactgggcggaggcaatcttgaagcgacatttacgtttatgcgggaggacagatgtatacagaagaagatcctgatgaggaagacagaagagcccggaaaattttctgcttacggaggcaggaagctgatttacctgcaggagctgcccggaacagacgattacgttttttactgtaaagatcagagacgaggcggtctgcggtacatgggaaaactggttgggagaaatccaaatactaatctggaggcgctcgaggaattcaagaagctagttcagcataagggtctgagcgaagaggatattttcatgccattgcagaccgggagttgtgtcctggagcactag

SEQ ID NO: 180777 - DNA, 513 bp, Artificial Sequence
  derived and/or modified sequence
atgaagacactctttctgggcgttacccttggactcgccgcagccttgagctttactttggaggaagaagacattactgggacttggtacgtgaaggccatggtcgtggacaaagatttcccagaagatcgccgtcccaggaaagtctccccagtcaaggtgacagcccttggcggaggcaacttggaagcaaccttcacgtttatgagagaggaccgatgtatccagaagaagatcttaatgcgaaaaacagaggagcccggaaaattctccgcctatgggggaaggaagctcatatatctgcaggagctccctggaacggacgattacgtcttttattgcaaagaccagcggcgtgggggtcttcgctatatgggtaaactggtgggcaggaaccccaatacaaaccttgaggctttggaagaatttaagaaactggtgcagcataaggggctctccgaagaggacatcttcatgcccctgcagacaggatcttgcgtgctcgaacactag

SEQ ID NO: 180778 - DNA, 513 bp, Artificial Sequence
  derived and/or modified sequence
atgaagaccctgttcctgggcgtgaccctgggcctggccgccgccctgagcttcaccctggaggaggaggacatcaccggcacctggtacgtgaaggccatggtggtggacaaggacttccccgaggacagaagacccagaaaggtgagccccgtgaaggtgaccgccctgggcggcggcaacctggaggccaccttcaccttcatgagagaggacagatgcatccagaagaagatcctgatgagaaagaccgaggagcccggcaagttcagcgcctacggcggcagaaagctgatctacctgcaggagctgcccggcaccgacgactacgtgttctactgcaaggaccagagaagaggcggcctgagatacatgggcaagctggtgggcagaaaccccaacaccaacctggaggccctggaggagttcaagaagctggtgcagcacaagggcctgagcgaggaggacatcttcatgcccctgcagaccggcagctgcgtgctggagcactag

SEQ ID NO: 180779 - protein, 365 aa, Artificial Sequence
  derived and/or modified sequence
MAKVAKDLNPGVKKMSLGQLQSARGVACLGCKGTCSGFEPHSWRKICKSCKCSQEDHCLTSDLEDDRKIGRLLMDSKYSTLTARVKGGDGIRIYKRNRMIMTNPIATGKDPTFDTITYEWAPPGVTQKLGLQYMELIPKEKQPVTGTEGAFYRRRQLMHQLPIYDQDPSRCRGLLENELKLMEEFVKQYKSEALGVGEVALPGQGGLPKEEGKQQEKPEGAETTAATTNGSLSDPSKEVEYVCELCKGAAPPDSPVVYSDRAGYNKQWHPTCFVCAKCSEPLVDLIYFWKDGAPWCGRHYCESLRPRCSGCDEIIFAEDYQRVEDLAWHRKHFVCEGCEQLLSGRAYIVTKGQLLCPTCSKSKRS

SEQ ID NO: 180780 - protein, 292 aa, Artificial Sequence
  derived and/or modified sequence
MDSKYSTLTARVKGGDGIRIYKRNRMIMTNPIATGKDPTFDTITYEWAPPGVTQKLGLQYMELIPKEKQPVTGTEGAFYRRRQLMHQLPIYDQDPSRCRGLLENELKLMEEFVKQYKSEALGVGEVALPGQGGLPKEEGKQQEKPEGAETTAATTNGSLSDPSKEVEYVCELCKGAAPPDSPVVYSDRAGYNKQWHPTCFVCAKCSEPLVDLIYFWKDGAPWCGRHYCESLRPRCSGCDEIIFAEDYQRVEDLAWHRKHFVCEGCEQLLSGRAYIVTKGQLLCPTCSKSKRS

SEQ ID NO: 180781 - DNA, 1098 bp, Artificial Sequence
  derived and/or modified sequence
atggctaaggtcgcaaaagaccttaaccccggggtaaagaaaatgtcattgggacagctgcagtctgctcggggtgtggcctgcctggggtgcaaggggacttgtagcggatttgagccacatagttggcgaaagatctgcaagtcctgcaaatgctcccaggaggatcattgcctcacctcagatctggaggacgatcgtaaaataggtagacttttaatggactccaaatactctactctcactgccagagtcaaaggcggtgacggaatacggatctacaaacgaaacaggatgatcatgaccaaccccattgcaactggtaaagaccctacgttcgacactataacgtacgagtgggcccccccgggggttacacagaagctgggcctgcagtacatggaactcattccaaaagaaaaacagccagtgacggggactgaaggcgcgttttacaggaggcggcagctgatgcatcagctgcctatctacgaccaggacccctcacgctgtagaggccttcttgaaaacgagctgaagttaatggaggagttcgttaagcaatataagagcgaagcgctcggggttggagaggtggctcttccagggcaggggggcctgcctaaggaagaaggtaagcagcaggaaaaacccgaaggggcagaaacaactgcagcaactaccaacggcagcttaagcgatccaagcaaggaagttgagtacgtgtgcgaactgtgtaaaggtgcggcccctccagattccccagttgtatatagcgatcgggccggctacaacaaacagtggcacccaacctgctttgtttgtgccaaatgttcagagcctctcgtggacctgatatatttttggaaggacggcgccccctggtgcggaagacattattgtgaaagcctgaggccaaggtgctccggatgtgatgagataatttttgcagaagattatcagcgagtggaagacttggcttggcaccggaagcacttcgtgtgcgaaggatgcgaacagcttctcagcggtcgggcatacatagtgactaaaggccagttgctgtgtcccacttgctcaaagtccaaacgttcctag

SEQ ID NO: 180782 - DNA, 1098 bp, Artificial Sequence
  derived and/or modified sequence
atggccaaggtggccaaggacctgaaccctggggtgaagaagatgagcctgggccagctgcagagcgcccggggcgtggcctgcctgggctgcaagggcacctgcagcggctttgagccccacagctggaggaagatctgcaagagctgcaagtgcagccaggaggaccactgcctgaccagtgacctggaggatgacaggaagattggccgcctgctgatggacagcaagtacagcaccctgacagcccgggtgaagggaggagatggcatccgcatctacaagaggaacaggatgatcatgaccaaccccatcgccaccgggaaggaccccacctttgacaccatcacctatgagtgggcccctcctggggtgacccagaagctgggcctgcagtacatggagctgatccccaaggagaagcagcctgtgactggaacagaaggagccttctacagaagacggcagctgatgcaccagctgcccatctatgaccaggaccccagccgctgccggggcctgctggagaatgagctgaagctgatggaggagtttgtgaagcagtacaagtctgaggccctgggcgtgggggaggtggccctgcccggccagggcggcctgcccaaggaggagggcaagcagcaggagaagccagagggcgctgagaccacagctgccaccaccaacggcagcctgagtgaccccagcaaggaggtggagtatgtgtgtgagctgtgcaagggagctgcccccccagacagccctgtggtgtacagcgaccgggccggctacaacaagcagtggcaccccacctgctttgtgtgtgccaagtgcagcgagcccctggtggacctgatctacttctggaaggatggagccccctggtgtggccgccactactgtgagagcctgcggccccgctgcagcggctgtgatgagatcatctttgctgaggactaccagagggtggaggacctggcctggcacaggaagcactttgtgtgtgagggctgtgagcagctgctgagcggccgggcctacatcgtgaccaagggccagctgctgtgccccacctgcagcaagagcaagaggagctag

SEQ ID NO: 180783 - DNA, 1851 bp, Artificial Sequence
  derived and/or modified sequence
ggacagcctcgcgctgggattggctggcctcgcgcgagcgccggcgcggagtggctggcgaggttttagagggagtcccgctctccaattaaagcggcccagctgcgcctggctgcgcacagagctccctcccaggcccgcgaacttggccattcagccgccgctgtccccgctgcgcgccctcgcgcctctgcctgagaagccaggcgctgttcccccaccccagaagaggatggcaaaggtggctaaggacctcaacccaggagttaaaaagatgtccctgggccagctgcagtcagcaagaggtgtggcatgtttgggatgcaaggggacgtgttcgggcttcgagccacattcatggaggaaaatatgcaagtcttgcaaatgcagccaagaggaccactgcctaacatctgacctagaagacgatcggaaaattggccgcttgctgatggactccaagtattccaccctcactgctcgggtgaaaggcggggacggcatccggatttacaagaggaaccggatgatcatgaccaaccctattgctactgggaaagatcccacttttgacaccatcacctacgagtgggctccccctggagtcacccagaaactgggactgcagtacatggagctcatccccaaggagaagcagccagtgacaggcacagagggtgccttttaccgccgccgccagctcatgcaccagctccccatctatgaccaggatccctcgcgctgccgtggacttttggagaatgagttgaaactgatggaagaatttgtcaagcaatataagagcgaggccctcggcgtgggagaagtggccctcccggggcagggtggcttgcccaaggaggaggggaagcagcaggaaaagccagagggggcagagaccactgctgctaccaccaacggcagtctcagtgacccgtccaaagaagtggaatacgtctgcgagctctgcaagggagcggcccctcctgacagccccgtggtctactcggacagggcaggctacaacaagcagtggcaccccacctgctttgtgtgtgccaagtgctccgagccgctggtggacctcatctacttctggaaggatggtgcaccctggtgcggccgccattactgcgagagtctgcggccccggtgctccggctgcgatgagataatattcgctgaggactaccagcgtgtggaagatctggcctggcaccgaaagcactttgtctgtgagggttgtgagcagctgctgagcggccgggcgtacatcgtcaccaagggtcagcttctgtgcccaacttgcagcaagtccaaacgctcctgaagggctgcccacccacagccagaatccacaggatcccaccgagaaggagagccaggtgtgccgagaccatcctaagggtccgatgtgacagcaagcaagtgaaataaacaatgatttgcttttcagtgagaatatatatatgagatatatatagatatatattctaggttgggtggtggtagatccttgagggtcagtagtttcaaaaccaaaaatattctaagaagtcttaggatggagttccttttctttctgttgttgtttcccagctacaaccaactaaagacacaaatggcgttctgcaaggggactctgggaggagttttccagaatgcaattccgagtgagcaaatcgcatagctgtagaatgtgcgtgcttttttgtggacacaggagctcctccaggagcaggctgggatcccaactatcgcttgttgcctctttttcaagtggaatttgaattttaaataaacaactttttttggcatgataaacagatcaataaaagttttgtgaattcc

SEQ ID NO: 180784 - DNA, 1113 bp, Artificial Sequence
  derived and/or modified sequence
attcagccgccgctgtccccgctgcgcgccctcgcgcctctgcctgagaagccaggcgctgttcccccaccccagaagaggatggcaaaggtggctaaggacctcaacccaggagttaaaaaggaaaatatgcaagtcttgcaaatgcagccaagaggaccactgcctaacatctgacctagaagacgatcggaaaattggccgcttgctgatggactccaagtattccaccctcactgctcgggtgaaaggcggggacggcatccggatttacaagaggaaccggatgatcatgaccaaccctattgctactgggaaagatcccacttttgacaccatcacctacgagtgggctccccctggagtcacccagaaactgggactgcagtacatggagctcatccccaaggagaagcagccagtgacaggcacagagggtgccttttaccgccgccgccagctcatgcaccagctccccatctatgaccaggatccctcgcgctgccgtggacttttggagaatgagttgaaactgatggaagaatttgtcaagcaatataagagcgaggccctcggcgtgggagaagtggccctcccggggcagggtggcttgcccaaggaggaggggaagcagcaggaaaagccagagggggcagagaccactgctgctaccaccaacggcagtctcagtgacccgtccaaagaagtggaatacgtctgcgagctctgcaagggagcggcccctcctgacagccccgtggtctactcggacagggcaggctacaacaagcagtggcaccccacctgctttgtgtgtgccaagtgctccgagccgctggtggacctcatctacttctggaaggatggtgcaccctggtgcggccgccattactgcgagagtctgcggccccggtgctccggctgcgatgagataatattcgctgaggactaccagcgtgtggaagatctggcctggcaccgaaagcactttgtctgtgagggttgtgagcagctgctgagcggccgggcgtacatcgtcaccaagggtcagcttctgtgcccaacttgcagcaagtccaaacgctcctgaagggctgcccacccacagccaga

SEQ ID NO: 180785 - DNA, 1098 bp, Artificial Sequence
  derived and/or modified sequence
atggccaaggtggccaaggacctgaaccccggcgtgaagaagatgtccttgggacagttacagagtgcacggggcgtcgcctgtttagggtgcaaagggacttgttctgggttcgagccacatagctggcgcaagatctgtaagagttgtaaatgttcccaggaagaccactgccttacttctgatctcgaggacgatcggaagatcggcaggctcctgatggactccaagtattcgacactcactgccagggtcaaaggcggtgacggtattcggatatataaaaggaataggatgatcatgaccaacccgattgctaccggaaaagaccctactttcgatacaatcacctacgagtgggccccccctggagttacccaaaagctgggattgcaatacatggagctgatccctaaggaaaagcagccagtcaccggcacggagggtgcgttctaccggcggagacagcttatgcaccaactgcctatatatgaccaggacccctcccggtgcagaggcctccttgaaaatgagttaaaattgatggaggaattcgtcaaacaatacaaatctgaggccctgggagtgggcgaagttgcgttacctgggcagggaggtcttccaaaagaagaaggaaagcagcaggagaaacctgaaggcgcagagacgacggccgcaacaacaaacggatctttatcggatccctcaaaggaagtggagtacgtgtgcgagctttgtaagggtgccgcgccgcctgattccccagtagtctacagtgatcgagccggatacaacaagcagtggcacccaacatgcttcgtctgtgcaaaatgtagcgagcccctggtggatcttatctacttctggaaggacggagccccttggtgcggacgtcattactgtgagagtctgagaccgagatgtagcggttgtgacgagatcatatttgcagaggattatcagcgcgtcgaagacctagcttggcatcgcaagcacttcgtctgtgaggggtgtgaacagctgttaagcggccgggcttatatcgtgaccaaaggacagctcttgtgtccaacttgctccaagtccaaacgatcctag

SEQ ID NO: 180786 - DNA, 1098 bp, Artificial Sequence
  derived and/or modified sequence
atggcgaaagtggcaaaggacctaaacccaggtgtcaagaaaatgagcctgggacagctgcagtccgcgaggggagtggcatgcctcggctgcaaagggacgtgtagcgggtttgaacctcactcttggcggaaaatttgtaaaagttgcaaatgtagccaggaggatcactgcctgacttcagacctggaggatgatcggaagatcgggagacttctgatggatagtaaatattcaacgctaacggccagggtgaagggaggcgatggtattcgtatatacaaaaggaacaggatgattatgactaacccaatcgcaacaggcaaagatcctacctttgataccatcacttatgagtgggcccctccaggtgtgacgcagaagttgggcttgcagtacatggagctgatccccaaggaaaaacagcctgtcactggaaccgagggggctttctatcgacggcgtcagctgatgcaccaactccccatctacgaccaggacccatccaggtgcaggggcctgctcgaaaatgaactgaaactgatggaggagttcgttaaacagtacaaatcagaggccctgggcgttggggaggtggcccttcctgggcaggggggacttccgaaggaagagggaaagcagcaggagaagcctgaaggggcagagacaactgccgctactacaaatgggtcactaagcgaccctagcaaggaagtggagtatgtttgcgagctgtgcaaaggcgcagcaccacctgactcacccgttgtgtacagcgatcgcgctggctataacaaacagtggcacccgacctgcttcgtttgcgctaaatgctccgagccattggtcgatttgatatatttctggaaggacggagcaccgtggtgtggtcgccactactgcgaaagcttgaggccacggtgctctggttgtgacgagattatctttgcagaagactaccaaagggtcgaagatttagcgtggcatcggaagcacttcgtatgtgagggctgtgagcagctgttgagtggacgtgcatacattgtgacaaaaggccagctcctttgcccaacctgcagcaaatcaaaacggtcgtag

SEQ ID NO: 180787 - DNA, 1098 bp, Artificial Sequence
  derived and/or modified sequence
atggctaaggtcgcaaaagatttgaatcctggcgtcaagaagatgtcactgggacagttacagagtgctagaggagtagcctgtctaggctgcaagggcacgtgttctggctttgaaccacattcttggcggaagatctgcaagtcatgcaaatgttcccaagaagaccattgtttgacgtctgacttagaggacgatagaaaaatcggaaggctgcttatggattcaaagtatagtacactcaccgctcgagttaaaggcggagacggaataagaatctacaaaagaaacagaatgattatgactaatcccatcgcaactggtaaagatcccacttttgacaccattacctacgaatgggcccccccaggggtgacccagaagctgggtctacaatacatggaactcatccctaaagagaaacaaccagtcaccggcacggaaggcgctttctatcgccgccggcagctaatgcatcaattgccgatttacgatcaggatcccagtcgatgccggggcttgttggagaatgaactgaaactgatggaagagttcgtgaaacagtataaaagtgaggctctgggagtgggcgaggtggcactccccggacagggcggattgccaaaggaagagggaaagcaacaggaaaagcccgaaggcgctgagacaacggctgcgacaactaatggaagcctgtcagatccgtctaaagaagtcgagtatgtgtgtgagctttgtaagggtgccgcaccccctgactctcccgtagtttacagcgacagggcaggctacaataagcaatggcatccgacgtgcttcgtgtgcgcaaaatgtagcgaacccctcgtagacctcatatacttctggaaggacggtgcgccctggtgtggacggcactattgcgagagtctgcgccccagatgctcagggtgcgatgagattatctttgctgaggattatcagcgcgtcgaggacctcgcctggcaccgcaagcatttcgtctgtgagggatgtgaacaactgttgagtggccgggcatatattgtcactaaaggccaactactgtgccctacctgctcaaagtcaaaacgctcctag

SEQ ID NO: 180788 - DNA, 1098 bp, Artificial Sequence
  derived and/or modified sequence
atggctaaggtcgccaaggatctgaatcccggagttaaaaaaatgagtctagggcagttgcagagtgctagaggcgttgcgtgtttgggatgcaagggaacctgcagtggatttgaacctcacagttggcgcaaaatttgtaaaagttgtaagtgtagccaagaagaccactgtctcacgtctgaccttgaggacgaccgtaagattggtaggctgttgatggattctaagtatagtacccttaccgcacgtgtgaaggggggagacggaatcagaatatataagcgcaatagaatgatcatgacgaatccgatcgctaccggcaaggacccaacatttgacactatcacatacgagtgggctcctcccggcgtgactcagaagctcgggttacagtatatggaacttattccaaaagaaaagcaaccggtgactggaactgagggagccttctacaggaggagacaactgatgcatcagctgcctatttacgaccaagacccaagccgatgcagaggcctgctggagaatgaactgaagcttatggaagaattcgtgaaacagtataaatccgaggccttaggagttggagaggtggccctccccggtcagggaggtctgccaaaggaggagggaaaacaacaggagaagcccgaaggagccgagaccaccgccgctaccaccaacggcagtttatccgatcctagcaaggaagttgaatatgtttgcgaactgtgtaaaggcgctgcaccacctgactcacctgtggtttactccgatcgtgcgggttataacaagcagtggcaccccacttgtttcgtctgcgcaaagtgctctgagccgctggtggatctgatttacttctggaaggatggtgctccttggtgtggtcgtcactattgcgagagcttgagacctagatgctccggatgtgatgaaatcatttttgcagaagactatcagcgcgtggaagatctcgcttggcatcggaaacattttgtttgcgaaggatgcgagcagctacttagtggcagagcatacatcgtgaccaaagggcagttactgtgccctacttgttctaagagtaaaagaagttag

SEQ ID NO: 180789 - DNA, 1098 bp, Artificial Sequence
  derived and/or modified sequence
atggccaaggtggccaaggacctgaaccccggcgtgaagaagatgagcctgggccagctgcagagcgccagaggcgtggcctgcctgggctgcaagggcacctgcagcggcttcgagccccacagctggagaaagatctgcaagagctgcaagtgcagccaggaggaccactgcctgaccagcgacctggaggacgacagaaagatcggcagactgctgatggacagcaagtacagcaccctgaccgccagagtgaagggcggcgacggcatcagaatctacaagagaaacagaatgatcatgaccaaccccatcgccaccggcaaggaccccaccttcgacaccatcacctacgagtgggccccccccggcgtgacccagaagctgggcctgcagtacatggagctgatccccaaggagaagcagcccgtgaccggcaccgagggcgccttctacagaagaagacagctgatgcaccagctgcccatctacgaccaggaccccagcagatgcagaggcctgctggagaacgagctgaagctgatggaggagttcgtgaagcagtacaagagcgaggccctgggcgtgggcgaggtggccctgcccggccagggcggcctgcccaaggaggagggcaagcagcaggagaagcccgagggcgccgagaccaccgccgccaccaccaacggcagcctgagcgaccccagcaaggaggtggagtacgtgtgcgagctgtgcaagggcgccgccccccccgacagccccgtggtgtacagcgacagagccggctacaacaagcagtggcaccccacctgcttcgtgtgcgccaagtgcagcgagcccctggtggacctgatctacttctggaaggacggcgccccctggtgcggcagacactactgcgagagcctgagacccagatgcagcggctgcgacgagatcatcttcgccgaggactaccagagagtggaggacctggcctggcacagaaagcacttcgtgtgcgagggctgcgagcagctgctgagcggcagagcctacatcgtgaccaagggccagctgctgtgccccacctgcagcaagagcaagagaagctag

SEQ ID NO: 180790 - protein, 468 aa, Artificial Sequence
  derived and/or modified sequence
MGRGWGFLFGLLGAVWLLSSGHGEEQPPETAAQRCFCQVSGYLDDCTCDVETIDRFNNYRLFPRLQKLLESDYFRYYKVNLKRPCPFWNDISQCGRRDCAVKPCQSDEVPDGIKSASYKYSEEANNLIEECEQAERLGAVDESLSEETQKAVLQWTKHDDSSDNFCEADDIQSPEAEYVDLLLNPERYTGYKGPDAWKIWNVIYEENCFKPQTIKRPLNPLASGQGTSEENTFYSWLEGLCVEKRAFYRLISGLHASINVHLSARYLLQETWLEKKWGHNITEFQQRFDGILTEGEGPRRLKNLYFLYLIELRALSKVLPFFERPDFQLFTGNKIQDEENKMLLLEILHEIKSFPLHFDENSFFAGDKKEAHKLKEDFRLHFRNISRIMDCVGCFKCRLWGKLQTQGLGTALKILFSEKLIANMPESGPSYEFHLTRQEIVSLFNAFGRISTSVKELENFRNLLQNIH

SEQ ID NO: 180791 - DNA, 1407 bp, Artificial Sequence
  derived and/or modified sequence
atgggcagaggctggggcttcctgttcggcctgctgggcgccgtgtggctgctgagcagcggccacggcgaggagcagccccccgagaccgccgcccagagatgcttctgccaggtgagcggctacctggacgactgcacctgcgacgtggagaccatcgacagattcaacaactacagactgttccccagactgcagaagctgctggagagcgactacttcagatactacaaggtgaacctgaagagaccctgccccttctggaacgacatcagccagtgcggcagaagagactgcgccgtgaagccctgccagagcgacgaggtgcccgacggcatcaagagcgccagctacaagtacagcgaggaggccaacaacctgatcgaggagtgcgagcaggccgagagactgggcgccgtggacgagagcctgagcgaggagacccagaaggccgtgctgcagtggaccaagcacgacgacagcagcgacaacttctgcgaggccgacgacatccagagccccgaggccgagtacgtggacctgctgctgaaccccgagagatacaccggctacaagggccccgacgcctggaagatctggaacgtgatctacgaggagaactgcttcaagccccagaccatcaagagacccctgaaccccctggccagcggccagggcaccagcgaggagaacaccttctacagctggctggagggcctgtgcgtggagaagagagccttctacagactgatcagcggcctgcacgccagcatcaacgtgcacctgagcgccagatacctgctgcaggagacctggctggagaagaagtggggccacaacatcaccgagttccagcagagattcgacggcatcctgaccgagggcgagggccccagaagactgaagaacctgtacttcctgtacctgatcgagctgagagccctgagcaaggtgctgcccttcttcgagagacccgacttccagctgttcaccggcaacaagatccaggacgaggagaacaagatgctgctgctggagatcctgcacgagatcaagagcttccccctgcacttcgacgagaacagcttcttcgccggcgacaagaaggaggcccacaagctgaaggaggacttcagactgcacttcagaaacatcagcagaatcatggactgcgtgggctgcttcaagtgcagactgtggggcaagctgcagacccagggcctgggcaccgccctgaagatcctgttcagcgagaagctgatcgccaacatgcccgagagcggccccagctacgagttccacctgaccagacaggagatcgtgagcctgttcaacgccttcggcagaatcagcaccagcgtgaaggagctggagaacttcagaaacctgctgcagaacatccactag

SEQ ID NO: 180792 - DNA, 5285 bp, Artificial Sequence
  derived and/or modified sequence
cgaggccccgggctgccggcgcgggcgccgcggcacgtccacaggctgggtcgcgaggtggcgatcgctgagaggcaggagggccgaggcgggcctgggaggcggcccggaggtggggcgccgctggggccggcccgcacgggcttcatctgagggcgcacggcccgcgaccgagcgtgcggactggcctcccaagcgtggggcgacaagctgccggagctgcaatgggccgcggctggggattcttgtttggcctcctgggcgccgtgtggctgctcagctcgggccacggagaggagcagcccccggagacagcggcacagaggtgcttctgccaggttagtggttacttggatgattgtacctgtgatgttgaaaccattgatagatttaataactacaggcttttcccaagactacaaaaacttcttgaaagtgactactttaggtattacaaggtaaacctgaagaggccgtgtcctttctggaatgacatcagccagtgtggaagaagggactgtgctgtcaaaccatgtcaatctgatgaagttcctgatggaattaaatctgcgagctacaagtattctgaagaagccaataatctcattgaagaatgtgaacaagctgaacgacttggagcagtggatgaatctctgagtgaggaaacacagaaggctgttcttcagtggaccaagcatgatgattcttcagataacttctgtgaagctgatgacattcagtcccctgaagctgaatatgtagatttgcttcttaatcctgagcgctacactggttacaagggaccagatgcttggaaaatatggaatgtcatctacgaagaaaactgttttaagccacagacaattaaaagacctttaaatcctttggcttctggtcaagggacaagtgaagagaacactttttacagttggctagaaggtctctgtgtagaaaaaagagcattctacagacttatatctggcctacatgcaagcattaatgtgcatttgagtgcaagatatcttttacaagagacctggttagaaaagaaatggggacacaacattacagaatttcaacagcgatttgatggaattttgactgaaggagaaggtccaagaaggcttaagaacttgtattttctctacttaatagaactaagggctttatccaaagtgttaccattcttcgagcgcccagattttcaactctttactggaaataaaattcaggatgaggaaaacaaaatgttacttctggaaatacttcatgaaatcaagtcatttcctttgcattttgatgagaattcattttttgctggggataaaaaagaagcacacaaactaaaggaggactttcgactgcattttagaaatatttcaagaattatggattgtgttggttgttttaaatgtcgtctgtggggaaagcttcagactcagggtttgggcactgctctgaagatcttattttctgagaaattgatagcaaatatgccagaaagtggacctagttatgaattccatctaaccagacaagaaatagtatcattattcaacgcatttggaagaatttctacaagtgtgaaagaattagaaaacttcaggaacttgttacagaatattcattaaagaaaacaagctgatatgtgcctgtttctggacaatggaggcgaaagagtggaatttcattcaaaggcataatagcaatgacagtcttaagccaaacattttatataaagttgcttttgtaaaggagaattatattgttttaagtaaacacatttttaaaaattgtgttaagtctatgtataatactactgtgagtaaaagtaatactttaataatgtggtacaaattttaaagtttaatattgaataaaaggaggattatcaaattcatatatgataaaagtgaatgttctaagtctctcaaactagcgttttatgtaataatatgtaatataaataaaactatggtaaatgtgacaagcatttaataggaaaatgctaaggaggcctcataaatgacccataattaccaacgtagaatttttcagtacatttagggttgctggatttagcaaataaaaataaagattgcccagttagatttgaatttcagataaacaattagttttttaatattttacatggaatatttggaaaatacttatactaaaaaattatttgtttgaaattcaaatttaactgggagtcttgtattttatctggcaatcctaaaatacattggtatgaaacaaatcacttttagaagtatattgctattttgattgggttgtttttgtgtgtagaaacgtacaataacaactcaaaggcacaggagatttctaaacattgtgaaaagttgaatagattatatatttattctcataatactttcactaatactaaataaaatttggggaacactttttatttttatataatttccaatttacagaaaagtttcaaaaatagtacaaagagctctcttacccagattcactaattgttcatacgtgctttatctttcatgctttctctgtacacacacacacacacacaaatttttcctcaatcatttgaaagtcagttataggcatcatgccccttaaaccctaaatacttcagtgtgtaatactgaataattactaaaaatgattttctcagaaaaaaaaactcccacaattctggaactataatactgtaagccttagaataaataatactttcaagttccaatctaaagttctttttgagttttgttgcccgttttatgcttgatgtgtatagtaatagggtaggctatttattttattaaaattttttttagagacaaggttttgctgtgttgcccaagctggaacttgaacgactgggctgaagtgatcttcccacctcagcctcccaagtagctgggaatacaggtgtctgccaccatacccagtttcatttttgttttttatacccgaagttcatttcctttgtctccctaaaactgaactgtaattttgggaggttttcattagtggaagctcttcatttataaagctatttgaaggggtttaggaatttatatcacatggtaattgtagagaaaaagaagctatatacctcaaaatcgtgccctctttacatatgtcttatcaggtataacatgttgaaatgtcacattagtagtaaagtggggtttatttatatagtggttaagaaatgtcagtttacactgctgtatacttcttcttctgtgtccctaaggcctggtacagtgccaagcacatacttggtatccaataaatatttgttggatgaatgtatgcatatgtattcagtatattttaaatgaataatcacagaagtaagtttaataatttgtcctatttttctctgtcacttcctttttctctaaggcaggaaaggaaagacattaaaccattaattaagtcaatcctcttggagactcaaaagactatgaagtgatcactctatataaaatataaatacagtgtgggttcaaatggccattttttgtgtgtccctctctctcatcttatgcttcccttcctttttttatttttattttttggagacggagtcttgctgtgtcgcccaggttggagtgcagtggcgtgatcttagctcactgcaagctctgccttccaggttcacgccattcttctgcctcagccccctgagtagctgggactacaggcgcccgccaccacgcccggctaatttttttttttttttttttgtatttttagtagaggcagtgtttcaccgtgttagccaggatggtcttgatctcctgacctcgtgatccacccacctcgacctcccaaagtgctgggattacaggcgtgagccaccacgcccggcctcttttttttttagctgccaatctttttgaaggaatattcttacctctactttgtcaccttctactggctccttaactaaaatctgccatttggctctctggttaacagtcccttcctgtaaagtctaaaatcttaattctaaatccacagtttaattcacaagctagtacttgactttttttctgtatttgacatttttgacaacccctactttaaagatttattcccttgacttcttacattttgctcactcctgaaccaccccccaccttttggcctcttcatttattccttaaatgttattcctcagacctccattttttttttctctcttaatcacaacaccacttctcacgcttgggtaattttaattcagcagttcctaaatccttatctttagccagactcctcaatccatctgcctgttgcacttttcttggttgtcccagagacacctgtgtgtgtcttaaaacattcattctctgcaaaacctactctaatgcctgtgtcccttactttggttaattttagaaccattatattctaagttttctaggctcattcctctcctccaccttcccctatcatttagtgtctaagttttactgattttatctccacctctctgatacatcactctttcatcttcattgctattattaataaatacctacagtactaacctgcctcctatacctagctggtctcctctctgttgctcaatgttaccacagcaggctttctagaagcactctgacagtgttactccctaatatccttcagtgacttcaggaactttcaggagaaagccaaactcctctgtttggtgtacaaggtcttctgatgtgtttcctccaccgaatgttctggtgaaacagacttacacttcttcagaagccacatttggccaggcctcccgccttggtaaatgctgtactctttgcatcaagtatgctagtcatccttccccacttggaaaattcctatgcatcttgcaggcctgacataagcatttcctctgtgaaacctcctttgctccactcaaggagagtcatctaacttccactttcgtgtcaccactgtaattacaacctacctctattgtatgtcacttaaatcgtactgtattgttttatttttcaaaagtctttactagaatgtgagctccttaagggcaggaaaaggaacctttttattttttgcatctccatagcatagtttttggcatatgaatgtttaataaatgtttgttgaataaattgattttaaagtgacatctttattatattagaggtcctacctatattccaaatactttcactcccttcactttacagcaagggtcagtagagtcccaaggatttgtagactttagggggtcaataaagctgaaattgtattca

SEQ ID NO: 180793 - DNA, 1407 bp, Artificial Sequence
  derived and/or modified sequence
atgggaaggggctgggggttcctattcggcttgctcggcgctgtgtggctcctttcttctggccacggtgaagagcagcctcctgaaactgctgcccaacggtgtttctgtcaggtgagcggatacctggacgactgcacatgcgacgttgagacaattgacagattcaacaattacagactctttccaaggctacagaagctgttagagtccgactacttccggtactacaaagtcaacctcaaacgcccatgccccttctggaatgacatttcccagtgcggccgaagggattgtgcagtcaagccctgccagtctgatgaggtgcccgatggcattaagagcgctagttataaatactctgaagaggctaacaacctgatcgaggaatgtgagcaggcggaaaggctgggcgcagttgatgaatctctctcagaggagacacagaaagccgtgctgcaatggaccaagcatgatgattcttctgataacttctgtgaggcagatgacatacagtctcccgaggctgagtacgtcgatctcctgctaaatccagagcgctacacaggctacaagggccccgacgcctggaagatctggaatgtgatttacgaggaaaattgcttcaaaccccaaacgattaagagacctctcaaccccttagcatccggccagggcacatctgaggagaatacattttatagttggctggaaggcctttgcgtagaaaagcgcgctttttatcggcttatctctggtttacatgcttcaattaacgtccatctctctgcgcggtacctgctgcaggagacctggctggaaaagaagtggggccacaacattactgagtttcagcagaggtttgatggcattttgacagagggggaaggtccccgtaggcttaagaatctgtactttctgtatctcatcgagctaagggcccttagtaaagttttgcccttcttcgagcgcccagatttccagctgtttaccggtaacaaaattcaggatgaagaaaataaaatgctgctcctcgagattctacacgaaatcaagtcctttcccctccattttgatgagaactccttctttgcgggagataagaaggaagcacacaagctaaaggaagactttagactgcactttagaaacatctcacgaattatggactgcgtgggctgctttaaatgcaggctgtggggcaagctgcagactcaggggctgggcactgccctgaaaatcctgttttctgagaagcttatcgccaacatgcccgagtctggcccaagctacgagttccacctgactcgacaggagatcgtgtctctgtttaatgcttttggccgcatatctacatctgtcaaagaactagagaattttaggaacctgttacagaacattcattag

SEQ ID NO: 180794 - DNA, 1407 bp, Artificial Sequence
  derived and/or modified sequence
atgggccggggctggggcttcctgtttggcctgctgggcgctgtgtggctgctgagcagcggccacggggaggagcagcccccagagacagctgcccagcgctgcttctgccaggtgtctggctacctggatgactgcacctgtgatgtggagaccatcgaccgcttcaacaactaccgcctcttcccccggctgcagaagctgctggagagtgactacttccgctactacaaggtgaacctgaagaggccctgccccttctggaatgacatcagccagtgtggccggcgggactgtgctgtgaagccctgccagagtgatgaggtgcctgatggcatcaagagcgccagctacaagtacagcgaggaggccaacaacctgattgaggagtgtgagcaggccgagcggctgggcgctgtggatgagagcctgtctgaggagacccagaaggctgtgctgcagtggaccaagcatgatgacagcagtgacaacttctgtgaggctgatgacatccagagccctgaggccgagtatgtggacctgctgctgaaccctgagcgctacacaggctacaagggcccagatgcctggaagatctggaatgtcatctatgaggagaactgcttcaagccccagaccatcaagaggcccctgaaccccctggccagcggccagggcaccagcgaggagaacaccttctacagctggctggagggcctgtgtgtggagaagagggccttctaccgcctcatcagcggcctgcacgccagcatcaacgtgcacctgagcgcccgctacctgctgcaggagacctggctggagaagaagtggggccacaacatcacagagttccagcagagatttgatggcatcctgacagaaggagagggcccccggcggctgaagaacctgtacttcctgtacctgattgagctgcgggccctgagcaaggtgctgcccttctttgagaggccagacttccagctgttcaccggcaacaagatccaggatgaggagaacaagatgctgctgctggagatcctgcacgagatcaagagcttccccctgcactttgatgagaacagcttctttgctggggacaagaaggaggcccacaagctgaaggaggacttccggctgcacttcaggaacatcagccgcatcatggactgtgtgggctgcttcaagtgccgcctgtggggcaagctgcagacccagggcctgggcacagccctgaagatcctcttcagcgagaagctgattgccaacatgcctgagagcggccccagctatgagttccacctgacccggcaggagatcgtgtccctcttcaatgccttcggccgcatcagcacctctgtgaaggagctggagaacttcaggaacctgctgcagaacatccactag

SEQ ID NO: 180795 - DNA, 1407 bp, Artificial Sequence
  derived and/or modified sequence
atgggccggggctggggcttcctgttcggcctgctgggcgccgtgtggctcttaagttccggccacggggaggagcagccacccgagactgccgcccagcgctgcttttgccaggtgagcggttatttagacgattgtacttgtgatgttgaaactatagatagatttaataactatcgattgttccccagattgcaaaagctgctagagagtgactattttcggtactataaagtaaacctgaagcgaccttgccctttttggaatgatatctctcagtgtggccgaagggattgcgcagtgaaaccttgtcagtcggatgaagtccccgatggaatcaagtctgccagttataagtattcagaagaagccaacaacctcattgaagagtgtgagcaggcagagaggctgggcgccgtggacgaatcactgagcgaagagactcagaaggcggtactgcagtggacaaaacatgacgactcttccgataacttttgcgaggcggatgacatccagtctcccgaagctgagtacgtcgacttgctgctgaacccggagcgctacactggctataaggggccagatgcttggaagatttggaatgtaatttatgaggaaaattgctttaagcctcagacaataaaacggccgttgaacccactagcatcaggacaaggtacttccgaggaaaatacattttactcctggctggaaggtttatgcgtggaaaaacgcgcattctatcgcttgattagcggacttcatgctagcatcaatgtccacctcagcgccagatatttgctccaggaaacatggctggagaaaaagtggggacacaatattaccgagttccagcagcgtttcgacgggatcctgacggagggagaagggcctcgccgcctgaagaacctctactttctgtatcttattgagcttagggctctgtctaaagtcctacctttcttcgaacggcctgactttcagctctttaccggaaataaaattcaagacgaggaaaacaaaatgctgcttctggagattttacacgagatcaagagtttcccactacacttcgatgaaaatagtttctttgccggggacaaaaaggaggcccacaagcttaaggaagactttagactacacttccgcaatatttcccgcataatggattgcgtgggctgtttcaagtgtaggctatgggggaaactgcagacccagggcctgggcaccgcattaaagattctgttctccgagaaactgatagctaatatgcctgaatcaggacccagttacgaattccacttgacacgtcaggaaatcgtttccttattcaacgcctttggcaggatctctacgtccgtgaaagaactggaaaatttcaggaatttgctccagaatattcactag

SEQ ID NO: 180796 - DNA, 1407 bp, Artificial Sequence
  derived and/or modified sequence
atggggcgaggctggggcttcttgtttggactgctaggcgcagtctggctgctatcttctggccatggagaggagcagcccccagagaccgctgcacaaagatgcttctgccaagtcagtggatatctggacgattgtacgtgcgacgtggagaccatcgataggtttaacaactatcgactcttccctcgcctacagaagctgctggaaagtgactactttaggtactacaaggttaaccttaagcgaccctgtcctttctggaatgatatctcccaatgcggtagaagagactgtgctgtgaagccatgccagtcggacgaagttcctgacgggatcaagagcgcttcttataagtattccgaggaggctaataatctgatagaggagtgtgagcaggctgagagactgggcgctgtggacgaatcactgtccgaggagacccagaaggcagtgctgcagtggacgaaacatgacgacagcagcgacaacttttgcgaagccgacgatatccagtctcccgaagccgagtacgttgatctcctattgaacccagagcgttataccggatataaaggaccagacgcctggaagatttggaatgtaatttacgaggaaaactgcttcaagcctcagacaattaagagacctctcaatcctctggcctctgggcagggtacttccgaggaaaataccttttattcctggttggagggcctgtgtgtggaaaaaagggctttctatcgcctgataagcggccttcacgcctccattaatgtgcatctgtccgccagatacctgctgcaggaaacttggctagagaaaaagtggggacataacatcacagaatttcaacaaagattcgatggaatcttgaccgagggcgaaggacctaggcgactgaagaacctctatttcttataccttatcgagttgagagcacttagcaaggtgctgccattctttgagcgccctgacttccagctctttacaggcaacaagatacaagatgaggagaataagatgttgttgctcgaaatcctgcatgagatcaaaagcttcccactgcactttgatgaaaacagtttctttgcgggtgataagaaagaggcccataagctgaaggaggattttagactacacttcagaaatataagtcggatcatggattgtgtggggtgctttaagtgtaggctctggggaaaactccagactcagggactgggtacagccctaaaaatcttgtttagcgagaagctgatagccaacatgccggaatcaggcccatcatacgagttccacttgaccagacaggaaatcgtctcactgtttaatgcgtttggcagaatttctacctccgtcaaggagctagagaatttcaggaacctgctacagaatatccactag

SEQ ID NO: 180797 - protein, 571 aa, Artificial Sequence
  derived and/or modified sequence
MTRAGDHNRQRGCCGSLADYLTSAKFLLYLGHSLSTWGDRMWHFAVSVFLVELYGNSLLLTAVYGLVVAGSVLVLGAIIGDWVDKNARLKVAQTSLVVQNVSVILCGIILMMVFLHKHELLTMYHGWVLTSCYILIITIANIANLASTATAITIQRDWIVVVAGEDRSKLANMNATIRRIDQLTNILAPMAVGQIMTFGSPVIGCGFISGWNLVSMCVEYVLLWKVYQKTPALAVKAGLKEEETELKQLNLHKDTEPKPLEGTHLMGVKDSNIHELEHEQEPTCASQMAEPFRTFRDGWVSYYNQPVFLAGMGLAFLYMTVLGFDCITTGYAYTQGLSGSILSILMGASAITGIMGTVAFTWLRRKCGLVRTGLISGLAQLSCLILCVISVFMPGSPLDLSVSPFEDIRSRFIQGESITPTKIPEITTEIYMSNGSNSANIVPETSPESVPIISVSLLFAGVIAARIGLWSFDLTVTQLLQENVIESERGIINGVQNSMNYLLDLLHFIMVILAPNPEAFGLLVLISVSFVAMGHIMYFRFAQNTLGNKLFACGPDAKEVRKENQANTSVV

SEQ ID NO: 180798 - protein, 200 aa, Artificial Sequence
  derived and/or modified sequence
MTRAGDHNRQRGCCGSLADYLTSAKFLLYLGHSLSTWGDRMWHFAVSVFLVELYGNSLLLTAVYGLVVAGSVLVLGAIIGDWVDKNARLKVAQTSLVVQNVSVILCGIILMMVFLHKHELLTMYHGWVLTSCYILIITIANIANLASTATAITIQRDWIVVVAGEDRSKLANMNATIRRIDQLTNILAPMAVGQIMTFGS

SEQ ID NO: 180799 - protein, 25 aa, Artificial Sequence
  derived and/or modified sequence
MTRAGDHNRQRGCCGSLADYLTSAK

SEQ ID NO: 180800 - protein, 55 aa, Artificial Sequence
  derived and/or modified sequence
MTRAGDHNRQRGCCGSLADYLTSAKFLLYLGHSLSTWGDRMWHFAVSVFLVELYG

SEQ ID NO: 180801 - protein, 99 aa, Artificial Sequence
  derived and/or modified sequence
MRASIHKKLRKSSGIVTILYSAFVLVSTSDMAEETEDAWPRCYLQFLALLLTSTSARAAAAIAAAEEPAGSPSVMTRAGDHNRQRGCCGSLADYLTSAK

SEQ ID NO: 180802 - DNA, 1716 bp, Artificial Sequence
  derived and/or modified sequence
atgaccagagccggcgaccacaacagacagagaggctgctgcggcagcctggccgactacctgaccagcgccaagttcctgctgtacctgggccacagcctgagcacctggggcgacagaatgtggcacttcgccgtgagcgtgttcctggtggagctgtacggcaacagcctgctgctgaccgccgtgtacggcctggtggtggccggcagcgtgctggtgctgggcgccatcatcggcgactgggtggacaagaacgccagactgaaggtggcccagaccagcctggtggtgcagaacgtgagcgtgatcctgtgcggcatcatcctgatgatggtgttcctgcacaagcacgagctgctgaccatgtaccacggctgggtgctgaccagctgctacatcctgatcatcaccatcgccaacatcgccaacctggccagcaccgccaccgccatcaccatccagagagactggatcgtggtggtggccggcgaggacagaagcaagctggccaacatgaacgccaccatcagaagaatcgaccagctgaccaacatcctggcccccatggccgtgggccagatcatgaccttcggcagccccgtgatcggctgcggcttcatcagcggctggaacctggtgagcatgtgcgtggagtacgtgctgctgtggaaggtgtaccagaagacccccgccctggccgtgaaggccggcctgaaggaggaggagaccgagctgaagcagctgaacctgcacaaggacaccgagcccaagcccctggagggcacccacctgatgggcgtgaaggacagcaacatccacgagctggagcacgagcaggagcccacctgcgccagccagatggccgagcccttcagaaccttcagagacggctgggtgagctactacaaccagcccgtgttcctggccggcatgggcctggccttcctgtacatgaccgtgctgggcttcgactgcatcaccaccggctacgcctacacccagggcctgagcggcagcatcctgagcatcctgatgggcgccagcgccatcaccggcatcatgggcaccgtggccttcacctggctgagaagaaagtgcggcctggtgagaaccggcctgatcagcggcctggcccagctgagctgcctgatcctgtgcgtgatcagcgtgttcatgcccggcagccccctggacctgagcgtgagccccttcgaggacatcagaagcagattcatccagggcgagagcatcacccccaccaagatccccgagatcaccaccgagatctacatgagcaacggcagcaacagcgccaacatcgtgcccgagaccagccccgagagcgtgcccatcatcagcgtgagcctgctgttcgccggcgtgatcgccgccagaatcggcctgtggagcttcgacctgaccgtgacccagctgctgcaggagaacgtgatcgagagcgagagaggcatcatcaacggcgtgcagaacagcatgaactacctgctggacctgctgcacttcatcatggtgatcctggcccccaaccccgaggccttcggcctgctggtgctgatcagcgtgagcttcgtggccatgggccacatcatgtacttcagattcgcccagaacaccctgggcaacaagctgttcgcctgcggccccgacgccaaggaggtgagaaaggagaaccaggccaacaccagcgtggtgtag

SEQ ID NO: 180803 - DNA, 603 bp, Artificial Sequence
  derived and/or modified sequence
atgaccagagccggcgaccacaacagacagagaggctgctgcggcagcctggccgactacctgaccagcgccaagttcctgctgtacctgggccacagcctgagcacctggggcgacagaatgtggcacttcgccgtgagcgtgttcctggtggagctgtacggcaacagcctgctgctgaccgccgtgtacggcctggtggtggccggcagcgtgctggtgctgggcgccatcatcggcgactgggtggacaagaacgccagactgaaggtggcccagaccagcctggtggtgcagaacgtgagcgtgatcctgtgcggcatcatcctgatgatggtgttcctgcacaagcacgagctgctgaccatgtaccacggctgggtgctgaccagctgctacatcctgatcatcaccatcgccaacatcgccaacctggccagcaccgccaccgccatcaccatccagagagactggatcgtggtggtggccggcgaggacagaagcaagctggccaacatgaacgccaccatcagaagaatcgaccagctgaccaacatcctggcccccatggccgtgggccagatcatgaccttcggcagctag

SEQ ID NO: 180804 - DNA, 78 bp, Artificial Sequence
  derived and/or modified sequence
atgaccagagccggcgaccacaacagacagagaggctgctgcggcagcctggccgactacctgaccagcgccaagtag

SEQ ID NO: 180805 - DNA, 168 bp, Artificial Sequence
  derived and/or modified sequence
atgaccagagccggcgaccacaacagacagagaggctgctgcggcagcctggccgactacctgaccagcgccaagttcctgctgtacctgggccacagcctgagcacctggggcgacagaatgtggcacttcgccgtgagcgtgttcctggtggagctgtacggctag

SEQ ID NO: 180806 - DNA, 300 bp, Artificial Sequence
  derived and/or modified sequence
atgagagccagcatccacaagaagctgagaaagagcagcggcatcgtgaccatcctgtacagcgccttcgtgctggtgagcaccagcgacatggccgaggagaccgaggacgcctggcccagatgctacctgcagttcctggccctgctgctgaccagcaccagcgccagagccgccgccgccatcgccgccgccgaggagcccgccggcagccccagcgtgatgaccagagccggcgaccacaacagacagagaggctgctgcggcagcctggccgactacctgaccagcgccaagtag

SEQ ID NO: 180807 - DNA, 1716 bp, Artificial Sequence
  derived and/or modified sequence
atgacccgggccggggaccacaaccgacaacgtggttgctgcggcagtcttgcagattatctcacttctgctaagttcctcctgtatctaggtcactccctctccacttggggcgaccgcatgtggcatttcgccgtctccgtgttcctggtcgaactctacggcaacagcctgcttctgaccgcagtatacggcctcgtagtggccggtagcgtgctggtcctcggcgcaatcatcggggactgggtggacaagaatgcaagactgaaagtggcacagacaagccttgtggtccagaacgtctctgtcatcctatgtggtatcattctaatgatggtgttcttgcataagcatgaactgttaaccatgtatcatgggtgggttctgacatcttgttacattctgataataacgattgccaatatcgccaatttggcttccaccgcgacagccatcaccattcagcgcgactggattgtggtcgtcgcaggcgaggacaggagcaagctggcaaatatgaatgccaccatccgaagaatcgaccaattaaccaatatactggcacccatggccgtagggcagatcatgaccttcggctcaccggtgatcggttgcggtttcattagcggctggaatctggtgagtatgtgtgttgaatacgtcctgctgtggaaggtgtaccagaaaacgcctgccctggctgtcaaagcagggcttaaggaggaagaaacagaacttaaacagctgaatttacataaagataccgaaccgaaacccctggagggaacgcatctcatgggcgttaaagattcaaatatccacgagctcgagcatgagcaagagccgacatgtgctagccaaatggccgagccattccgcaccttccgggatggctgggttagttattacaatcaaccagtttttctggctgggatgggcctcgcatttctgtatatgaccgtactgggcttcgattgcatcaccactggctatgcctacactcagggcctgagcggctcaattctttctatcctaatgggggcttccgcaattaccggcatcatgggtacggtcgcatttacttggctgcgtcgcaagtgcggtctggtgaggactggcctcatctccggcctagctcagctctcctgtctcatcctctgtgtaatcagcgtttttatgccgggttcccctctggatctgagcgtcagccctttcgaggacatcagaagtcgattcattcaaggggaatccatcacacccaccaaaattccagaaatcacaaccgagatttacatgtctaatgggagtaatagcgcaaatatagttccagaaacctcacctgaaagcgtccccatcatttctgttagcctgctgtttgctggtgtaatcgctgcacgcatcggcctgtggtcattcgacttaaccgtcacacagttgttgcaggagaacgtcatagagtccgagcgaggtattataaacggcgtacagaacagcatgaactacctactggatctccttcacttcattatggttatcttagctcctaacccagaggccttcgggctgcttgtccttatatctgtgtcctttgtagccatgggccacatcatgtacttccgatttgctcaaaacactttgggcaacaagctgttcgcctgtgggccagatgcaaaggaagtgcgaaaggagaatcaagccaacacatctgtcgtatag

SEQ ID NO: 180808 - DNA, 603 bp, Artificial Sequence
  derived and/or modified sequence
atgaccagagccggggaccacaatcgtcagagggggtgttgtgggtcactcgcggactacttaacaagcgccaaattcttattgtatttagggcattcgctttctacatggggcgacagaatgtggcactttgcagtctctgtctttctggttgagctgtatggcaacagtctccttctcaccgcggtgtatggtctggtggtcgccgggtctgtgctagtcctcggagcaattattggcgactgggttgacaagaacgccaggctgaaagttgcccagacgagcctggtagtacaaaacgtcagcgtaatactctgtggtatcatcctgatgatggtgttcctccacaagcacgaactgctgaccatgtatcacggatgggtgctgacctcctgttacatccttataatcaccattgctaacatcgccaacctcgcaagtactgccaccgcgattacaattcagcgagattggatcgtcgtggtggcgggggaggaccgaagcaaactcgccaatatgaacgccacgatccgacgaatcgaccagttgacaaacatcctcgcccctatggctgttggccaaatcatgactttcgggtcttag

SEQ ID NO: 180809 - DNA, 78 bp, Artificial Sequence
  derived and/or modified sequence
atgaccagggccggcgaccacaaccgccagcgcggctgctgcggcagtctcgctgactaccttacttcagccaaatag

SEQ ID NO: 180810 - DNA, 78 bp, Artificial Sequence
  derived and/or modified sequence
atgaccagagctggggaccataatcgccagcgggggtgctgcggaagtctggccgactatttgacctccgctaagtag

SEQ ID NO: 180811 - DNA, 168 bp, Artificial Sequence
  derived and/or modified sequence
atgacccgggcaggagatcacaacagacaacggggttgttgcggaagcttggcagattacctaacatccgccaagtttctgctgtacctgggacactcactgtcaacctggggcgacaggatgtggcactttgccgtgagcgtattcctggtggagctgtacggatag

SEQ ID NO: 180812 - DNA, 300 bp, Artificial Sequence
  derived and/or modified sequence
atgcgagcctcgattcacaaaaaacttagaaaatctagcggaatcgttacgatcttgtatagcgcttttgtcctcgtcagcacatccgatatggctgaggaaacagaggacgcctggcctcgctgctatttgcagtttctggccttgctgttgacaagcacctccgctagggccgcggcagcgatcgcggccgctgaggaacctgccggttctccttcggtaatgacccgcgctggcgatcacaaccggcagcgcggctgttgcggatctctcgccgattacctgacctctgctaagtag

SEQ ID NO: 180813 - DNA, 1716 bp, Artificial Sequence
  derived and/or modified sequence
atgacccgggccggggaccacaaccggcagaggggctgctgcggcagcctggccgactacctgaccagcgccaagttcctgctgtacctgggccacagcctgagcacctggggagacaggatgtggcactttgctgtgtctgtgttcctggtggagctgtatggcaacagcctgctgctgacagctgtgtatggcctggtggtggccggctctgtgctggtgctgggcgccatcattggagactgggtggacaagaatgcccggctgaaggtggcccagaccagcctggtggtgcagaatgtgtctgtcatcctgtgtggcatcatcctgatgatggtgttcctgcacaagcatgagctgctgaccatgtaccacggctgggtgctgaccagctgctacatcctgatcatcaccatcgccaacatcgccaacctggccagcacagccacagccatcaccatccagagggactggatcgtggtggtggccggagaagatagaagcaagctggccaacatgaatgccaccatcagaagaattgaccagctgaccaacatcctggcccccatggctgtgggccagatcatgaccttcggcagccctgtgattggctgcggcttcatcagcggctggaacctggtgtccatgtgtgtggagtatgtgctgctgtggaaggtgtaccagaagaccccagccctggccgtgaaggccggcctgaaggaggaggagacagagctgaagcagctgaacctgcacaaggacacagagcccaagcccctggagggcacccacctgatgggcgtgaaggacagcaacatccacgagctggagcacgagcaggagcccacctgtgccagccagatggccgagcccttccgcaccttcagagatggctgggtgtcctactacaaccagcccgtcttcctggccggcatgggcctggccttcctgtacatgacagtgctgggctttgactgcatcaccaccggctacgcctacacccagggcctgagcggcagcatcctgagcatcctgatgggcgccagcgccatcaccggcatcatgggcaccgtggccttcacctggctgcggaggaaatgtggcctggtgaggacaggcctcatcagcggcctggcccagctgagctgcctgatcctgtgtgtgatcagcgtcttcatgcctggcagccccctggacctgtctgtgagcccctttgaggacatccgcagccgcttcatccagggcgagagcatcacccccaccaagatccctgagatcaccacagagatctacatgagcaatggcagcaacagcgccaacatcgtgcctgagaccagccctgagagcgtgcccatcatctctgtgtccctgctgtttgctggggtgattgctgccagaattggcctgtggagctttgacctgactgtgacccagctgctgcaggagaatgtgattgaaagtgagcggggcatcatcaatggagtgcagaacagcatgaactacctgctggacctgctgcacttcatcatggtgatcctggcccccaaccctgaggccttcggcctgctggtgctgatctctgtgtcctttgtggccatgggccacatcatgtacttccgctttgcccagaacaccctgggcaacaagctgtttgcctgtggcccagatgccaaggaggtgaggaaagaaaaccaggccaacacctctgtggtgtag

SEQ ID NO: 180814 - DNA, 603 bp, Artificial Sequence
  derived and/or modified sequence
atgacccgggccggggaccacaaccggcagaggggctgctgcggcagcctggccgactacctgaccagcgccaagttcctgctgtacctgggccacagcctgagcacctggggagacaggatgtggcactttgctgtgtctgtgttcctggtggagctgtatggcaacagcctgctgctgacagctgtgtatggcctggtggtggccggctctgtgctggtgctgggcgccatcattggagactgggtggacaagaatgcccggctgaaggtggcccagaccagcctggtggtgcagaatgtgtctgtcatcctgtgtggcatcatcctgatgatggtgttcctgcacaagcatgagctgctgaccatgtaccacggctgggtgctgaccagctgctacatcctgatcatcaccatcgccaacatcgccaacctggccagcacagccacagccatcaccatccagagggactggatcgtggtggtggccggagaagatagaagcaagctggccaacatgaatgccaccatcagaagaattgaccagctgaccaacatcctggcccccatggctgtgggccagatcatgaccttcggcagctag

SEQ ID NO: 180815 - DNA, 78 bp, Artificial Sequence
  derived and/or modified sequence
atgacccgggccggggaccacaaccggcagaggggctgctgcggcagcctggccgactacctgaccagcgccaagtag

SEQ ID NO: 180816 - DNA, 168 bp, Artificial Sequence
  derived and/or modified sequence
atgacccgggccggggaccacaaccggcagaggggctgctgcggcagcctggccgactacctgaccagcgccaagttcctgctgtacctgggccacagcctgagcacctggggagacaggatgtggcactttgctgtgtctgtgttcctggtggagctgtatggatag

SEQ ID NO: 180817 - DNA, 300 bp, Artificial Sequence
  derived and/or modified sequence
atgagggccagcatccacaagaagctgaggaagagcagcggcatcgtgaccatcctgtacagcgcctttgtgctggtgtccaccagtgacatggccgaggagacagaagatgcctggccccgctgctacctgcagttcctggccctgctgctgaccagcaccagcgcccgggctgctgctgccatcgctgctgctgaggagcctgctggcagccccagcgtgatgacccgggccggggaccacaaccggcagaggggctgctgcggcagcctggccgactacctgaccagcgccaagtag

SEQ ID NO: 180818 - DNA, 1716 bp, Artificial Sequence
  derived and/or modified sequence
atgacccgggccggcgaccacaaccggcagcggggctgctgcggctccttggccgactaccttactagcgcaaagtttctgctctatcttggacatagcctgtctacctggggcgaccgcatgtggcacttcgcagtgagcgtttttctcgtagaactgtacggtaattccctgctcttaactgccgtgtatggtttggtcgtcgcgggctccgttcttgtgctcggagccatcataggggattgggtcgacaagaacgcacgcctgaaggtggcacaaacctccctcgtcgtgcagaacgtctccgttattttgtgtggtatcatactaatgatggtcttcctgcacaaacacgagttgctgacaatgtaccacggatgggtactcacttcgtgttacatacttataataacaattgcaaacatcgccaacttagcatccactgctacagccataacaatacagcgcgattggattgtcgtggtggccggggaagaccggagcaagctggcaaacatgaatgccaccattcgcaggatcgaccagctcactaatattttagcacccatggcagtcggacagattatgacattcggcagccctgtcatcggatgtggattcatctctggctggaaccttgtgagcatgtgcgttgagtatgtcctgctgtggaaagtgtaccagaaaacgccagccctggcagttaaggctggcttgaaagaggaagaaaccgagctgaagcagctgaacctccacaaagatacagagcctaagcctctggagggcacccatttgatgggagtgaaggactctaacatccatgagctagagcatgagcaagaaccaacttgtgcctcgcaaatggctgagccattccggacttttagagacggatgggtcagctattataatcagcctgtctttctagccggaatgggcctagcgttcctttacatgaccgtactggggttcgactgtatcaccacggggtacgcctatacccaggggctgagtggctctatactatcaattctgatgggggccagtgcgatcacgggtattatgggcaccgtggcctttacttggctgcgccggaaatgcgggctcgtccgcaccgggctcatctcaggactcgcccagctgtcctgcctgatcctgtgtgtgatttcagtgttcatgcccggtagccctttggatctgtccgtcagcccatttgaggatatacgatctagattcattcagggagagtccattactcctactaagattcctgaaatcaccacagagatatacatgagcaatggctcgaacagtgctaatatagtccctgagacgagccccgaaagtgtgcctatcattagcgtctctctgctctttgcaggagtaatcgccgctcggattggactgtggtcctttgacctcaccgtcacccagctgcttcaagagaacgtgatcgaatcagagagagggattataaacggggtccagaacagcatgaactacctcctggacctgctccacttcattatggtgatcttggctccaaatccagaagcctttgggttgctggttctgattagcgtatcttttgtggccatgggccatatcatgtactttaggtttgctcagaacacactgggtaacaagctgtttgcatgcgggcccgacgccaaggaggtacggaaggaaaaccaagccaatacgtccgttgtctag

SEQ ID NO: 180819 - DNA, 603 bp, Artificial Sequence
  derived and/or modified sequence
atgacccgggccggcgaccacaaccggcagcggggctgctgcggcagcctggcggactatctaacgtctgccaagtttttactctatttaggacattctttatctacatggggagatcgcatgtggcattttgccgtgagtgtcttcctggtagagctctacggcaacagcttgctgttgactgcagtgtatggcctggtcgtcgccgggagtgtcttggtcttaggggcaattataggcgactgggtggacaagaacgctcggctcaaggtcgctcaaaccagcttggtcgttcagaatgtctccgtgatattgtgcggtataatcctcatgatggtgttcctgcacaaacacgaactgttgacgatgtaccacggctgggtattgacatcctgttatattcttatcatcaccatagctaatatagccaatcttgcgagcacagccactgcgattacaatccagcgcgactggatcgtggttgtggcaggcgaggacagatcgaagttagctaatatgaatgctaccattcggcgaatcgaccagctgactaatatcctggcacccatggccgtgggacaaatcatgactttcggaagctag

SEQ ID NO: 180820 - DNA, 78 bp, Artificial Sequence
  derived and/or modified sequence
atgacccgggccggcgaccacaaccggcagcggggctgctgcggctccttagccgactacctgactagcgcaaagtag

SEQ ID NO: 180821 - DNA, 78 bp, Artificial Sequence
  derived and/or modified sequence
atgacccgggccggcgaccacaaccggcagcggggctgctgcggcagcttggccgactacctgactagtgctaagtag

SEQ ID NO: 180822 - DNA, 168 bp, Artificial Sequence
  derived and/or modified sequence
atgacccgggccggcgaccacaaccggcagcggggctgctgcggctccctcgcagactacctaacctctgccaagttcctgttgtacctcggccactctctttcaacttggggcgaccgtatgtggcatttcgcggtaagtgtttttttggtggagttatacgggtag

SEQ ID NO: 180823 - DNA, 300 bp, Artificial Sequence
  derived and/or modified sequence
atgcgggccagcatccacaagaagctgcggaagagcagcggcatcgtcaccatcctatactctgcgttcgttctggtctcaacgagtgacatggcagaggagacagaagatgcatggccaagatgttacctgcaattccttgcactactgctgaccagcacgtctgcaagggcagccgccgctatcgcagcagccgaagagcccgccgggtcaccaagcgttatgaccagagccggtgaccacaacaggcagcgcggctgttgtggcagcctggcggactatcttaccagtgcaaaatag

SEQ ID NO: 180824 - DNA, 1716 bp, Artificial Sequence
  derived and/or modified sequence
atgaccagagccggagaccacaataggcagcggggttgttgtggatccctcgcggattacctgacaagcgcgaaattcttgctgtacctcgggcactctttaagcacttggggcgaccgaatgtggcacttcgctgtgagcgtttttcttgtggagctgtatggcaattcactgctgctgaccgcagtatacggtctggttgtcgctggcagtgtccttgtgctcggcgctatcattggagattgggtggacaagaacgcgcgactcaaggtggcacagacctccttagtggttcagaatgtgagcgtcattctgtgtgggattatcttgatgatggtgtttctacacaaacacgagttactgaccatgtatcacggttgggttctcacaagctgctacattctaattatcaccattgccaatatcgctaatctagcctctacagctactgctatcaccatccagagagactggatcgtagtggtagcaggtgaggaccggagcaaacttgccaatatgaatgctacaatcagacgtatagatcaactgaccaacatcctggctccaatggcagttggacagatcatgacattcggaagtccggtgatagggtgtgggtttatctccggatggaatttggtgtcaatgtgcgttgaatatgtgctgctatggaaagtgtatcagaagacgcccgcactggctgtgaaggcaggcctcaaggaagaagagaccgagctcaagcaactgaaccttcacaaagataccgagcccaagccattggagggcacccatctgatgggcgtgaaggactcgaatatccacgaactggagcatgaacaggagccaacatgcgcatcgcaaatggcagaaccttttcgcacattcagagacggatgggtatcgtactacaaccagccggtgttcttggccggaatgggactggccttcctctacatgaccgtgctgggttttgactgcatcaccacgggctacgcctacacacaaggattatccgggtccatcctttctatccttatgggcgcttctgcaatcacgggcatcatggggaccgtcgcattcacctggctgcgccgtaagtgtggactcgtgcgtacaggactgatatctgggctcgcacagctctcttgcctgatcctatgtgttatatcagtcttcatgcccggaagcccgctggaccttagcgtgtcaccctttgaagatatacgcagcagattcatccagggagagagcattacccccaccaagatccctgagatcacaacagaaatctatatgagcaatggttctaacagcgctaacattgttcctgagacctccccagaaagtgttccgataatatcggtgtccctgcttttcgccggtgtgatcgcggcacgaatcggtctgtggtcattcgatcttactgtgactcagctgttacaggagaacgtcatcgagtccgagcgcggaataattaacggagtgcaaaattcaatgaattaccttttagacctgctgcattttataatggttatcctcgcaccaaatcccgaagcctttggtctgctagttctgatatcagtcagtttcgtcgccatgggacacattatgtattttcgatttgcacagaatacacttggcaataagcttttcgcctgcggcccagacgctaaggaagttagaaaggagaaccaagcaaataccagcgtcgtttag

SEQ ID NO: 180825 - DNA, 603 bp, Artificial Sequence
  derived and/or modified sequence
atgacacgggcaggtgaccacaacagacagcggggttgctgtggctccctcgcagactatctgacatccgcaaagttcctcctatacctggggcacagcttgtcaacttggggagatcggatgtggcacttcgcggtgtccgtgttccttgtagagctttacgggaattctctgctgctgaccgcggtttatggcctcgtcgtggccggttccgtcctggtcctgggagcaattatcggggattgggttgataaaaacgccaggctgaaggttgcccagacttccctggtggtgcagaacgtgagtgtcatactgtgcggaatcatcctgatgatggtctttctacacaagcatgaattgcttaccatgtaccacggttgggtccttacctcctgctacattctaatcattactattgccaacattgcgaacctggcatccaccgccacagctattacaattcaacgggattggattgtcgtagtagccggagaggaccgctctaaactcgcaaatatgaacgccactattaggaggattgatcagcttaccaacattctcgccccaatggccgtcgggcagataatgacatttggtagttag

SEQ ID NO: 180826 - DNA, 78 bp, Artificial Sequence
  derived and/or modified sequence
atgacccgggctggagatcacaaccgccaaagagggtgttgcggaagtctggccgattaccttacaagcgctaaatag

SEQ ID NO: 180827 - DNA, 78 bp, Artificial Sequence
  derived and/or modified sequence
atgacacgcgcaggtgaccataacaggcagcgaggttgctgcgggtcactcgctgactatctaacatccgcaaaatag

SEQ ID NO: 180828 - DNA, 168 bp, Artificial Sequence
  derived and/or modified sequence
atgaccagagcgggagatcacaatcggcagcgtggatgctgtgggtctctggccgattaccttacctcagcaaagttcctgttgtacctgggccacagcttgagtacttggggcgacaggatgtggcacttcgccgtgagcgtgtttctagtcgagctgtatggctag

SEQ ID NO: 180829 - DNA, 300 bp, Artificial Sequence
  derived and/or modified sequence
atgagggcgagtattcataagaagctccgcaagagtagcggcatagttactatcttgtattccgccttcgttctcgtgagcactagtgatatggcggaagagaccgaggacgcttggccacgttgctatcttcagtttttggctctcctgctcacctcgacgtcagcaagagcagccgctgccattgccgctgcagaggagccggcaggttccccaagcgtgatgactcgagcgggagatcataacaggcagaggggctgttgcgggagccttgcagactatctgacaagtgctaaatag

SEQ ID NO: 180830 - DNA, 3442 bp, Artificial Sequence
  derived and/or modified sequence
gggacgcccgggcggccctgaaggggacggggcggccccagtcggaggtcgcagggagctccgcccccgactcggtataagagctgggcccggcccacggcggcggcggcggcggcggagagagctggctcagggcgtccgctaggctcggacgacctgctgagcctcccaaaccgcttccataaggctttgcctttccaacttcagctacagtgttagctaagtttggaaagaaggaaaaaagaaaatccctgggccccttttcttttgttctttgccaaagtcgtcgttgtagtctttttgcccaaggctgttgtgtttttagaggtgctatctccagttccttgcactcctgttaacaagcacctcagcgagagcagcagcagcgatagcagccgcagaagagccagcggggtcgcctagtgtcatgaccagggcgggagatcacaaccgccagagaggatgctgtggatccttggccgactacctgacctctgcaaaattccttctctaccttggtcattctctctctacttggggagatcggatgtggcactttgcggtgtctgtgtttctggtagagctctatggaaacagcctccttttgacagcagtctacgggctggtggtggcagggtctgttctggtcctgggagccatcatcggtgactgggtggacaagaatgctagacttaaagtggcccagacctcgctggtggtacagaatgtttcagtcatcctgtgtggaatcatcctgatgatggttttcttacataaacatgagcttctgaccatgtaccatggatgggttctcacttcctgctatatcctgatcatcactattgcaaatattgcaaatttggccagtactgctactgcaatcacaatccaaagggattggattgttgttgttgcaggagaagacagaagcaaactagcaaatatgaatgccacaatacgaaggattgaccagttaaccaacatcttagcccccatggctgttggccagattatgacatttggctccccagtcatcggctgtggctttatttcgggatggaacttggtatccatgtgcgtggagtacgttctgctctggaaggtttaccagaaaaccccagctctagctgtgaaagctggtcttaaagaagaggaaactgaattgaaacagctgaatttacacaaagatactgagccaaaacccctggagggaactcatctaatgggtgtgaaagactctaacatccatgagcttgaacatgagcaagagcctacttgtgcctcccagatggctgagcccttccgtaccttccgagatggatgggtctcctactacaaccagcctgtgtttctggctggcatgggtcttgctttcctttatatgactgtcctgggctttgactgcatcaccacagggtacgcctacactcagggactgagtggttccatcctcagtattttgatgggagcatcagctataactggaataatgggaactgtagcttttacttggctacgtcgaaaatgtggtttggttcggacaggtctgatctcaggattggcacagctttcctgtttgatcttgtgtgtgatctctgtattcatgcctggaagccccctggacttgtccgtttctccttttgaagatatccgatcaaggttcattcaaggagagtcaattacacctaccaagatacctgaaattacaactgaaatatacatgtctaatgggtctaattctgctaatattgtcccggagacaagtcctgaatctgtgcccataatctctgtcagtctgctgtttgcaggcgtcattgctgctagaatcggtctttggtcctttgatttaactgtgacacagttgctgcaagaaaatgtaattgaatctgaaagaggcattataaatggtgtacagaactccatgaactatcttcttgatcttctgcatttcatcatggtcatcctggctccaaatcctgaagcttttggcttgctcgtattgatttcagtctcctttgtggcaatgggccacattatgtatttccgatttgcccaaaatactctgggaaacaagctctttgcttgcggtcctgatgcaaaagaagttaggaaggaaaatcaagcaaatacatctgttgtttgagacagtttaactgttgctatcctgttactagattatatagagcacatgtgcttattttgtactgcagaattccaataaatggctgggtgttttgctctgtttttaccacagctgtgccttgagaactaaaagctgtttaggaaacctaagtcagcagaaattaactgattaatttcccttatgttgaggcatggaaaaaaaattggaaaagaaaaactcagtttaaatacggagactataatgataacactgaattcccctatttctcatgagtagatacaatcttacgtaaaagagtggttagtcacgtgaattcagttatcatttgacagattcttatctgtactagaattcagatatgtcagttttctgcaaaactcactcttgttcaagactagctaatttatttttttgcatcttagttatttttaaaaacaaattcttcaagtatgaagactaaattttgataactaatattatccttattgatcctattgatcttaaggtatttacatgtatgtggaaaaacaaaacacttaactagaattctctaataaggtttatggtttagcttaaagagcacctttgtatttttattatcagatggggcaacatattgtatgaagcatatgtagcacttcacagcatggttatcatgtaagctgcaggtagaagcaaagctgtaaagtagatttatcacacaatgactgcatacagacttcaaatatgtcaatagtttggtcatagaacctagaagccaaaagccacacagaagggcaagaatcccaatttaactcatgttatcatcattagtgatctgtgttgtagaacatgagggtgtaagccttcagcctggcaagttacatgtagaaagcccacacttgtgaaggttttgttttacaaatcacttgatttaacacactcaggtagaatatttttatttttactgttttatacccagaagttatttctacattgttctacagcaagaatattcataaaagtatccctttcaaatgcctttgagaagaatagaagaaaaaaagtttgtatatattttaaaaaattgttttaaaagtcagtttgcaacatgtctgtaccaagatggtactttgccttaaccgtttatatgcactttcatggagactgcaatacgttgctatgagcactttctttatccttggagtttaatcctttgcttcatctttctacagtatgacataatgatttgctatgttgtaaaatctttgtaaaaaatttctatataaaaatattttgaaaatcttaatttttcctgaa

SEQ ID NO: 180831 - DNA, 824 bp, Artificial Sequence
  derived and/or modified sequence
aatgagagccagcattcataagaaacttcgcaagagcagtggaatagtgaccattctttattctgcctttgtcctggtgagcacatctgatatggcagaggaaactgaggatgcctggccgaggtgctatctccagttccttgcactcctgttaacaagcacctcagcgagagcagcagcagcgatagcagccgcagaagagccagcggggtcgcctagtgtcatgaccagggcgggagatcacaaccgccagagaggatgctgtggatccttggccgactacctgacctctgcaaaattccttctctaccttggtcattctctctctacttggggagatcggatgtggcactttgcggtgtctgtgtttctggtagagctctatggaaacagcctccttttgacagcagtctacgggctggtggtggcagggtctgttctggtcctgggagccatcatcggtgactgggtggacaagaatgctagacttaaagtggcccagacctcgctggtggtacagaatgtttcagtcatcctgtgtggaatcatcctgatgatggttttcttacataaacatgagcttctgaccatgtaccatggatgggttctcacttcctgctatatcctgatcatcactattgcaaatattgcaaatttggccagtactgctactgcaatcacaatccaaagggattggattgttgttgttgcaggagaagacagaagcaaactagcaaatatgaatgccacaatacgaaggattgaccagttaaccaacatcttagcccccatggctgttggccagattatgacatttggctccc

SEQ ID NO: 180832 - DNA, 299 bp, Artificial Sequence
  derived and/or modified sequence
atactcatgcgtggctcccttcactactgggtgtcagtctggcctgtgctcaaggtgtggcatctggttggagtttcaatatgtaggatccactaccagggttttcgtgagattaagaaggaggtgctatctccagttccttgcactcctgttaacaagcacctcagcgagagcagcagcagcgatagcagccgcagaagagccagcggggtcgcctagtgtcatgaccagggcgggagatcacaaccgccagagaggatgctgtggatccttggccgactacctgacctctgcaaaat

SEQ ID NO: 180833 - DNA, 209 bp, Artificial Sequence
  derived and/or modified sequence
attctttattctgcctttgtcctggtgagcacatctgatatggcagaggaaactgaggatgcctggccgcacctcagcgagagcagcagcagcgatagcagccgcagaagagccagcggggtcgcctagtgtcatgaccagggcgggagatcacaaccgccagagaggatgctgtggatccttggccgactacctgacctctgcaaaat

SEQ ID NO: 180834 - DNA, 592 bp, Artificial Sequence
  derived and/or modified sequence
acagggcacatactcatgcgtggctcccttcactactgggtgtcagtctggcctgtgctcaaggtgtggcatctggttggagtttcaatatgtaggatccactaccagggttttcgtgagattaagaagggtaaggtaacctactggcaaaaggggctggtatgccccaggggttggtttggcacagcaggattaaaacgaagtcaaccaaggctagagtctggtgttctttagtcattcacctcaccctccaggaggccaccgaatggctttatctggacagggacagatccagggacacaactgggataaccggtattcctgaggtgctatctccagttccttgcactcctgttaacaagcacctcagcgagagcagcagcagcgatagcagccgcagaagagccagcggggtcgcctagtgtcatgaccagggcgggagatcacaaccgccagagaggatgctgtggatccttggccgactacctgacctctgcaaaattccttctctaccttggtcattctctctctacttggggagatcggatgtggcactttgcggtgtctgtgtttctggtagagctctatggaa

SEQ ID NO: 180835 - DNA, 2368 bp, Artificial Sequence
  derived and/or modified sequence
atgagagccagcattcataagaaacttcgcaagagcagtggaatagtgaccattctttattctgcctttgtcctggtgagcacatctgatatggcagaggaaactgaggatgcctggccgaggtgctatctccagttccttgcactcctgttaacaagcacctcagcgagagcagcagcagcgatagcagccgcagaagagccagcggggtcgcctagtgtcatgaccagggcgggagatcacaaccgccagagaggatgctgtggatccttggccgactacctgacctctgcaaaattccttctctaccttggtcattctctctctacttggggagatcggatgtggcactttgcggtgtctgtgtttctggtagagctctatggaaacagcctccttttgacagcagtctacgggctggtggtggcagggtctgttctggtcctgggagccatcatcggtgactgggtggacaagaatgctagacttaaagtggcccagacctcgctggtggtacagaatgtttcagtcatcctgtgtggaatcatcctgatgatggttttcttacataaacatgagcttctgaccatgtaccatggatgggttctcacttcctgctatatcctgatcatcactattgcaaatattgcaaatttggccagtactgctactgcaatcacaatccaaagggattggattgttgttgttgcaggagaagacagaagcaaactagcaaatatgaatgccacaatacgaaggattgaccagttaaccaacatcttagcccccatggctgttggccagattatgacatttggctccccagtcatcggctgtggctttatttcgggatggaacttggtatccatgtgcgtggagtacgttctgctctggaaggtttaccagaaaaccccagctctagctgtgaaagctggtcttaaagaagaggaaactgaattgaaacagctgaatttacacaaagatactgagccaaaacccctggagggaactcatctaatgggtgtgaaagactctaacatccatgagcttgaacatgagcaagagcctacttgtgcctcccagatggctgagcccttccgtaccttccgagatggatgggtctcctactacaaccagcctgtgtttctggctggcatgggtcttgctttcctttatatgactgtcctgggctttgactgcatcaccacagggtacgcctacactcagggactgagtggttccatcctcagtattttgatgggagcatcagctataactggaataatgggaactgtagcttttacttggctacgtcgaaaatgtggtttggttcggacaggtctgatctcaggattggcacagctttcctgtttgatcttgtgtgtgatctctgtattcatgcctggaagccccctggacttgtccgtttctccttttgaagatatccgatcaaggttcattcaaggagagtcaattacacctaccaagatacctgaaattacaactgaaatatacatgtctaatgggtctaattctgctaatattgtcccggagacaagtcctgaatctgtgcccataatctctgtcagtctgctgtttgcaggcgtcattgctgctagaatcggtctttggtcctttgatttaactgtgacacagttgctgcaagaaaatgtaattgaatctgaaagaggcattataaatggtgtacagaactccatgaactatcttcttgatcttctgcatttcatcatggtcatcctggctccaaatcctgaagcttttggcttgctcgtattgatttcagtctcctttgtggcaatgggccacattatgtatttccgatttgcccaaaatactctgggaaacaagctctttgcttgcggtcctgatgcaaaagaagttaggaaggaaaatcaagcaaatacatctgttgtttgagacagtttaactgttgctatcctgttactagattatatagagcacatgtgcttattttgtactgcagaattccaataaatggctgggtgttttgctctgtttttaccacagctgtgccttgagaactaaaagctgtttaggaaacctaagtcagcagaaattaactgattaatttcccttatgttgaggcatggaaaaaaaattggaaaagaaaaactcagtttaaatacggagactataatgataacactgaattcccctatttctcatgagtagatacaatcttacgtaaaagagtggttagtcacgtgaattcagttatcatttgacagattcttatctgtactagaattcagatatgtcagttttctgcaaaactcactcttgttcaagactagctaatttatttttttgcatcttagttattttt

SEQ ID NO: 180836 - DNA, 2286 bp, Artificial Sequence
  derived and/or modified sequence
cttaaagaagaggaaactgaattgaaacagctgaatttacacaaagatactgagccaaaacccctggagggaactcatctaatgggtgtgaaagactctaacatccatgagcttgaacatgagcaagagcctacttgtgcctcccagatggctgagcccttccgtaccttccgagatggatgggtctcctactacaaccagcctgtgtttctggctggcatgggtcttgctttcctttatatgactgtcctgggctttgactgcatcaccacagggtacgcctacactcagggactgagtggttccatcctcagtattttgatgggagcatcagctataactggaataatgggaactgtagcttttacttggctacgtcgaaaatgtggtttggttcggacaggtctgatctcaggattggcacagctttcctgtttgatcttgtgtgtgatctctgtattcatgcctggaagccccctggacttgtccgtttctccttttgaagatatccgatcaaggttcattcaaggagagtcaattacacctaccaagatacctgaaattacaactgaaatacatgtctaatgggtctaattctgctaatattgtcccggagacaagtcctgaatctgtgcccataatctctgtcagtctgctgtttgcaggcgtcattgctgctagaatcggtctttggtcctttgatttaactgtgacacagttgctgcaagaaaatgtaattgaatctgaaagaggcattataaatggtgtacagaactccatgaactatcttcttgatcttctgcatttcatcatggtcatcctggctccaaatcctgaagcttttggcttgctcgtattgatttcagtctcctttgtggcaatgggccacattatgtatttccgatttgcccaaaatactctgggaaacaagctctttgcttgcggtcctgatgcaaaagaagttaggaaggaaaatcaagcaaatacatctgttgtttgagacagtttaactgttgctatcctgttactagattatatagagcacatgtgcttattttgtactgcagaattccaataaatggctgggtgttttgctctgtttttaccacagctgtgccttgagaactaaaagctgtttaggaaacctaagtcagcagaaattaactgattaatttcccttatgttgaggcatggaaaaaaaattggaaaagaaaaactcagtttaaatacggagactataatgataacactgaattcccctatttctcatgagtagatacaatcttacgtaaaagagtggttagtcacgtgaattcagttatcatttgacagattcttatctgtactagaattcagatatgtcagttttctgcaaaactcactcttgttcaagactagctaatttatttttttgcatcttagttatttttaaaaacaaattcttcaagtatgaagactaaattttgataactaatattatccttattgatcctattgatcttaaggtatttacatgtatgtggaaaaacaaaacacttaactagaattctctaataaggtttatggtttagcttaaagagcacctttgtatttttattatcagatggggcaacatattgtatgaagcatatgtagcacttcacagcatggttatcatgtaagctgcaggtagaagcaaagctgtaaagtagatttatcacacaatgactgcatacagacttcaaatatgtcaatagtttggtcatagaacctagaagccaaaagccacacagaagggcaagaatcccaatttaactcatgttatcatcattagtgatctgtgttgtagaacatgagggtgtaagccttcagcctggcaagttacatgtagaaagcccacacttgtgaaggttttgttttacaaatcacttgatttaacacactcaggtagaatatttttatttttactgttttatacccagaagttatttctacattgttctacagcaagaatattcataaaagtatccctttcaaatgcctttgagaagaatagaagaaaaaaagtttgtatatattttaaaaaattgttttaaaagtcagtttgcaacatgtctgtaccaagatggtactttgccttaaccgtttatatgcactttcatggagactgcaatacgttgctatgagcactttctttatccttggagtttaatcctttgcttcatctttctacagtatgacataatgatttgctatgttgtaaaatctttgtaaaaaatttctatataaaaatattttgaaaatctt

SEQ ID NO: 180837 - protein, 714 aa, Artificial Sequence
  derived and/or modified sequence
MPAAAGDGLLGEPAAPGGGGGAEDAARPAAACEGSFLPAWVSGVPRERLRDFQHHKRVGNYLIGSRKLGEGSFAKVREGLHVLTGEKVAIKVIDKKRAKKDTYVTKNLRREGQIQQMIRHPNITQLLDILETENSYYLVMELCPGGNLMHKIYEKKRLEESEARRYIRQLISAVEHLHRAGVVHRDLKIENLLLDEDNNIKLIDFGLSNCAGILGYSDPFSTQCGSPAYAAPELLARKKYGPKIDVWSIGVNMYAMLTGTLPFTVEPFSLRALYQKMVDKEMNPLPTQLSTGAISFLRSLLEPDPVKRPNIQQALANRWLNENYTGKVPCNVTYPNRISLEDLSPSVVLHMTEKLGYKNSDVINTVLSNRACHILAIYFLLNKKLERYLSGKSDIQDSLCYKTRLYQIEKYRAPKESYEASLDTWTRDLEFHAVQDKKPKEQEKRGDFLHRPFSKKLDKNLPSHKQPSGSLMTQIQNTKALLKDRKASKSSFPDKDSFGCRNIFRKTSDSNCVASSSMEFIPVPPPRTPRIVKKPEPHQPGPGSTGIPHKEDPLMLDMVRSFESVDRDDHVEVLSPSHHYRILNSPVSLARRNSSERTLSPGLPSGSMSPLHTPLHPTLVSFAHEDKNSPPKEEGLCCPPPVPSNGPMQPLGSPNCVKSRGRFPMMGIGQMLRKRHQSLQPSADRPLEASLPPLQPLAPVNLAFDMADGVKTQC

SEQ ID NO: 180838 - DNA, 2145 bp, Artificial Sequence
  derived and/or modified sequence
atgcccgccgccgccggcgacggcctgctgggcgagcccgccgcccccggcggcggcggcggcgccgaggacgccgccagacccgccgccgcctgcgagggcagcttcctgcccgcctgggtgagcggcgtgcccagagagagactgagagacttccagcaccacaagagagtgggcaactacctgatcggcagcagaaagctgggcgagggcagcttcgccaaggtgagagagggcctgcacgtgctgaccggcgagaaggtggccatcaaggtgatcgacaagaagagagccaagaaggacacctacgtgaccaagaacctgagaagagagggccagatccagcagatgatcagacaccccaacatcacccagctgctggacatcctggagaccgagaacagctactacctggtgatggagctgtgccccggcggcaacctgatgcacaagatctacgagaagaagagactggaggagagcgaggccagaagatacatcagacagctgatcagcgccgtggagcacctgcacagagccggcgtggtgcacagagacctgaagatcgagaacctgctgctggacgaggacaacaacatcaagctgatcgacttcggcctgagcaactgcgccggcatcctgggctacagcgaccccttcagcacccagtgcggcagccccgcctacgccgcccccgagctgctggccagaaagaagtacggccccaagatcgacgtgtggagcatcggcgtgaacatgtacgccatgctgaccggcaccctgcccttcaccgtggagcccttcagcctgagagccctgtaccagaagatggtggacaaggagatgaaccccctgcccacccagctgagcaccggcgccatcagcttcctgagaagcctgctggagcccgaccccgtgaagagacccaacatccagcaggccctggccaacagatggctgaacgagaactacaccggcaaggtgccctgcaacgtgacctaccccaacagaatcagcctggaggacctgagccccagcgtggtgctgcacatgaccgagaagctgggctacaagaacagcgacgtgatcaacaccgtgctgagcaacagagcctgccacatcctggccatctacttcctgctgaacaagaagctggagagatacctgagcggcaagagcgacatccaggacagcctgtgctacaagaccagactgtaccagatcgagaagtacagagcccccaaggagagctacgaggccagcctggacacctggaccagagacctggagttccacgccgtgcaggacaagaagcccaaggagcaggagaagagaggcgacttcctgcacagacccttcagcaagaagctggacaagaacctgcccagccacaagcagcccagcggcagcctgatgacccagatccagaacaccaaggccctgctgaaggacagaaaggccagcaagagcagcttccccgacaaggacagcttcggctgcagaaacatcttcagaaagaccagcgacagcaactgcgtggccagcagcagcatggagttcatccccgtgcccccccccagaacccccagaatcgtgaagaagcccgagccccaccagcccggccccggcagcaccggcatcccccacaaggaggaccccctgatgctggacatggtgagaagcttcgagagcgtggacagagacgaccacgtggaggtgctgagccccagccaccactacagaatcctgaacagccccgtgagcctggccagaagaaacagcagcgagagaaccctgagccccggcctgcccagcggcagcatgagccccctgcacacccccctgcaccccaccctggtgagcttcgcccacgaggacaagaacagcccccccaaggaggagggcctgtgctgccccccccccgtgcccagcaacggccccatgcagcccctgggcagccccaactgcgtgaagagcagaggcagattccccatgatgggcatcggccagatgctgagaaagagacaccagagcctgcagcccagcgccgacagacccctggaggccagcctgccccccctgcagcccctggcccccgtgaacctggccttcgacatggccgacggcgtgaagacccagtgctag

SEQ ID NO: 180839 - DNA, 2145 bp, Artificial Sequence
  derived and/or modified sequence
atgcctgccgccgcaggtgatgggcttctgggcgagccagctgctccaggaggcgggggcggcgctgaggacgcggctaggccagctgccgcctgtgaagggtcatttctgcccgcttgggtctcaggtgtcccccgggagagactgagggacttccaacatcacaaaagggtgggtaactatctcatcggaagccgcaagctgggagaggggtcctttgccaaagtgcgggagggcctgcacgtcctcaccggagagaaagtggcgatcaaagtgatcgacaaaaaacgggcgaagaaagatacttacgtaactaagaacttacggagagagggacagattcagcagatgatcagacaccctaatattacccagctactcgacatcctggagaccgaaaactcttattatctcgttatggaactttgtccaggaggcaatctgatgcacaagatctatgagaagaagaggctggaagaatcggaggcaagacgatacatacgccaacttatctccgcagtagagcatctgcaccgcgccggggtggtacaccgagacctcaaaatcgagaacctgctactggatgaggacaataatatcaaattgatcgatttcggcctatctaactgcgcagggatcctaggatatagtgatccttttagcacccagtgcgggtcacctgcttatgctgctcctgaacttctggcaagaaaaaagtacggcccaaaaattgatgtatggtctataggggtaaatatgtatgcaatgctcactggaaccctgcctttcaccgtggaaccattttccctgagagcgctctaccagaaaatggtggataaggaaatgaatcccctacccacgcagttatccaccggggcaattagcttcctgaggtctctcttagaacccgatccagtgaagcgacccaacatccagcaggccctcgccaataggtggctgaatgagaactacactggcaaggtaccctgtaacgtgacctacccgaaccgcatctccctagaagatctcagtccctctgtcgttctgcacatgactgagaagctcgggtacaaaaacagcgacgttatcaatactgtcctgtccaatcgggcgtgtcacatcctggccatttatttcctcttgaataagaagctcgagaggtatctgagcggtaagtcagacatccaggattctctctgttataaaactcgcttgtaccagatcgagaaataccgggctcctaaagagagctatgaagcatcccttgacacatggacacgggacctggagttccacgctgtacaggataagaagccaaaggagcaggaaaaaagaggtgatttcctgcatcgtcctttctccaaaaagctcgataagaatcttcccagtcacaaacaaccatccggatcactcatgacccagatccaaaatacaaaagccttgttgaaggatcgtaaggcatctaagtcctcattccctgataaagatagcttcggctgccggaatattttccgaaaaacctctgactcaaactgtgttgcttctagttctatggaatttatccccgtgcctcctccaagaacacccagaatcgtaaaaaaacctgagcctcatcagccgggccctggttcaactgggatcccacataaggaagatccactcatgctggatatggtgaggtcatttgagagtgtggaccgcgacgatcatgtggaagtattgtccccaagccaccattatcgcattctgaacagcccagtgtcccttgcccgacggaattcgtcagagcgcaccttaagccccggtctgccttcaggatctatgtctccactgcacacacctctgcacccaactctcgtctctttcgcccacgaggacaagaacagcccccccaaggaggagggattgtgttgtccaccaccagttccctctaatggacctatgcagccgctgggcagccccaactgtgttaagagcaggggtcggttcccaatgatgggtattgggcagatgttaagaaagaggcaccaaagtttgcagccctccgcagaccgaccactggaagcgtcactgccaccgctgcagcccctggctcccgtgaacctggccttcgacatggctgacggcgtcaagacccagtgctag

SEQ ID NO: 180840 - DNA, 2145 bp, Artificial Sequence
  derived and/or modified sequence
atgcctgctgctgctggagatggcctgctgggggagcctgctgcccctgggggcggcggcggcgcagaagatgctgcccggcctgctgctgcctgtgagggcagcttcctgcctgcctgggtgtctggagtgccccgggagcggctgcgggacttccagcaccacaagagggtgggcaactacctgattggcagcaggaagctgggggagggcagctttgccaaggtgcgggagggcctgcacgtgctgaccggggagaaggtggccatcaaggtgattgacaagaagagggccaagaaggacacctacgtgaccaagaacctgcggcgggagggccagatccagcagatgatccgccaccccaacatcacccagctgctggacatcctggagacagaaaattcctactacctggtgatggagctgtgccctgggggcaacctgatgcacaagatctatgagaagaagaggctggaggagagcgaggcccggcgctacatccggcagctgatctctgctgtggagcacctgcaccgggccggcgtggtgcaccgggacctgaagattgagaacctgctgctggatgaggacaacaacatcaagctgattgactttggcctgagcaactgtgccggcatcctgggctacagcgaccccttcagcacccagtgtggcagccctgcctatgctgcccctgagctgctggccaggaagaagtatggccccaagattgatgtgtggagcattggagtgaacatgtatgccatgctgaccggcaccctgcccttcaccgtggagcccttcagcctgcgggccctgtaccagaagatggtggacaaggagatgaaccccctgcccacccagctgagcactggagccatctccttcctgcggagcctgctggagccagaccctgtgaagaggcccaacatccagcaggccctggccaaccgctggctgaatgaaaactacacaggcaaggtgccctgcaatgtgacctaccccaaccgcatcagcctggaggacctgagccccagcgtggtgctgcacatgacagagaagctgggctacaagaacagtgatgtgatcaacacagtgctgagcaacagagcctgccacatcctggccatctacttcctgctgaacaagaagctggagcgctacctgagcggcaagagtgacatccaggacagcctgtgctacaagacccggctgtaccagatcgagaagtaccgggcccccaaggagagctatgaggccagcctggacacctggacccgggacctggagttccacgctgtgcaggacaagaagcccaaggagcaggagaagagaggagacttcctgcaccggcccttcagcaagaagctggacaagaacctgcccagccacaagcagcccagcggcagcctgatgacccagatccagaacaccaaggccctgctgaaggacaggaaggccagcaagagcagcttcccagacaaggacagctttggctgcaggaacatcttcaggaagaccagtgacagcaactgtgtggccagcagctccatggagttcatccctgtgcccccacccaggaccccaagaattgtgaagaagccagagccccaccagcccggccctggcagcacaggcatcccccacaaggaggaccccctgatgctggacatggtgcgcagctttgagagcgtggacagagatgaccacgtggaggtgctgagccccagccaccactaccgcatcctgaacagccctgtgtccctggcccggaggaacagcagcgagaggaccctgagccctggcctgcccagcggctccatgagccccctgcacacccccctgcaccccaccctggtgtcctttgcccacgaggacaagaacagcccccccaaggaggagggcctgtgctgccccccacctgtgcccagcaatggccccatgcagcccctgggcagccccaactgtgtgaagagccggggccgcttccccatgatgggcatcggccagatgctgaggaagaggcaccagagcctgcagcccagcgctgaccggcccctggaggccagcctgccccccctgcagcccctggcccctgtgaacctggcctttgacatggctgatggagtgaagacccagtgctag

SEQ ID NO: 180841 - DNA, 7385 bp, Artificial Sequence
  derived and/or modified sequence
ggcgccgccggaccgcgccccaccccgcgcgcccgagcagggcgactgtcattagcttcctggacgggacccggggcgggatcctggtgtcctgaaaggggcccgggcgaccctaagaggaagaacttttgggggcggggtccccggtcccgcgtcccctgggcagccgctattgtctacgcgcctcgctgggcggcgcggggggcgtgatcgcggcggccccgggctctgggtgcggagacccaggcggggctgggcccagggcggcggcgggagaagccggggaagccgaagagcctggggaggaggagctgcgagcgcgggagacgagcaggagccgcgcgggccgcggcgagcgcgatgccggcggcggcgggggacgggctcctgggggagccggcggcgcctgggggcggcggcggcgcggaggacgcggccaggcccgcggcggcctgcgagggaagtttcctgcctgcctgggtgagcggcgtgccccgcgagcggctccgcgacttccagcaccacaagcgcgtgggcaactacctcatcggcagcaggaagctgggcgagggctcctttgccaaggtgcgcgaggggctgcacgtgctgaccggggagaaggtggccataaaagtcattgataagaagagagccaaaaaggacacctatgtcaccaaaaacctgcggcgagagggtcagatccagcagatgatccgccaccccaatatcactcagctccttgatattttagaaacggaaaacagctactacctggtcatggagctgtgccctgggggcaacctgatgcacaagatctatgagaagaagcggctggaggagtccgaagcccgcagatacatccgacagctcatctctgccgtagagcacctgcaccgggccggggtggtccacagagacttgaagatagagaatttgctactagatgaagacaataatatcaagctgattgactttggtttgagcaactgcgcagggatcctgggttactcggatccgttcagcacacagtgtggcagccctgcctacgctgcacctgaactgctcgccaggaagaaatacggccccaaaatcgatgtctggtccataggtgtgaacatgtatgccatgttgaccgggacgctgcctttcacggtggagcctttcagcctgagggctttgtaccagaagatggtagacaaagaaatgaaccccctccccactcagctctccacaggtgccatcagtttcctgcgctctctcctggaaccggatcctgtgaagaggccaaatattcagcaggcactggcgaatcgctggcttaatgagaattacacgggcaaagtgccctgtaatgtcacctatcccaacaggatttctctggaagatctgagcccgagcgtcgtgctgcacatgaccgagaagctgggttacaagaacagcgacgtgatcaacactgtgctctccaaccgcgcctgccacatcctggccatctacttcctcttaaacaagaaactggagcgctatttgtcagggaaatctgacatccaggacagcctctgctacaagacccggctctaccagatagaaaagtacagggcccccaaggagtcctatgaggcctctctggacacctggacacgagatcttgaattccatgccgtgcaggataaaaagcccaaagaacaagaaaaaagaggggattttcttcatcgaccattctccaagaagttggacaagaacctgccctcgcacaaacagccctcaggctcgcttatgacacagattcagaacaccaaagccctcctgaaggaccggaaggcctccaagtccagcttccccgacaaagattcctttggctgccgcaatattttccgcaaaacctcagattccaattgtgtggcttcttcttccatggagttcatccccgtgccaccgcccaggaccccgaggattgtgaagaaaccggagccccatcagccagggcccggaagcactggcatcccccacaaggaagaccccctgatgctggacatggtgcgctccttcgagtctgtggatcgcgacgaccacgtagaagtgctgtctccctctcatcactacaggattctgaactccccggtcagcttggctcgcagaaattccagcgagaggacgctgtccccgggtctgccatccggaagcatgtcgcctctccatactcctttgcatccaactctggtctcttttgctcacgaagataagaacagccccccaaaagaggagggcctgtgttgcccacctccggttcccagcaatggccccatgcagcctctggggagccccaattgtgtgaaaagccgaggccggttccctatgatgggcatcggacagatgttaaggaagcgccatcagagtctgcagccatctgcagataggcccctggaggccagcctgcccccactgcagcccctagcccctgtgaaccttgcctttgacatggccgatggggtcaagacccagtgctaacttgggccagcggggtttggggtatctctagaaaacagcaactgaacagagctccacacatctgtcagggtgtgagcactccaaggcctcgcgtggagcatccttagtcccacctgtagctgaatccacagacccaaagcctgcacaacccaacctcgcttagggacccccagagatgctggaatcgctaggagggttggctccaggggcagccaattcctatcattcagatcttccttcctcccaagtactcaccaaccccttccacttcccacttcccccaggcttggggggaaaacagggcatgagccttctggggcactcagattatggactgttaccagatctttcttcacgctgtgctacatgtgtgcctctcacagcagttggccacagttacagggagagaacaatatcacagtcattcatccaggccacgtttcctctgcggagtgtagcagccctgcctttcatagcagggattacctgaaggccagcaggagccgggggcaggcccaggatcctcagaggaagatggagaggagcttcggaccaagatcaaaccaaacagtggggaccccaacagaagagaaagactgaaggagacactcatttcccaagcaagattttgatagatttttgttgttgttgttgttgaaacatgctaatgattgaattatcttttccaaagattttttttaaatgtgatgtcggtaaattgaaataacataattttttaaaacttggatggagagatgagaagcaattccaccaaactcatgttttcacaggagggttcagtgtggagagcaaaaaagctgactgtggtgatttgctgagtgctgtggcccacaggcagggcaagtctcggtggccctgtgttcatcctgttgtttaaggcatagccctgatccttctggaaggcatagaacacggttacagctggttctgtagaaagagggaaaagatgattgtgacaattcagagcataactcagatggcgagaaggcagcattatctctgtgcgatgctgatttcaagctgcccacagaactggtgcggctcagagctcggcgagtttgctgggagctgggagcaggcttgcctggcagagaacctgttcagatacaggccagtttcttcttcgaggaaagccaagctcctcaaacagggttcagtccacgttgtgttttcacacctttctccaaggatcgaaccaaagatgtgtctccagtattgtgtctgtgcccctgtgtgtgttttgtggacagccgtgttgtctgactgtatccagctggcacttgacagggtgcagtcattggtgagaagaatcagaaaaagaagacccatcagcacaggttggataggggttagtgtaggagaccagttacagaatggcctggagtcttcaacttttgaccggtgcaggtgtgaccagagaccacctctgtggccacctcagatagtcatctcagtccaaggatcccaaaacacaaatctagaattgcaaagccagcctttatttccctggcaggcagccttgccagaaggcagagaggcagttctgaatcattctctcattcaccagtggtgacatccttcagtccctcacatctctgacagagcgggacagaatggatatttggctgaccttggtgagacctggagctgcctgtttcttccctaggggatcaccacggctctagggcattctaggatgaggtcagaccccttggccattggtgttattttttgtatagcttcagactgggttccagaacttaccattgaaaacagagcttttaggccaggtgtggtggctcacacctgtaatcccagcactttgggaggccgaggcaggtggatcgcttgagctcaggagttcgagagcagcctgggcaacatggtgaaagcccgtctctaccgaaaaatacaaaaaaaaatagctgggtgtggtggtacgtgcctgtagtcccagctacttcggggactgaggtgggaggatcacttgaacctaggaggtcgaggctgcagtgagccaagatcatgctactgcactccagcttaggtggcaaagtgagaccctgtctccaaaaaaagaaaatagagctttataagcagagagaagaaaataatcatctaagaccatctctccattcgacatgaagtgtaccttttctaaagacggtttccagctgcaacggctccactttgcaggcttgcagggtgtatacctgcgcattgggaacttgctggaacccctgatgcattttccttgagagcaggggtacttccgccttgccgttagcttgtggagaacgtgcttcttattcctggcaggcttcaagaacagctgcacatgtgccgctaactgaccgcgttgccattggcgacctggactctgaactcaggtttattctaaacccagtgagaggtgagggggagtgatgaaaggggatcagctgtatttgtgtgtgtgtgtgtgtgtgagcacctgacaaatctatgaaaccgagtgaaaggagaaatgttagattctttattattttattatatttatatggaaagctcgactctccctttggtaagtccgaagcatgttgtctgttcgaccgtgactgtcttcctcagtctgtgcctgtgattccagtcaccctgtagttactgacagaaattgactggactgtcattgtgtgaagtctaggaggaaatgtccattttaattgtatgatttggtcataagtaaggactatatttatgtcaccattattagatatatgtacttttgtaatgactgtgaaatacacttttccctcactacgactgcttctttatttgctgataaatcttaaaacaactaagtacgttgcaaataatagtacaggtaccatcttttatgtgaagttctttttctttttttgagacagggtcttgctctgtcacccaggctggagtgcagtggcacaatcacagttcactgcagcctcaacctctccagattcaagtgatcctcccatctcagcctcccaagtagctgggactacagttgtgcaccacaatgcctagctaattttttttgtattttgtagaaatggggtttcgccatgttgctcaggctgatctcaaactcctgggctccaacgatctgcccaccttggcctcccaaagtgctgagattacaggcgtgagccactgtgcctggccttatgtaaagctcttgacctagcatctgactggaaacaagcgggaattgcattggggggcattttctgggccagtttccctgccttattttacctgcaataggtgtgcctacaaaagtctttctgacatacacactgcaggtggcagttcaagaagaatcaacctttttcatttggggatattaggatcttccttggagactctgaaaatggcacacaaagaatggcagttatgaacgtgacttctagattttgtccttgtaggaggccttggtcatggataggggaagagggatgatgggatggaatgggagggtgggatctagatgacctcttgaaattgtcccagttactgcttccttcataactgttcacaaaacgtttttcatatataccaccttgtttcccctgggaagtgaggggacgaagccttagagggtgacatagctagaaagtggagaagctcactgttcactgtgcaaagccccagtagtcggattccggggaaaagaacaagtatctagttttgatgacaatgttttcttgtaagaatcccaacactttagaatagaaaaggacctaagattctctggctcagccccagcctttctgaagaagggaaaactagggacccagatggtttaaggacaccccagagtccccagatgagctggcatttgagctggtctggagcagagtttctccctcaaagaacacagagaaatcagagagtggctgccatggtcagagggggatgtcaacaacagatcaagccgtcatcacaacaggtatttctgaagttcctgcagggactaggtcttgcatttttaagtccttttcaaaactgtgcagcttcctgaaccttatgctgtttgtcccatccactcttgaagctggggaaagacagctttctttgggaactctgtctttctcagttgacttcccaagtaagcagcaaacccctggatagccttgttatctactttaggtattaagaggctattgggttttactagattaaatcaataaaacatttcctatagagccatatcatacactgaagcaaattcagaaagaatgcaaaactgctatcttttgggggagtctggaagcctgttggttagtgtatttattttctttgtggggtcttctgtgagctacaggcacagtaagaataattcagagcggtactgggagttggttcaatttcatgtcatcacttttcaatgaagggagtgcatttcctgagtagtaaatgagtatattatttgtggcagcttttctgttaagggagctttccagacatctggttgcaaagacaaataggatatatatttgtacttcttctctgtggacatgtttttgtgacacacagttatctctaggagttgacgtctgtgggcactaagggactgaggttgggggagaaagctgaggaggctttggaagagaaggtgaggagcatttcaggatttgcagtccccctccacatgtatccacatctgagctggtggtgttccaataatgaggcatttggggcaaccaattttggaaggatagaatagctttatgtggagcaaacttgaggatcaattggagttgagtggtttaaaacttaaagatggcacaggaagctgtatcatttacaggtgaaaaaaataaatgggtctgacttca

SEQ ID NO: 180842 - DNA, 2145 bp, Artificial Sequence
  derived and/or modified sequence
atgcccgccgccgccggcgacggcctgctgggcgagcccgccgcccctggtgggggcggaggagctgaagacgcggctcgccctgccgctgcttgtgaagggtccttcttgcccgcctgggtatctggcgtgcctcgcgaaagacttagggacttccaacaccataagagagttggaaattatctgatcgggagccggaagcttggcgaggggagcttcgccaaagtccgggaaggactccatgtgctcacaggggaaaaagtagctattaaggtgatagacaaaaagcgggcgaagaaggacacttatgtcactaagaatttacgcagggaggggcagatccagcagatgatcaggcatcctaatattacccagctgctggatatactggaaactgaaaactcttactacctggtcatggagctttgcccaggaggaaatttgatgcataaaatctatgaaaagaagaggctagaggagagcgaggcaaggaggtacatcaggcagttaatcagcgccgtggaacatcttcatagggctggcgttgtgcacagggacctgaagatcgagaaccttctgttagacgaagacaataacattaagctcattgactttggactgagtaactgcgcaggaatacttggctatagtgacccttttagcacacagtgcggttcaccagcttatgccgcacctgagctgcttgcccggaaaaagtacggccctaaaatcgatgtctggtcaataggggttaatatgtacgccatgctcactggcacacttccattcactgtggaaccttttagcctgagggccttgtatcagaagatggtggacaaagagatgaatccactgccgacacagctgagtacgggcgcgatctctttcctcaggtcactgctggaacccgaccccgtgaagcgccccaacatccagcaagccctggctaaccgctggctcaatgaaaattacacaggcaaggtgccttgcaatgtgacttaccctaaccggatttccctcgaggacctctcccccagcgttgtcctgcacatgacagagaaactgggttataagaacagtgatgttataaacacagttctcagtaatcgagcatgccacatcctggccatttattttctccttaataagaaacttgagaggtatttatctggaaagagtgacatacaagattccctgtgctacaagacacgcctgtaccagatagaaaagtatagggcaccaaaggagtcatacgaagccagcctagatacctggacacgggatctggaattccatgcggtccaggacaagaaacccaaggaacaggagaagcggggtgactttcttcacagaccgtttagtaaaaagctcgacaaaaatctcccctcacataagcagccttcaggttccctgatgacacaaatccagaacaccaaggccttactcaaagacagaaaggcgagcaagagctcctttcccgataaagattcattcggctgtaggaacattttcagaaaaacttcggactccaattgcgtcgcgtcctccagtatggagttcatccctgttcccccgccccggactccacggattgtgaagaagcccgagccgcatcagcctggtcctgggtccacagggattcctcacaaggaagatccactgatgctggacatggttagaagctttgagtctgttgacagggacgatcatgtcgaggtgctctcaccatcccaccactatcgcattctgaactcgcctgtatcgctggcacgcaggaattcctccgaaagaacactttctccagggttgcctagtggctcaatgtcccccttacacactcccttgcatcccacccttgttagctttgcccatgaagataaaaatagcccaccaaaggaagaggggttatgctgcccacctcctgttccgagcaatgggccaatgcagccgctcggtagcccaaactgtgtaaagagccggggacgctttcccatgatggggatcggacagatgctccggaagcgccatcagagtctacagccatcagccgatagacccctcgaggcctcgctaccaccgttgcaacccctggcacccgtaaatctcgcctttgacatggcggacggagtgaaaactcaatgttag

SEQ ID NO: 180843 - DNA, 2145 bp, Artificial Sequence
  derived and/or modified sequence
atgcctgcagccgctggggacggacttctcggcgagcccgctgcaccagggggtgggggtggcgcagaggatgctgcgagacccgctgccgcatgtgaaggaagctttctgccggcttgggtgtctggagtccctcgggagagactgagggacttccagcatcacaagcgagtcggtaattacctgatcggcagtcgaaagctgggggaaggctcattcgctaaggtgagagagggactgcatgtgctaactggagagaaggtggcaatcaaggttattgacaaaaagagggcgaagaaagacacatatgtgaccaaaaacttgagacgggagggccagatacagcagatgatcagacacccaaatataactcagctcctggatattctcgagacagaaaactcatattacctcgtaatggaactttgtcctgggggaaatctgatgcataagatctatgaaaagaaaaggctggaagagtcggaagcacgcagatacatccggcaattgatatctgcggtcgaacacctgcaccgtgccggagtggtgcacagggatctgaaaatcgaaaacttactgctggacgaggacaataatattaagctgattgattttggcctgtctaactgcgctgggatcctggggtattctgatccgttctcaacacagtgcgggtcccctgcatacgcggctccggaactcctggctcgtaaaaagtatggcccaaagattgatgtatggagcattggggtcaatatgtatgccatgctgacagggacactgccttttaccgtagaaccattctctctgagggcgctgtaccagaaaatggtcgataaggaaatgaacccattacccacacagctctccaccggagccatttcatttctacgcagcctacttgagcccgaccctgttaagcgtccaaatatacagcaggccctcgcaaaccgatggttaaatgaaaattacactggcaaggtgccatgcaatgtcacctaccccaataggatctcccttgaggatttgtccccaagcgtggtgctgcacatgaccgagaaacttggatacaagaattcagatgtcattaacacagtgttatccaatagagcatgccacatcctggctatatactttctcctcaataagaaactggagaggtatctcagtggcaaatccgatatccaggattctctctgttataaaactagactttatcagatcgagaaataccgcgcaccaaaggagtcctacgaagcttccctcgacacttggacacgagacctggagttccatgcagtgcaggacaaaaagcccaaagaacaggaaaaacggggagattttctccaccggccattcagcaaaaaacttgataagaaccttcctagccacaagcaaccctctgggagcctgatgacgcagatccagaacacgaaggctcttctcaaggacagaaaagcctccaaatcatccttccccgacaaggactcattcgggtgtaggaatatcttcaggaagacgtcggattctaactgcgtcgcctcctcatccatggaatttattcctgtcccaccgcctaggaccccacgcatcgtcaagaagcccgaacctcatcaacctgggccaggatcaactggtatcccccacaaggaggatccgttgatgcttgatatggttcgtagctttgagtcggtcgatagggacgatcacgtcgaagttctctcacctagtcatcactacagaatactgaattcccccgtgtcattggctagacgcaacagctccgagagaacactgtcccctggactgccttccggatctatgtcgccactgcacacgcctctgcaccctaccctggtttctttcgcgcatgaagataaaaattcaccgcctaaagaggagggcttatgctgcccgcctcctgtccccagcaatgggcctatgcaaccactgggctctccaaattgcgtcaaaagccgcggacggttccccatgatgggtattgggcagatgctgagaaagagacaccagtccctgcagcccagtgcagatcgcccactcgaggcgagtctgcctccactgcagcccctcgccccagtgaatctcgctttcgatatggccgatggggtgaaaactcaatgttag

SEQ ID NO: 180844 - protein, 446 aa, Artificial Sequence [sequence omitted]

SEQ ID NO: 180845 - DNA, 3049 bp, Artificial Sequence
  derived and/or modified sequence
ggcgagggtcggggccaccgcgcggcgacctcgggtcccggagcgaccgcagggcagccccgggcgccggccccggtgcgcgtctcctgtgcgcgcccctccgcgcgcggccccgatgctggacatgagcgaggcccgctcccagccgccctgcagcccgtccggcaccgccagctccatgtcgcacgtggaggactcggactcggacgcgccgccgtctcccgccggctccgagggcctgggccgcgcgggggtcgcggtggggggcgcccggggcgacccggcggaggcggcggacgagcgcttcccggcctgcatccgcgacgccgtgtcgcaggtgctcaagggctacgactggagtctggtgcccatgccggtgcgcggcggcggcggcggcgcgctcaaagccaagccgcatgtgaagcggcccatgaacgcattcatggtgtgggcgcaggcggcgcgccgcaagctggccgaccagtacccgcacctgcacaacgccgagctcagcaagacgctgggcaagctgtggcgcttgctgagcgagagcgagaagcggcccttcgtggaggaggcagagcgccttcgcgtgcagcacaagaaggaccaccccgactacaagtaccagccacggcgcaggaagagcgccaaagccggccacagcgactccgactcgggcgcggagctgggaccccaccctggcggcggtgccgtgtacaaggctgaagcagggcttggagatgggcaccaccatggcgaccacacagggcagacccacgggccgcccaccccgcccaccacccccaagacggagctgcagcaggcgggcgccaagccggagctgaagctggagggacgccggccggtggacagcgggcgccagaacatcgacttcagcaatgtggacatctcggagctcagcagcgaggtcatgggcaccatggacgccttcgacgtccacgagttcgaccagtacctgcccctgggcggccccgccccacccgagccgggccaggcctatgggggcgcctacttccacgccggggcgtcccccgtgtgggcccacaagagtgccccgtcggcctccgcgtcgcccaccgagacgggtcccccacggccgcacatcaagacggagcagccgagccccggccactacggcgaccagccccgaggctcgcccgactacggttcctgcagcggccagtccagcgccaccccggccgcccccgccggccccttcgccggctcacagggcgactatggcgacctgcaggcctccagctactatggtgcctaccctggctacgcacccggcctctaccagtacccctgcttccactcgccgcgccggccctacgcctcacccctgctcaacggcctggccctgccgcccgcccacagccccaccagtcactgggaccagccggtgtacaccaccctgaccaggccctgagggcccagccgcggggagggactcgcaggcgtcagggggcagccttgtcccggcccagtgtgtgtgaccagggcgggaggggccccagtggctgagctccaagtgcctgctgaagtctgcagggaaacacgcttgctgcccgtggccctcggcctccagatggccacacctctgccgacgacggaccagctccctctcccttctatctttctttttgaggtggtgggattattccacaaagaagggctgccgtttggtccctcttccgtgaggactggcggcaccagcaccttcgctttgcatctcggtagaggagaaacggcagcacagcccaaggaccaaaggagggggtggcaggggccttgcagggcgctgtgaggtccaggccggtcttggcgccgagagcccctgcactcaaggccacattccctcgacaacggctgcacgggctgtccgggatccggggtgtctgtccgcagactgggatgagtctactcgagcatctccgggacctgcctgtcagatctgaggtgtctccttgctggcagagtgcgctcacgcgagggctggctgtgatgaacacatctctcttttatttttatgtttttgataatttttatttttgaagcttaaatgtgtttcttctgaaagctgttaaagatgtatttatgttctgtgttattttatctttaattaatgaggtaattcgggcaaagagtagaatttaagacaaaacggaagctgggaagcttcccttgagggcaggcaggaggtggagttgcagctgttggccggcatcacgttgctcgttgctcggcttatgggaggccgccctggagggcccggaggtcccaaggtccctgggaggactgggcccctcatgcctcgagcttggcaaccgaaaacccgagggaggagaagggacctgccttgtgacatctctgatcaggttggggtgccccagcacccagtaccagtttggggtttgggaagcaggactccgtccctgtccccgactgtgccacgtggtaggacacataggacacaggaattcctgggtccttgcccatgactgtgccatgtggtaggacacaggacacaggaattcctggaaagtggtggcttcagaagtgatcttggctcgcaggcaccagtgccacctaccaagctgtgaaactaaaccttctccactaaacgtcgttagggcctcagttctagacgagtcatacctgattcacctgcactgcttcccctgtgtgctgagcatagagcatacaatagcgcctacttcacggaaacttgtgcctttaaactttgtaaacttaaacacagccgagaagttgcttctttgtactttttctacttttcctacttttttgtagaaaaaaaagataatgcctctgcttctatttctctgggggtgggggtgggggccgggagccgtcgcagacccgtttcatgcagcgtctcccttggcaccgcgttcggaggacgcaccctcactcccctgctgccttcactcctttctgaccaagcaacgctaacttttgtacagatcgatttgataaaattaaacaaagtgctttttatgga

SEQ ID NO: 180846 - DNA, 1341 bp, Artificial Sequence
  derived and/or modified sequence
atgctggacatgagcgaggccagaagccagcccccctgcagccccagcggcaccgccagcagcatgagccacgtggaggacagcgacagcgacgccccccccagccccgccggcagcgagggcctgggcagagccggcgtggccgtgggcggcgccagaggcgaccccgccgaggccgccgacgagagattccccgcctgcatcagagacgccgtgagccaggtgctgaagggctacgactggagcctggtgcccatgcccgtgagaggcggcggcggcggcgccctgaaggccaagccccacgtgaagagacccatgaacgccttcatggtgtgggcccaggccgccagaagaaagctggccgaccagtacccccacctgcacaacgccgagctgagcaagaccctgggcaagctgtggagactgctgagcgagagcgagaagagacccttcgtggaggaggccgagagactgagagtgcagcacaagaaggaccaccccgactacaagtaccagcccagaagaagaaagagcgccaaggccggccacagcgacagcgacagcggcgccgagctgggcccccaccccggcggcggcgccgtgtacaaggccgaggccggcctgggcgacggccaccaccacggcgaccacaccggccagacccacggcccccccaccccccccaccacccccaagaccgagctgcagcaggccggcgccaagcccgagctgaagctggagggcagaagacccgtggacagcggcagacagaacatcgacttcagcaacgtggacatcagcgagctgagcagcgaggtgatgggcaccatggacgccttcgacgtgcacgagttcgaccagtacctgcccctgggcggccccgccccccccgagcccggccaggcctacggcggcgcctacttccacgccggcgccagccccgtgtgggcccacaagagcgcccccagcgccagcgccagccccaccgagaccggcccccccagaccccacatcaagaccgagcagcccagccccggccactacggcgaccagcccagaggcagccccgactacggcagctgcagcggccagagcagcgccacccccgccgcccccgccggccccttcgccggcagccagggcgactacggcgacctgcaggccagcagctactacggcgcctaccccggctacgcccccggcctgtaccagtacccctgcttccacagccccagaagaccctacgccagccccctgctgaacggcctggccctgccccccgcccacagccccaccagccactgggaccagcccgtgtacaccaccctgaccagaccctag

SEQ ID NO: 180847 - DNA, 1341 bp, Artificial Sequence
  derived and/or modified sequence
atgctggacatgtccgaggcccgtagccagcccccctgcagtccttccggtaccgcttccagtatgtcacacgtggaagactcagacagtgacgcccccccatcccctgctggatctgaggggctgggcagagctggtgtcgccgtcggcggcgcgaggggcgacccagctgaagccgctgacgagagattcccggcctgtatccgagatgctgtatcccaggtccttaaaggctatgattggagcctggttcccatgcctgtacgcggcgggggcggcggggcactgaaggccaaaccacacgtcaaacgccccatgaacgctttcatggtatgggctcaggcagcccgaaggaaacttgccgatcaatacccacacttgcacaacgctgagctgagcaagaccttgggtaaactctggaggctcctgagcgagagtgagaagaggcccttcgttgaagaagcggaaagactccgcgtacagcacaaaaaagaccatccagactataagtaccaaccccgccgtcgcaagagcgccaaggctgggcatagcgactccgattctggcgccgaactgggccctcaccccggaggaggggcagtgtacaaagccgaggctggtctaggagacgggcaccaccacggtgaccacaccggtcagacccacggaccacccactccacctacgacgccgaagaccgaacttcagcaggcgggggcaaagcctgagctcaagctagaaggcaggagacctgtcgactctggtaggcagaatattgacttctccaatgtggacatatctgagctgtcctctgaggtgatgggtaccatggacgccttcgacgtacatgagtttgaccagtatcttcccctgggaggtcctgcgcctcctgaaccaggtcaggcgtacggtggcgcatactttcacgccggcgcaagtccagtttgggcccataagagtgccccgtccgccagcgctagccccaccgagaccgggccacctcggccgcacattaagacggagcagccttcacccggacattatggagatcagccacgaggttctcccgattatggaagctgtagcggacagtcaagtgccacacctgcagccccagccgggccatttgcaggatcccaaggagactacggggatctacaggcctcatcctactatggagcctacccggggtacgcacctggactgtatcagtacccttgcttccactccccccgcagaccttacgcaagtcccttgttaaacggcctggcacttccaccagctcactcacccacttcccattgggaccagcctgtgtatactaccttaacccgcccctag

SEQ ID NO: 180848 - DNA, 1341 bp, Artificial Sequence
  derived and/or modified sequence
atgctggacatgtctgaggcccggagccagcccccctgcagccccagcggcacagccagctccatgagccacgtggaggacagcgacagtgatgccccacccagccctgctggcagcgagggcctgggccgggccggcgtggccgtgggcggggcccggggggaccctgctgaggccgcagatgagcgcttccctgcctgcatcagagatgctgtgtcccaggtgctgaagggctatgactggagcctggtgcccatgcctgtgcggggcggcggcggcggggccctgaaggccaagccccacgtgaagaggcccatgaatgccttcatggtgtgggcccaggccgcccggaggaagctggccgaccagtacccccacctgcacaatgctgagctgagcaagaccctgggcaagctgtggaggctgctgtctgagagcgagaagaggccctttgtggaggaggccgagcggctgcgggtgcagcacaagaaggaccacccagactacaagtaccagcccaggaggaggaagagcgccaaggccggccacagcgacagcgacagcggggctgagctgggcccccaccctgggggcggcgctgtgtacaaggccgaggccggcctgggagatggccaccaccacggggaccacacaggccagacccacggcccccccaccccacccaccacccccaagacagagctgcagcaggccggggccaagccagagctgaagctggagggcagaagacctgtggacagcggccggcagaacatcgacttcagcaatgtggacatcagcgagctgagcagcgaggtgatgggcaccatggatgcctttgatgtgcatgaatttgaccagtacctgcccctgggcggccctgcccctcctgagcccggccaggcctatggaggagcctacttccacgccggggccagccctgtgtgggcccacaagagcgcccccagcgccagcgccagccccacagaaacaggccccccccggccccacatcaagacagagcagcccagccctggccactacggggaccagccccggggcagcccagactatggcagctgcagcggccagagcagcgccaccccagctgccccagctggcccctttgctggcagccagggcgactatggagacctgcaggccagcagctactacggggcctacccaggctacgcccctggcctgtaccagtacccctgcttccacagcccccggcggccctatgccagccccctgctgaatggcctggccctgcccccagcccacagccccaccagccactgggaccagcctgtgtacaccaccctgacccggccctag

SEQ ID NO: 180849 - DNA, 1341 bp, Artificial Sequence
  derived and/or modified sequence
atgctggacatgagcgaggcccggagccagcccccctgcagcccctcaggaaccgcgtctagtatgagccacgttgaagacagcgattcagacgccccacctagtcccgcagggtcagagggcttgggccgggcaggagtcgcagtgggcggggcccggggcgaccccgccgaagccgccgatgagaggtttcctgcgtgtattagagatgcggttagccaggtcctcaaagggtatgattggtcactcgtgcccatgcccgtaaggggaggaggaggaggggcactgaaagctaaaccccacgtgaagaggcctatgaatgccttcatggtatgggcccaagccgccaggcgcaagctggcagatcaatatccccatctgcacaatgccgaactgagtaaaacccttggaaagttgtggagactgctttccgaatcagagaaacgcccctttgtggaagaagcagagcgcctgcgtgttcagcataaaaaggaccatccagactacaagtaccagccacgccgaagaaagtctgccaaagccggacacagcgacagcgactcgggggccgaactggggcctcaccccggcggcggcgcagtgtacaaggccgaggctgggttaggggacggccaccaccacggggatcataccggacagactcacggccctcctacacctccgacgaccccaaagaccgagctccagcaggccggggccaaaccggagctcaagctggaaggcaggcgcccggtcgatagtggacggcagaacattgacttcagcaatgtcgatataagtgaattgtccagcgaggtaatgggcaccatggatgcatttgacgtgcacgaatttgaccagtacctccctctaggcggacccgcaccccctgagcctgggcaggcttacggcggagcttatttccatgcgggagctagcccagtttgggctcataaatcggctcctagcgcttccgccagtcccacggaaaccgggccacctcgtccacatattaaaaccgagcagccaagtccgggacactatggtgatcagcccagaggaagtcccgactatggtagctgtagcgggcagagttcagctactcctgccgccccggcagggcccttcgccggttctcagggtgactacggagatcttcaggcaagctcctattacggtgcctatccaggctacgcccccggcttataccagtacccctgttttcactcgccacggagaccatacgcatccccgctattgaatggtctggccttgccaccggctcactctcctaccagtcattgggaccagcctgtgtataccaccctcactagaccctag

SEQ ID NO: 180850 - DNA, 1341 bp, Artificial Sequence
  derived and/or modified sequence
atgctcgacatgtcagaggccaggtctcagcccccatgcagcccatcaggcaccgccagcagcatgtcgcatgtggaggattccgacagcgatgcacctccaagtcccgcaggaagtgaggggttgggtcgcgcaggggtggcggtggggggtgctagaggcgaccctgccgaggccgcagatgagcggtttcccgcatgtattcgcgacgctgtgtctcaggtactcaaaggttatgattggtcactagtccctatgccagttcgtggcggaggaggcggtgccctaaaggctaagccacacgttaaacggcctatgaatgccttcatggtgtgggctcaggcagcgcgaaggaagctcgcggaccagtatccacacttgcacaatgccgaactcagcaaaactctgggaaaactttggcggctgttgtccgaaagcgaaaaacgtcccttcgtggaagaagcagaacggctcagggttcagcacaaaaaagatcacccagactacaagtaccaacctcgaaggcgcaagtccgcgaaagctggccatagcgacagcgatagcggtgctgagctgggcccacatccaggaggcggagcagtgtacaaagctgaggccggactgggggacggccatcatcatggggaccacactggccagactcacggacccccaaccccccctaccactcccaaaactgagctgcagcaagcaggagcgaaacccgagctgaagttggaagggagacgccctgtggattccggaagacagaacatagatttcagcaacgttgatatctccgaactaagctctgaggtgatgggaaccatggacgcttttgatgtacacgaattcgaccagtaccttccactcggtggccctgctccaccagagccaggccaggcatatggcggagcatactttcatgctggtgcatccccagtgtgggctcataaatccgcgccttccgcttccgcttctccgaccgagacaggacctcccaggccacatatcaaaacagagcagccctctccgggacactatggagatcagcctagaggcagtcctgactacgggagctgttctggtcagagttcggccactcctgcagcgcctgcaggtcctttcgcagggagccagggggactacggagacctacaggcttcgtcctactacggggcttaccctggttacgcccctgggctgtaccagtacccctgtttccatagtcccaggaggccctatgccagccccctccttaatggacttgctctgccccctgcacatagtcctacctcccactgggaccagcccgtctacactacactgacgaggccctag

SEQ ID NO: 180851 - protein, 365 aa, Artificial Sequence
  derived and/or modified sequence
MTGRDSLSDGRTSSRALVPGGSPRGSRPRGFAITDLLGLEAELPAPAGPGQGSGCEGPAVAPCPGPGLDGSSLARGALPLGLGLLCGFGTQPPAAARAPCLLLADVPFLPPRGPEPAAPLAPSRPPPALGRQKRSDSVSTSDEDSQSEDRNDLKASPTLGKRKKRRHRTVFTAHQLEELEKAFSEAHYPDVYAREMLAVKTELPEDRIQVWFQNRRAKWRKREKRWGGSSVMAEYGLYGAMVRHCIPLPDSVLNSAEGGLLGSCAPWLLGMHKKSMGMIRKPGSEDKLAGLWGSDHFKEGSSQSESGSQRGSDKVSPENGLEDVAIDLSSSARQETKKVHPGAGAQGGSNSTALEGPQPGKVGAT

SEQ ID NO: 180852 - protein, 143 aa, Artificial Sequence
  derived and/or modified sequence
MTGRDSLSDGRTSSRALVPGGSPRGSRPRGFAITDLLGLEAELPAPAGPGQGSGCEGPAVAPCPGPGLDGSSLARGALPLGLGLLCGFGTQPPAAARAPCLLLADVPFLPPRGPEPAAPLAPSRPPPALGRQKRSDSVSTSAM

SEQ ID NO: 180853 - protein, 280 aa, Artificial Sequence
  derived and/or modified sequence
MTGRDSLSDGRTSSRALVPGGSPRGSRPRGFAITDLLGLEAELPAPAGPGQGSGCEGPAVAPCPGPGLDGSSLARGALPLGLGLLCGFGTQPPAAARAPCLLLADVPFLPPRGPEPAAPLAPSRPPPALGRQKRSDSVSTSDEDSQSEDRNDLKASPTLGKRKKRRHRTVFTAHQLEELEKAFSEAHYPDVYAREMLAVKTELPEDRIQVWFQNRRAKWRKREKRWGGSSVMAEYGLYGAMVRHCIPLPDSVLNSAEGGLLGSCAPWLLEGETLGCREMK

SEQ ID NO: 180854 - protein, 218 aa, Artificial Sequence
  derived and/or modified sequence
MTGRDSLSDGRTSSRALVPGGSPRGSRPRGFAITDLLGLEAELPAPAGPGQGSGCEGPAVAPCPGPGLDGSSLARGALPLGLGLLCGFGTQPPAAARAPCLLLADVPFLPPRGPEPAAPLAPSRPPPALGRQKRSDSVSTSDEDSQSEDRNDLKASPTLGKRKKRRHRTVFTAHQLEELEKAFSEAHYPDVYAREMLAVKTELPEDRIQRVRHWAAEK

SEQ ID NO: 180855 - DNA, 1098 bp, Artificial Sequence
  derived and/or modified sequence
atgaccggcagagacagcctgagcgacggcagaaccagcagcagagccctggtgcccggcggcagccccagaggcagcagacccagaggcttcgccatcaccgacctgctgggcctggaggccgagctgcccgcccccgccggccccggccagggcagcggctgcgagggccccgccgtggccccctgccccggccccggcctggacggcagcagcctggccagaggcgccctgcccctgggcctgggcctgctgtgcggcttcggcacccagccccccgccgccgccagagccccctgcctgctgctggccgacgtgcccttcctgccccccagaggccccgagcccgccgcccccctggcccccagcagacccccccccgccctgggcagacagaagagaagcgacagcgtgagcaccagcgacgaggacagccagagcgaggacagaaacgacctgaaggccagccccaccctgggcaagagaaagaagagaagacacagaaccgtgttcaccgcccaccagctggaggagctggagaaggccttcagcgaggcccactaccccgacgtgtacgccagagagatgctggccgtgaagaccgagctgcccgaggacagaatccaggtgtggttccagaacagaagagccaagtggagaaagagagagaagagatggggcggcagcagcgtgatggccgagtacggcctgtacggcgccatggtgagacactgcatccccctgcccgacagcgtgctgaacagcgccgagggcggcctgctgggcagctgcgccccctggctgctgggcatgcacaagaagagcatgggcatgatcagaaagcccggcagcgaggacaagctggccggcctgtggggcagcgaccacttcaaggagggcagcagccagagcgagagcggcagccagagaggcagcgacaaggtgagccccgagaacggcctggaggacgtggccatcgacctgagcagcagcgccagacaggagaccaagaaggtgcaccccggcgccggcgcccagggcggcagcaacagcaccgccctggagggcccccagcccggcaaggtgggcgccacctag

SEQ ID NO: 180856 - DNA, 1098 bp, Artificial Sequence
  derived and/or modified sequence
atgacaggccgcgactctttgtcagacggcagaaccagttcccgcgccctcgttccaggcggatctcctagaggtagcagacccaggggttttgccatcaccgacctcttgggattggaggccgaattacctgcccccgcgggcccaggtcagggttctggctgcgagggacccgctgtagctccttgccctggcccaggactcgatggttctagcttggcccgaggcgccctgccccttggcctgggtctactctgtggatttgggacacagccccctgccgccgcccgagccccttgcttattactggccgacgttccattccttccacccaggggaccagagccagcagcaccattggcaccatctcgaccaccacccgccctcggaagacagaaacgctccgacagtgtatcgacctctgacgaagattcacagtctgaggatcggaacgacctcaaggccagcccgactttgggtaagaggaagaagcggaggcatcgcactgtgtttaccgcgcaccaactagaagagcttgagaaggctttcagtgaagcacactatccagatgtgtacgctagagagatgctggcagtaaagacagagttgccagaggaccgaattcaggtctggttccagaacaggagggccaaatggagaaagcgcgaaaagcggtggggaggatcgagcgtcatggccgagtatggtctttacggcgcgatggtacgccattgtatacccctgcccgattccgttctcaattcagcagaaggaggcctccttgggtcgtgcgctccctggctcttgggaatgcacaaaaaaagtatgggtatgatcaggaagcctggcagtgaggacaaactggccggactgtggggctcagatcatttcaaggaaggctcttcccagtccgaaagcggctctcagcgagggagcgacaaagtctccccagagaatggactcgaagatgtggctatagacctctcaagtagcgcccggcaggagacaaagaaagtccaccctggggcgggagcacaaggagggagcaactctacagctctcgaagggccacagccaggaaaagtgggagctacttag

SEQ ID NO: 180857 - DNA, 1098 bp, Artificial Sequence
  derived and/or modified sequence
atgacaggccgggacagcctgagtgatggccgcaccagcagccgggccctggtgcctgggggcagcccccggggcagccggccccggggctttgccatcacagacctgctgggcctggaggccgagctgcctgccccagctggccctggccagggcagcggctgtgagggccctgctgtggccccctgccccggccctggcctggatggcagcagcctggcccggggggccctgcccctgggcctgggcctgctgtgtggcttcggcacccagcccccagctgctgcccgggccccctgcctgctgctggctgatgtgcccttcctgcccccccggggccctgagcctgctgcccccctggcccccagcaggcctcctccagccctgggccggcagaagagaagtgacagcgtgtccaccagtgatgaggacagccagagcgaggacagaaatgacctgaaggccagccccaccctgggcaagaggaagaagagaagacacaggacagtgttcaccgcccaccagctggaggagctggagaaggccttcagcgaggcccactacccagatgtgtatgcccgggagatgctggccgtgaagacagagctgcctgaagatcgcatccaggtgtggttccagaacagaagagccaagtggaggaagcgggagaagcgctggggcggcagctctgtgatggccgagtatggcctgtatggagccatggtgcgccactgcatccccctgcctgattctgtgctgaacagcgctgagggcggcctgctgggcagctgtgccccctggctgctgggcatgcacaagaagtccatgggcatgatcaggaagccaggcagcgaggacaagctggccggcctgtggggcagtgaccacttcaaggagggcagcagccagagcgagagcggcagccagaggggcagtgacaaggtgtccccagaaaatggcctggaggatgtggccatcgacctgagcagcagcgcccggcaggagaccaagaaggtgcaccctggagctggggcccagggcggcagcaacagcacagccctggagggcccccagcccgggaaggtgggcgccacctag

SEQ ID NO: 180858 - DNA, 1098 bp, Artificial Sequence
  derived and/or modified sequence
atgaccggccgggacagcctgagcgacggccggaccagcagccgggcactagtacccggaggcagtccaagagggagccgcccacggggcttcgccataaccgacctgctgggcctcgaggcagagttacccgcaccagccgggcctggacagggatctggatgtgaaggtccagccgtggcgccttgcccaggccccggcctggatgggagtagtttggctagaggagccctgcccctgggactcggattgctgtgcgggttcggtacacaaccaccagctgccgccagggcaccttgcttgcttcttgccgacgtaccatttctgccccctcgcggtccagagccggccgccccccttgccccatcccggcccccccctgccctgggcaggcagaagcggagcgattccgtctccacttctgacgaagatagtcagagtgaagaccggaatgacctgaaggcttccccaactctggggaaacgcaagaagagaaggcatcgaactgtgttcactgctcaccagttggaagagcttgagaaagctttttctgaagcccattaccctgatgtctacgccagggagatgctggctgtgaagaccgaactcccggaagacaggattcaggtgtggtttcagaataggagagcaaagtggagaaaacgagagaagcgttggggggggagctcagtgatggctgaatatgggctctacggagctatggtacggcattgcattcctctcccggactcggtcctgaacagcgccgagggcggcttactgggttcctgcgccccctggcttctgggaatgcacaagaagagcatggggatgataaggaagcccggctccgaagataagctggctggactgtggggatcagaccactttaaagagggttccagccagtccgagtcagggagtcaacgagggagcgataaggtgagtcctgaaaacgggctggaggatgtggctatcgatctgtcgtcttcagcccggcaggagactaagaaagttcaccctggcgccggcgcacaagggggcagcaactcaacagccttggagggtcctcagcctgggaaagtcggggcgacctag

SEQ ID NO: 180859 - DNA, 1098 bp, Artificial Sequence
  derived and/or modified sequence
atgacgggcagggactcgctcagtgacggtcggacctctagccgagcccttgtgcctggagggtcgccaaggggatctagacctcgcggatttgcaatcactgatcttcttgggctagaagccgagctgccagcaccggctggacccggacaaggatcaggttgcgaaggacccgctgtcgccccttgtcctggacccggactggatggaagctctttagccagaggggctctgccactagggttgggtctgctgtgtggattcggcacccagccacctgctgccgcacgggcaccttgtctgctgttagcggatgtgccatttctgccgccaagaggcccagaacctgcagcacccctagcaccatctcgccctcccccagctctgggaaggcagaaacggtcggatagtgtgagcacatctgacgaagacagtcagagtgaggaccggaacgatttgaaggcatctcctacactcggtaagcgcaaaaagcgaagacatcgcactgtcttcacagctcaccagttggaggagttggagaaggcattctcagaagctcactatcctgacgtgtacgctagagaaatgctcgctgtcaagactgagctgcccgaggaccgcatccaggtgtggtttcagaatcggcgagcaaaatggaggaagcgtgagaagcgctggggagggtcatcggtcatggccgaatacggtctctatggagccatggtgcgccactgcatcccactgcccgactcagtgttgaactcggccgagggtggtctccttggatcctgtgccccttggctgctcggcatgcacaagaagtccatgggaatgataagaaaacccggatccgaagataagctcgctgggctgtggggctccgaccatttcaaggaaggcagcagccaatccgaaagtggatcccagcgcggttcggataaagtatccccggaaaacggattggaggatgtggccattgatctatcaagttccgcacgacaggagacgaagaaggtgcatccaggcgctggcgcacagggcggatccaactccaccgccctggaaggccctcagccaggcaaagtgggggcaacctag

SEQ ID NO: 180860 - DNA, 2157 bp, Artificial Sequence
  derived and/or modified sequence
ggggtggggtgggctggacagaagagaggaggagaaggaggtgactgaggggactgcagctgggtgggcggtaaccgaggggaggggaactggtggcgtccccatctcgcggggtccggaacggcgacgcgcccgcgcccagctgattggagcccttcaggcctcccgcgcccgaccggcagcccaatcctataaagcttcctctaagctgggccctccgcaaacgggatccagagaggctcgcgccttgcttgctaaggaaccatgaccggccgggactcgctttccgacgggcgcactagcagcagggcgctggtgcctggcggttcccctaggggctcgcgcccccggggcttcgccatcacggacctgctgggcttggaggccgagctgccggcgcccgctggcccaggacagggatctggctgcgagggtccggcagtcgcgccgtgcccgggcccggggcttgacggctccagcctggcgcgtggggccctaccgctgggactcggcctcctctgtggcttcggcacgcagccgccggcggccgctcgagcaccctgcctgctcctagcggacgtgccgttcctgccgcccaggggccccgagcccgctgccccgctggctcccagccgtccgccgcctgcgctcggccgccagaagcgcagcgacagcgtctccacgtccgatgaggacagccagtctgaagacaggaatgacctaaaggcatcccccaccttgggcaagaggaagaagcggcggcacaggacagttttcactgctcaccagctggaagagttggagaaggcattcagcgaggcccactaccctgatgtgtatgcccgagaaatgctggctgtgaaaactgagctccccgaagaccggatacaggtctggtttcaaaaccgcagggccaaatggcgcaagcgggagaagcgctggggcggcagcagcgtgatggccgagtacgggctgtacggggccatggtgcgccactgcatcccgctgccagactccgtgctcaactccgccgagggcggcctgctgggctcctgcgcgccctggctcctggggatgcataaaaaatccatggggatgataaggaagccaggaagtgaagataagttggcaggactctggggctctgaccacttcaaagaaggttctagccagagtgagtcaggatcacagagaggctcagataaagtgagccctgagaatggcttggaagatgtggctattgacctctccagctctgcccggcaggagaccaagaaagtgcaccctggggctggtgctcaaggaggctccaactccacggcactggaggggccccagccagggaaggtgggagccacatgagacccacaggtcccactgtcaaaggctgaaaatgtgcatattcctcactggcattttccaaaagacaaaaattgtccaagacatatactctcagtttgattttcttctgacaatgtcaagataaaatgcaatgccacttgctttaagaggacagatgagtgacctagggaaaattctatttcattctagaatggaaacggttccttaatggcactttaaccagttaacttggtgcaaaacttttgattctcttttgtagcttgagcagggaggatccgaagttcaaaaatgatttcactgctgggcatcatttgagatgtgtggttcaatgtactgtatagatgaataggttaggtctgatgtcctcattctcaattaggaaatataaaattgtttaatatccagaagaatctgatatcatcatagtgaagactccatacagacacatgaatgaattatattgtctttaccttgaacttggccttggatatttcaattttcttgttagggagtaattttgtgttttcttgagtgtcacttgataggctatgcatattggaattcaaagaaacccatactctagtcgtttctgcatttcctttaaaaatagcatgggatcatatttaaacaattgttggatagctggaaacagtgtttttaggtcagaccaggcttttggtctttcaaaatttgtgattgaaagcactttagtgacttggattttgtaaatctttcctttcctgcgtttcctttgccatttatttattctttaaaaataaacattttgtggtgtgt

SEQ ID NO: 180861 - protein, 538 aa, Artificial Sequence
  derived and/or modified sequence
MALPYHIFLFTVLLPSFTLTAPPPCRCMTSSSPYQEFLWRMQRPGNIDAPSYRSLSKGTPTFTAHTHMPRNCYHSATLCMHANTHYWTGKMINPSCPGGLGVTVCWTYFTQTGMSDGGGVQDQAREKHVKEVISQLTRVHGTSSPYKGLDLSKLHETLRTHTRLVSLFNTTLTGLHEVSAQNPTNCWICLPLNFRPYVSIPVPEQWNNFSTEINTTSVLVGPLVSNLEITHTSNLTCVKFSNTTYTTNSQCIRWVTPPTQIVCLPSGIFFVCGTSAYRCLNGSSESMCFLSFLVPPMTIYTEQDLYSYVISKPRNKRVPILPFVIGAGVLGALGTGIGGITTSTQFYYKLSQELNGDMERVADSLVTLQDQLNSLAAVVLQNRRALDLLTAERGGTCLFLGEECCYYVNQSGIVTEKVKEIRDRIQRRAEELRNTGPWGLLSQWMPWILPFLGPLAAIILLLLFGPCIFNLLVNFVSSRIEAVKLQMEPKMQSKTKIYRRPLDRPASPRSDVNDIKGTPPEEISAAQPLLRPNSAGSS

SEQ ID NO: 180862 - DNA, 1617 bp, Artificial Sequence
  derived and/or modified sequence
atggccctgccctaccacatcttcctgttcaccgtgctgctgcccagcttcaccctgaccgccccccccccctgcagatgcatgaccagcagcagcccctaccaggagttcctgtggagaatgcagagacccggcaacatcgacgcccccagctacagaagcctgagcaagggcacccccaccttcaccgcccacacccacatgcccagaaactgctaccacagcgccaccctgtgcatgcacgccaacacccactactggaccggcaagatgatcaaccccagctgccccggcggcctgggcgtgaccgtgtgctggacctacttcacccagaccggcatgagcgacggcggcggcgtgcaggaccaggccagagagaagcacgtgaaggaggtgatcagccagctgaccagagtgcacggcaccagcagcccctacaagggcctggacctgagcaagctgcacgagaccctgagaacccacaccagactggtgagcctgttcaacaccaccctgaccggcctgcacgaggtgagcgcccagaaccccaccaactgctggatctgcctgcccctgaacttcagaccctacgtgagcatccccgtgcccgagcagtggaacaacttcagcaccgagatcaacaccaccagcgtgctggtgggccccctggtgagcaacctggagatcacccacaccagcaacctgacctgcgtgaagttcagcaacaccacctacaccaccaacagccagtgcatcagatgggtgaccccccccacccagatcgtgtgcctgcccagcggcatcttcttcgtgtgcggcaccagcgcctacagatgcctgaacggcagcagcgagagcatgtgcttcctgagcttcctggtgccccccatgaccatctacaccgagcaggacctgtacagctacgtgatcagcaagcccagaaacaagagagtgcccatcctgcccttcgtgatcggcgccggcgtgctgggcgccctgggcaccggcatcggcggcatcaccaccagcacccagttctactacaagctgagccaggagctgaacggcgacatggagagagtggccgacagcctggtgaccctgcaggaccagctgaacagcctggccgccgtggtgctgcagaacagaagagccctggacctgctgaccgccgagagaggcggcacctgcctgttcctgggcgaggagtgctgctactacgtgaaccagagcggcatcgtgaccgagaaggtgaaggagatcagagacagaatccagagaagagccgaggagctgagaaacaccggcccctggggcctgctgagccagtggatgccctggatcctgcccttcctgggccccctggccgccatcatcctgctgctgctgttcggcccctgcatcttcaacctgctggtgaacttcgtgagcagcagaatcgaggccgtgaagctgcagatggagcccaagatgcagagcaagaccaagatctacagaagacccctggacagacccgccagccccagaagcgacgtgaacgacatcaagggcaccccccccgaggagatcagcgccgcccagcccctgctgagacccaacagcgccggcagcagctag

SEQ ID NO: 180863 - DNA, 3044 bp, Artificial Sequence
  derived and/or modified sequence
ctttcacttaggcatcgatagcacccatcagatggccaaatcattatttactggaccaggccttttcaaaactatcaagcagatagtcagggcctgtgaagtgtgccagagaaataatcccctgccttatcgccaagctccttcaggagaacaaagaacaggccattaccctggagaagactggcaactgattttacccacaagcccaaacctcagggatttcagtatctactagtctgggtagatactttcacgggttgggcagaggccttcccctgtaggacagaaaaggcccaagaggtaataaaggcactagttcatgaaataattcccagattcggacttccccgaggcttacagagtgacaatagccctgctttccaggccacagtaacccagggagtatcccaggcgttaggtatacgatatcacttacactgcgcctgaaggccacagtcctcagggaaggtcgagaaaatgaatgaaacactcaaaggacatctaaaaaagcaaacccaggaaacccacctcacatggcctgctctgttgcctatagccttaaaaagaatctgcaactttccccaaaaagcaggacttagcccatacgaaatgctgtatggaaggcccttcataaccaatgaccttgtgcttgacccaagacagccaacttagttgcagacatcacctccttagccaaatatcaacaagttcttaaaacattacaaggaacctatccctgagaagagggaaaagaactattccacccttgtgacatggtattagtcaagtcccttccctctaattccccatccctagatacatcctgggaaggaccctacccagtcattttatctaccccaactgcggttaaagtggctggagtggagtcttggatacatcacacttgagtcaaatcctggatactgccaaaggaacctgaaaatccaggagacaacgctagctattcctgtgaacctctagaggatttgcgcctgctcttcaaacaacaaccaggaggaaagtaactaaaatcataaatccccatggccctcccttatcatatttttctctttactgttcttttaccctctttcactctcactgcaccccctccatgccgctgtatgaccagtagctccccttaccaagagtttctatggagaatgcagcgtcccggaaatattgatgccccatcgtataggagtctttctaagggaacccccaccttcactgcccacacccatatgccccgcaactgctatcactctgccactctttgcatgcatgcaaatactcattattggacaggaaaaatgattaatcctagttgtcctggaggacttggagtcactgtctgttggacttacttcacccaaactggtatgtctgatgggggtggagttcaagatcaggcaagagaaaaacatgtaaaagaagtaatctcccaactcacccgggtacatggcacctctagcccctacaaaggactagatctctcaaaactacatgaaaccctccgtacccatactcgcctggtaagcctatttaataccaccctcactgggctccatgaggtctcggcccaaaaccctactaactgttggatatgcctccccctgaacttcaggccatatgtttcaatccctgtacctgaacaatggaacaacttcagcacagaaataaacaccacttccgttttagtaggacctcttgtttccaatctggaaataacccatacctcaaacctcacctgtgtaaaatttagcaatactacatacacaaccaactcccaatgcatcaggtgggtaactcctcccacacaaatagtctgcctaccctcaggaatattttttgtctgtggtacctcagcctatcgttgtttgaatggctcttcagaatctatgtgcttcctctcattcttagtgccccctatgaccatctacactgaacaagatttatacagttatgtcatatctaagccccgcaacaaaagagtacccattcttccttttgttataggagcaggagtgctaggtgcactaggtactggcattggcggtatcacaacctctactcagttctactacaaactatctcaagaactaaatggggacatggaacgggtcgccgactccctggtcaccttgcaagatcaacttaactccctagcagcagtagtccttcaaaatcgaagagctttagacttgctaaccgctgaaagagggggaacctgtttatttttaggggaagaatgctgttattatgttaatcaatccggaatcgtcactgagaaagttaaagaaattcgagatcgaatacaacgtagagcagaggagcttcgaaacactggaccctggggcctcctcagccaatggatgccctggattctccccttcttaggacctctagcagctataatattgctactcctctttggaccctgtatctttaacctccttgttaactttgtctcttccagaatcgaagctgtaaaactacaaatggagcccaagatgcagtccaagactaagatctaccgcagacccctggaccggcctgctagcccacgatctgatgttaatgacatcaaaggcacccctcctgaggaaatctcagctgcacaacctctactacgccccaattcagcaggaagcagttagagcggtcgtcggccaacctccccaacagcacttaggttttcctgttgagatgggggactgagagacaggactagctggatttcctaggctgactaagaatccctaagcctagctgggaaggtgaccacatccacctttaaacacggggcttgcaacttagctcacacctgaccaatcagagagctcactaaaatgctaattaggcaaagacaggaggtaaagaaatagccaatcatctattgcctgagagcacagcaggagggacaatgatcgggatataaacccaagtcttcgagccggcaacggcaaccccctttgggtcccctccctttgtatgggagctctgttttcatgctatttcactctattaaatcttgcaactgc

SEQ ID NO: 180864 - DNA, 1617 bp, Artificial Sequence
  derived and/or modified sequence
atggcacttccctatcacatatttttgtttacggtcctgctcccaagtttcaccctgacagctcctcccccatgcagatgcatgacttcctcaagtccctatcaagagttcctgtggaggatgcagagaccagggaatattgatgctccttcttatcggagcctgtcaaaggggacacccacatttaccgcccacacccatatgccacgcaactgctaccacagcgccaccctttgcatgcacgctaacacacattattggaccggcaagatgatcaatccttcctgtcctggtggactgggcgtcactgtgtgctggacgtacttcacacagaccggcatgagtgatggcgggggagttcaagaccaggctagggaaaagcacgtgaaggaagtgatctcacaactgacgcgggtccatggcacttccagcccatacaagggcctcgacctgagtaaactgcacgagacactgcggacacacacccgcctggtcagcttattcaacaccactctgacggggcttcatgaagtttctgcgcagaatcccacgaactgttggatatgcttgcccctgaattttcgaccatatgtcagtatccctgtgcctgaacagtggaacaatttttcaaccgagattaatacaacatccgtattagttggtcccctagtgagcaacctggaaattacacatacttcaaatctgacttgcgtgaaattcagtaacaccacgtatactactaattctcaatgcatcaggtgggtaaccccaccaactcagatcgtatgtctaccatcaggcatcttctttgtgtgtggtacctcagcatatagatgtttaaatggttcgtctgagtctatgtgcttcttatctttcttggttccgcctatgaccatttatacagagcaggacttatactcatacgtgatcagcaagcctaggaacaaacgcgttccaatcttgcctttcgtgattggggcaggggtgctcggtgctctcgggaccggcatcggaggtattacaacttcgacacaattctattataagttgagccaagaacttaacggcgacatggagagggtggcggactcactggttacccttcaggaccagctcaattcccttgcggcggttgtgttgcagaataggcgcgcactggacctgttgaccgctgaaaggggtggtacctgcttgtttttgggggaggagtgctgctactacgtgaaccagtctggaattgtgacagaaaaggtcaaggagataagagaccggatccagcgtcgcgcagaggagctgagaaataccggaccgtggggtctgctgtctcagtggatgccgtggatcctgccttttctgggtccgttagctgccattatcctgctcctgctcttcggcccttgcatatttaacctcctcgtaaatttcgtgagcagtcggatcgaagcagtaaaactccagatggaaccaaagatgcagtcaaagacaaagatatacaggagaccgttggatagacccgcttccccccgctccgacgttaacgatatcaagggaacaccacccgaagagatatccgctgcacagccactgctcaggcctaacagcgcagggtctagttag

SEQ ID NO: 180865 - DNA, 1617 bp, Artificial Sequence
  derived and/or modified sequence
atggccctgccctaccacatcttcctgttcaccgtgctgctgcccagcttcaccctgacagcccccccaccctgccgctgcatgaccagcagcagcccctaccaggagttcctgtggaggatgcagaggcctggcaacattgatgcccccagctaccgcagcctgagcaagggcacccccaccttcaccgcccacacccacatgcccaggaactgctaccacagcgccaccctgtgcatgcacgccaacacccactactggacaggcaagatgatcaaccccagctgccctgggggcctgggcgtgacagtgtgctggacctacttcacccagacaggcatgtctgatggcggcggcgtgcaggaccaggcccgggagaagcacgtgaaggaggtgatcagccagctgaccagggtgcacggcaccagcagcccctacaagggcctggacctgagcaagctgcacgagaccctgcggacccacacccggctggtgtccctcttcaacaccaccctgaccggcctgcacgaggtgtctgcccagaaccccaccaactgctggatctgcctgcccctgaacttccggccctacgtgtccatccctgtgcctgagcagtggaacaacttcagcacagagatcaacaccacctctgtgctggtgggccccctggtgagcaacctggagatcacccacaccagcaacctgacctgtgtgaagttcagcaacaccacctacaccaccaacagccagtgcatccgctgggtgaccccacccacccagatcgtgtgcctgcccagcggcatcttctttgtgtgtggcaccagcgcctaccgctgcctgaatggcagcagcgagagcatgtgcttcctgtccttcctggtgccccccatgaccatctacacagagcaggacctgtacagctatgtgatcagcaagcccaggaacaagagggtgcccatcctgccctttgtgattggagctggggtgctgggcgccctgggcactggaattggaggcatcaccaccagcacccagttctactacaagctgagccaggagctgaatggagacatggagcgggtggccgacagcctggtgaccctgcaggaccagctgaacagcctggccgctgtggtgctgcagaacagaagagccctggacctgctgacagctgagcggggcggcacctgcctcttcctgggggaggagtgctgctactacgtgaaccagagcggcatcgtgacagagaaggtgaaggagatccgggaccgcatccagaggagagctgaggagctgaggaacacaggcccctggggcctgctgagccagtggatgccctggatcctgcccttcctgggccccctggccgccatcatcctgctgctgctgtttggcccctgcatcttcaacctgctggtgaactttgtgagcagccgcatcgaggccgtgaagctgcagatggagcccaagatgcagagcaagaccaagatctacagaagacccctggacaggcctgccagccccaggagtgatgtgaatgacatcaagggcaccccacctgaggagatctctgctgcccagcccctgctgcggcccaacagcgctggcagcagctag

SEQ ID NO: 180866 - DNA, 1617 bp, Artificial Sequence
  derived and/or modified sequence
atggccctgccctaccacatcttcctgttcaccgtgctgctgcccagctttaccctgacagccccaccgccatgccgctgtatgacatctagctcaccctatcaagaatttctgtggcggatgcagcggcccggtaacattgatgccccttcctaccggtccctgagcaaaggcacacctacattcaccgctcatactcacatgcctcgaaactgctaccatagtgccacgctttgtatgcatgccaatacccattattggaccggcaaaatgattaatccctcctgcccggggggtctcggggtgacagtttgctggacatatttcactcagactggaatgtcagatggcgggggcgttcaagaccaggctcgagagaagcatgttaaagaagtgatctcccagctgactcgcgtccacggaacatcttccccatataaaggcttggacctgtccaagctgcacgagactctgcgcactcacacaaggttagtcagtcttttcaacaccacacttacaggactccatgaggtgtccgctcagaaccctaccaactgctggatttgtctgccgttaaactttagaccttacgttagtatccctgtccctgaacaatggaacaatttttccacagagatcaataccactagcgtgctggtgggacccctcgtctcaaatctggaaatcacacacacctctaatctgacgtgtgtcaagttcagcaatacaacttacacgactaactcccagtgtatccggtgggtgactcctcccacacagatcgtctgtctgccttctgggatcttcttcgtttgcggcacctctgcctatcgatgtcttaatggaagttccgagagcatgtgcttcctttctttcctcgtgcctcctatgaccatctacactgagcaggatctgtacagctacgtgataagcaaacctcggaacaagagggtgcctatactcccatttgtcattggcgcaggcgtgctgggagcactgggcaccggaattggggggatcacaacttcgacccagttttactataagctgtctcaggagttgaatggcgacatggaaagggttgccgattcacttgtaacccttcaggaccagctcaactccctcgctgcagtggttctgcagaatagaagggcactagacctactgactgcagagcgaggtgggacctgcttgttcctgggcgaagagtgctgttactacgttaaccagtctggaatcgtgaccgagaaggtgaaggaaattagggatcggatccagagacgcgctgaggaacttcgtaatacagggccgtggggactcctatctcaatggatgccttggattctccctttcttgggccccctggctgcgattatactgctgttgttatttggcccctgtatctttaaccttctggtcaacttcgtgagctcgaggatcgaagcagttaaattgcagatggaacctaaaatgcagagtaagacgaagatctaccgcagacctctggacagaccagccagccccagatctgatgtgaacgatatcaagggcacgccacctgaggagatttctgccgcccaacccctcctgcggcctaactctgcaggctcttcttag

SEQ ID NO: 180867 - DNA, 1617 bp, Artificial Sequence
  derived and/or modified sequence
atggccctgccttaccacatctttctgtttactgtgctcctcccctctttcaccctgactgcacctcctccgtgtagatgtatgacatcgagttctccttaccaggaattcttgtggaggatgcagcgtcctggtaacatcgatgccccatcctatcggagcctgagcaaagggacgcccaccttcactgctcacacccatatgcctaggaactgttaccattcggcaacactgtgtatgcatgctaatactcactactggaccggcaagatgatcaatccctcctgccctggcggattaggcgtcactgtttgctggacgtatttcacgcagaccggtatgtcggacgggggaggtgtgcaggatcaggctcgagaaaaacatgtaaaggaagtgatatctcagcttacacgcgttcacggtacaagctctccctacaaagggctggacttgtctaaactgcacgaaactctgcggacccacacaaggctggtgtctctctttaacacaactttgactgggctccacgaagtcagtgcccagaatcccacaaattgttggatttgtctccctttgaacttcagaccgtacgtgagtatacctgtgcccgagcagtggaataacttttccacagagataaataccacctctgtgcttgtgggtcccttagttagcaacttggaaatcactcatacgagtaatctcacttgtgtaaagttctcaaatacaacttataccaccaatagccagtgcattagatgggtgacccccccaacccagattgtttgtctgccctccggtatcttcttcgtttgcggcacgtccgcctacaggtgcctgaatggttcctccgaatccatgtgttttctgtcattcctggtgcctcccatgaccatttatacagaacaggatctgtacagctacgtgatttctaagcccagaaacaaacgtgtccccatactaccatttgttatcggtgctggggtcttgggtgcacttgggactggcatcgggggaataacgacatctacacagttttattataagttgagccaagagttaaatggtgatatggaacgggtggccgactccctcgtaaccctacaagatcagctgaattcgctcgctgctgtcgtgctccagaaccggcgagccctcgacctgcttaccgccgaacggggagggacttgcttgtttctgggtgaggaatgttgttactatgtgaatcagtccggtattgtgactgaaaaagtgaaggaaatacgcgaccgcattcagcgcagggctgaagaactccggaacactggaccttggggtctcctgtctcaatggatgccctggattctcccatttctggggccactggcagcgataatcttactcttgttatttggcccttgcatttttaacctgcttgtaaatttcgtaagctctagaatcgaagccgttaaactgcagatggagcccaaaatgcaatccaagactaaaatctaccggagacctctggatcggccagcctcccctagatctgacgtgaatgacatcaaagggacaccccctgaggaaatctcggctgctcagcctttgctgcgcccaaattctgccggatccagttag

SEQ ID NO: 180868 - protein, 285 aa, Artificial Sequence
  derived and/or modified sequence
MRGQGRKESLSDSRDLDGSYDQLTGHPPGPTKKALKQRFLKLLPCCGPQALPSVSEIGRVFRFLGDSSLPSALAAPASLRPHRPRLLDPDSVDDEFELSTVCHRPEGLEQLQEQTKFTRKELQVLYRGFKNECPSGIVNEENFKQIYSQFFPQGDSSTYATFLFNAFDTNHDGSVSFEDFVAGLSVILRGTVDDRLNWAFNLYDLNKDGCITKEEMLDIMKSIYDMMGKYTYPALREEAPREHVESFFQKMDRNKDGVVTIEEFIESCQKDENIMRSMQLFDNVI

SEQ ID NO: 180869 - DNA, 2608 bp, Artificial Sequence
  derived and/or modified sequence
aaagggtggggggcgggggtagggggagccaatcccggcagcgccaaagaggggaggaggcggtgacagccgcggggagggggcgggaggagagaggcagctcggctcggctccgcgctcagctccgctctgcctccggctctgcgctcacctgctgcctagtgttccctctcctgctccaggacctccgggtagacctcagaccccgggcccattcccagactcagcctcagcccggacttccccagccccgacagcacagtaggccgccagggggcgccgtgtgagcgccctatcccggccacccggcgccccctcccacggcccgggcgggagcggggcgccgggggccatgcggggccagggccgcaaggagagtttgtccgattcccgagacctggacggctcctacgaccagctcacgggccaccctccagggcccactaaaaaagcgctgaagcagcgattcctcaagctgctgccgtgctgcgggccccaagccctgccctcagtcagtgaaattggccgggtcttccgctttctcggtgacagttcgctcccttcagcattagccgccccagcctccctccgcccccacagaccccgcctgctggacccagacagcgtggacgatgaatttgaattgtccaccgtgtgtcaccggcctgagggtctggagcagctgcaggagcaaaccaaattcacgcgcaaggagttgcaggtcctgtaccggggcttcaagaacgaatgtcccagcggaattgtcaatgaggagaacttcaagcagatttactcccagttctttcctcaaggagactccagcacctatgccacttttctcttcaatgcctttgacaccaaccatgatggctcggtcagttttgaggactttgtggctggtttgtccgtgattcttcggggaactgtagatgacaggcttaattgggccttcaacctgtatgaccttaacaaggacggctgcatcaccaaggaggaaatgcttgacatcatgaagtccatctatgacatgatgggcaagtacacgtaccctgcactccgggaggaggccccaagggaacacgtggagagcttcttccagaagatggacagaaacaaggatggtgtggtgaccattgaggaattcattgagtcttgtcaaaaggatgagaacatcatgaggtccatgcagctctttgacaatgtcatctagcccccaggagagggggtcagtgtttcctggggggaccatgctctaaccctagtccaggcggacctcacccttctcttcccaggtctatcctcatcctacgcctccctgggggctggagggatccaagagcttggggattcagtagtccagatctctggagctgaaggggccagagagtgggcagagtgcatctcggggggtgttcccaactcccaccagctctcacccccttcctgcctgacacccagtgttgagagtgcccctcctgtaggaattgagcggttccccacctcctacccctactctagaaacacactagacagatgtctcctgctatggtgcttcccccatccctgacctcataaacatttcccctaagactcccctctcagagagaatgctccattcttggcactggctggcttctcagaccagccattgagagccctgtgggagggggacaagaatgtatagggagaaatcttgggcctgagtcaatggataggtcctaggaggtggctggggttgagaatagaagggcctggacagattatgattgctcaggcataccaggttatagctccaagttccacaggtctgctaccacaggccatcaaaatataagtttccaggctttgcagaagaccttgtctccttagaaatgccccagaaattttccacaccctcctcggtatccatggagagcctggggccagatatctggctcatctctggcattgcttcctctccttccttcctgcatgtgttggtggtggttgtggtgggggaatgtggatgggggatgtcctggctgatgcctgccaaaatttcatcccaccctccttgcttatcgtccctgttttgagggctatgacttgagtttttgtttcccatgttctctatagacttgggaccttcctgaacttggggcctatcactccccacagtggatgccttagaagggagagggaaggagggaggcaggcatagcatctgaacccagtgtgggggcattcactagaatcttcaatcaacctgggctctccccaccccaccccagataacctcctcagttccctagggtctcttcttgcttgactcaatctacccagagatgccccttagcacacctagagggcagggaccataggacccaggttccaaccccattgtcagcaccccagccatgcggccaccccttagcacacctgctcgtcccatttagcttaccctcccagttggccagaatctgaggggagagcccccagagagcccccttccccatcagaagactgttgactgctttgcattttgggctcttctatatattttgtaaagtaagaaatataccagatctaataaaacacaatggctatgcaaaaaaaaaaaaaaaaaaaa

SEQ ID NO: 180870 - DNA, 858 bp, Artificial Sequence
  derived and/or modified sequence
atgcgaggacaggggaggaaggaatccctcagcgacagtagggatctcgacggctcatacgatcaactgaccggacatcctccaggccctaccaagaaggccctgaagcagcggtttttgaagctgttgccgtgctgcggccctcaggctcttccctctgtgagcgaaatcggacgcgtcttccggtttctgggcgattcttctttgcctagtgccctggccgctcctgccagcctgaggccccacaggcccaggcttttggaccctgattccgtggacgacgaatttgaactgtccaccgtttgtcatcgaccagaaggcctcgagcaattacaggaacagaccaagttcacgaggaaagagctgcaggtcctttataggggatttaaaaacgaatgtccaagcggcattgtaaacgaagagaattttaagcaaatctactctcagttcttccctcagggagatagctccacatacgctacgttcctgttcaatgcattcgatacaaaccatgatgggtctgtgagcttcgaagatttcgtcgcagggctgagtgtaattctgcgagggacagtcgatgaccgccttaattgggctttcaacctgtacgacctgaacaaggatggatgtattacaaaggaggagatgttggacataatgaaaagcatatacgatatgatgggcaaatacacctatccagctctccgcgaggaagccccacgagaacacgtggagtccttcttccagaagatggaccggaataaggatggcgtcgttaccatagaagagttcatcgagtcatgtcagaaggacgaaaacatcatgcggtcaatgcagttattcgataacgtcatttag

SEQ ID NO: 180871 - DNA, 858 bp, Artificial Sequence
  derived and/or modified sequence
atgcggggccaaggacgaaaggaatccctgagtgattcaagggacttggatgggtcttatgaccagctcaccggccatccgcccgggccgacaaagaaggctctgaaacaaagattcctcaaactccttccttgctgtggaccacaggccctccccagtgttagtgagattggtagggtttttaggttccttggcgactcatctctcccatctgctttagccgcaccagcatcgctccggcctcacagacctcggttgctggacccagacagcgtggacgacgaattcgaactgagcacagtctgtcacagaccagaaggcttggaacagctacaagagcagacaaagtttaccagaaaggaactacaggtgttatacagggggtttaagaacgaatgccccagcggaatagtgaatgaagaaaattttaagcaaatctactcccagttctttccgcagggcgactcttccacgtacgctacattcctcttcaatgcatttgacacaaaccacgacggatccgtctcgttcgaagactttgtggcaggcctgtctgtgatactgagaggcactgtagacgatagactcaactgggccttcaatctgtatgatctcaataaggatggctgtatcacaaaggaggagatgttggacattatgaagagcatatacgatatgatgggaaaatacacataccctgccctccgagaggaggccccacgggagcacgtcgaatcttttttccaaaaaatggatcgtaacaaggacggcgttgtcaccatcgaggaatttatcgagtcatgtcaaaaagatgagaatataatgaggtctatgcagttgttcgataacgtcatctag

SEQ ID NO: 180872 - DNA, 858 bp, Artificial Sequence
  derived and/or modified sequence
atgcggggccagggccgcaaggagagtttgtccgattcccgagacctggacggctcctacgaccagctcacgggccaccctccagggcccactaaaaaagcgctgaagcagcgattcctcaagctgctgccgtgctgcgggccccaagccctgccctcagtcagtgaaattggccgggtcttccgctttctcggtgacagttcgctcccttcagcattagccgccccagcctccctccgcccccacagaccccgcctgctggacccagacagcgtggacgatgaatttgaattgtccaccgtgtgtcaccggcctgagggtctggagcagctgcaggagcaaaccaaattcacgcgcaaggagttgcaggtcctgtaccggggcttcaagaacgaatgtcccagcggaattgtcaatgaggagaacttcaagcagatttactcccagttctttcctcaaggagactccagcacctatgccacttttctcttcaatgcctttgacaccaaccatgatggctcggtcagttttgaggactttgtggctggtttgtccgtgattcttcggggaactgtagatgacaggcttaattgggccttcaacctgtatgaccttaacaaggacggctgcatcaccaaggaggaaatgcttgacatcatgaagtccatctatgacatgatgggcaagtacacgtaccctgcactccgggaggaggccccaagggaacacgtggagagcttcttccagaagatggacagaaacaaggatggtgtggtgaccattgaggaattcattgagtcttgtcaaaaggatgagaacatcatgaggtccatgcagctctttgacaatgtcatctag

SEQ ID NO: 180873 - DNA, 858 bp, Artificial Sequence
  derived and/or modified sequence
atgagaggacaagggcggaaagagtctctcagcgattctcgggaccttgacggctcttacgatcagctcactggacatccgcctggccccaccaaaaaagcccttaagcagaggttcctcaaactgttgccttgctgcggtccgcaagctctccctagcgtgtctgagattggtcgcgtgtttaggtttttgggcgatagcagtctgccatcagccctcgcggcccccgcaagcctgcgtccacataggccccgtctgctagatcctgactctgttgatgatgaatttgagttaagcaccgtctgtcatcgccctgaaggcctcgaacaactccaggagcagacaaagtttacccggaaagagctgcaagtactttatcggggattcaaaaacgaatgcccctcaggaatcgtcaacgaagaaaactttaaacaaatctacagtcaattcttcccccagggagacagttctacctacgcaaccttcctcttcaatgcattcgacacaaatcacgatgggagtgtaagtttcgaagattttgttgccgggttaagcgttatattgagaggtaccgtggatgataggttgaattgggcctttaacctgtatgacttgaataaagatggatgtataacaaaagaagaaatgttggatatcatgaagagcatttacgacatgatgggaaaatacacctacccagctctgagggaggaagccccaagagaacacgttgagtcattctttcagaagatggatagaaacaaggatggagttgtgacgatcgaggaatttatagagtcatgccagaaggatgaaaatatcatgcggtcaatgcaactgttcgacaatgtgatttag

SEQ ID NO: 180874 - DNA, 858 bp, Artificial Sequence
  derived and/or modified sequence
atgagaggccagggcagaaaggagagcctgagcgacagcagagacctggacggcagctacgaccagctgaccggccacccccccggccccaccaagaaggccctgaagcagagattcctgaagctgctgccctgctgcggcccccaggccctgcccagcgtgagcgagatcggcagagtgttcagattcctgggcgacagcagcctgcccagcgccctggccgcccccgccagcctgagaccccacagacccagactgctggaccccgacagcgtggacgacgagttcgagctgagcaccgtgtgccacagacccgagggcctggagcagctgcaggagcagaccaagttcaccagaaaggagctgcaggtgctgtacagaggcttcaagaacgagtgccccagcggcatcgtgaacgaggagaacttcaagcagatctacagccagttcttcccccagggcgacagcagcacctacgccaccttcctgttcaacgccttcgacaccaaccacgacggcagcgtgagcttcgaggacttcgtggccggcctgagcgtgatcctgagaggcaccgtggacgacagactgaactgggccttcaacctgtacgacctgaacaaggacggctgcatcaccaaggaggagatgctggacatcatgaagagcatctacgacatgatgggcaagtacacctaccccgccctgagagaggaggcccccagagagcacgtggagagcttcttccagaagatggacagaaacaaggacggcgtggtgaccatcgaggagttcatcgagagctgccagaaggacgagaacatcatgagaagcatgcagctgttcgacaacgtgatctag

SEQ ID NO: 180875 - DNA, 858 bp, Artificial Sequence
  derived and/or modified sequence
atgaggggccagggaagaaaagaatccttgtccgacagcagggacttagacgggtcttatgatcagctgacggggcacccaccaggacctaccaagaaagcactaaagcagaggttcttgaagctgctgccttgctgcggcccccaggcgttaccttccgtgagcgagataggccgtgtcttccgttttttgggtgattcctcgctcccatctgccctcgccgctcctgcttcgctacggcctcaccgacctaggctgttagatcctgattccgtggatgacgagttcgaactctccacagtgtgtcatcgaccagaaggactggagcagttgcaggaacagactaaatttacccggaaggaactccaggtgctctatcgcggatttaagaatgaatgtcctagcggaatcgtcaatgaggagaactttaagcaaatctactcccagttctttccacagggagactcatccacatacgccacgtttctcttcaacgcatttgatacaaatcacgatggaagcgtctccttcgaagattttgttgccggcctgtctgtcattctccgcgggactgtggacgatcgactaaattgggcatttaacctttatgatctgaataaggatggttgtattacaaaagaggagatgctggatatcatgaaatcaatttatgatatgatgggcaagtacacctatcctgcattgcgcgaagaggcccctcgcgagcacgttgagagcttctttcaaaagatggaccgcaataaggacggcgtcgtgaccatcgaagaatttattgaatcatgtcagaaggacgagaatatcatgcggtccatgcagttattcgataacgttatatag

SEQ ID NO: 180876 - DNA, 2586 bp, Artificial Sequence
  derived and/or modified sequence
aaagggtggggggcgggggtagggggagccaatcccggcagcgccaaagaggggaggaggcggtgacagccgcggggagggggcgggaggagagaggcagctcggctcggctccgcgctcagctccgctctgcctccggctctgcgctcacctgctgcctagtgttccctctcctgctccaggacctccgggtagacctcagaccccgggcccattcccagactcagcctcagcccggacttccccagccccgacagcacagtaggccgccagggggcgccgtgtgagcgccctcccgggcgggagcggggcgccgggggccatgcggggccagggccgcaaggagagtttgtccgattcccgagacctggacggctcctacgaccagctcacgggccaccctccagggcccactaaaaaagcgctgaagcagcgattcctcaagctgctgccgtgctgcgggccccaagccctgccctcagtcagtgaaattggccgggtcttccgctttctcggtgacagttcgctcccttcagcattagccgccccagcctccctccgcccccacagaccccgcctgctggacccagacagcgtggacgatgaatttgaattgtccaccgtgtgtcaccggcctgagggtctggagcagctgcaggagcaaaccaaattcacgcgcaaggagttgcaggtcctgtaccggggcttcaagaactcttccctcccatcacatgagccacgtggaatgtcccagcggaattgtcaatgaggagaacttcaagcagatttactcccagttctttcctcaaggagactccagcacctatgccacttttctcttcaatgcctttgacaccaaccatgatggctcggtcagttttgaggactttgtggctggtttgtccgtgattcttcggggaactgtagatgacaggcttaattgggccttcaacctgtatgaccttaacaaggacggctgcatcaccaaggaggaaatgcttgacatcatgaagtccatctatgacatgatgggcaagtacacgtaccctgcactccgggaggaggccccaagggaacacgtggagagcttcttccagaagatggacagaaacaaggatggtgtggtgaccattgaggaattcattgagtcttgtcaaaaggatgagaacatcatgaggtccatgcagctctttgacaatgtcatctagcccccaggagagggggtcagtgtttcctggggggaccatgctctaaccctagtccaggcggacctcacccttctcttcccaggtctatcctcatcctacgcctccctgggggctggagggatccaagagcttggggattcagtagtccagatctctggagctgaaggggccagagagtgggcagagtgcatctcggggggtgttcccaactcccaccagctctcacccccttcctgcctgacacccagtgttgagagtgcccctcctgtaggaattgagcggttccccacctcctacccctactctagaaacacactagacagatgtctcctgctatggtgcttcccccatccctgacctcataaacatttcccctaagactcccctctcagagagaatgctccattcttggcactggctggcttctcagaccagccattgagagccctgtgggagggggacaagaatgtatagggagaaatcttgggcctgagtcaatggataggtcctaggaggtggctggggttgagaatagaagggcctggacagattatgattgctcaggcataccaggttatagctccaagttccacaggtctgctaccacaggccatcaaaatataagtttccaggctttgcagaagaccttgtctccttagaaatgccccagaaattttccacaccctcctcggtatccatggagagcctggggccagatatctggctcatctctggcattgcttcctctccttccttcctgcatgtgttggtggtggttgtggtgggggaatgtggatgggggatgtcctggctgatgcctgccaaaatttcatcccaccctccttgcttatcgtccctgttttgagggctatgacttgagtttttgtttcccatgttctctatagacttgggaccttcctgaacttggggcctatcactccccacagtggatgccttagaagggagagggaaggagggaggcaggcatagcatctgaacccagtgtgggggcattcactagaatcttcaatcaacctgggctctccccaccccaccccagataacctcctcagttccctagggtctcttcttgcttgactcaatctacccagagatgccccttagcacacctagagggcagggaccataggacccaggttccaaccccattgtcagcaccccagccatgcggccaccccttagcacacctgctcgtcccatttagcttaccctcccagttggccagaatctgaggggagagcccccagagagcccccttccccatcagaagactgttgactgctttgcattttgggctcttctatatattttgtaaagtaagaaatataccagatctaataaaacacaatggctatgc

SEQ ID NO: 180877 - DNA, 858 bp, Artificial Sequence
  derived and/or modified sequence
atgaggggccagggcaggaaggagagcctgagtgacagccgggacctggatggcagctatgaccagctgaccggccaccccccaggccccaccaagaaggccctgaagcagcgcttcctgaagctgctgccctgctgcggcccccaggccctgcccagcgtgtctgaaattggccgggtcttccgcttcctgggggacagcagcctgcccagcgccctggccgccccagccagcctgcggccccaccggccccggctgctggaccctgattctgtggatgatgaatttgagctgagcacagtgtgccacaggcctgagggcctggagcagctgcaggagcagaccaagttcaccaggaaggagctgcaggtgctgtaccggggcttcaagaatgaatgtccttctggaattgtgaatgaggagaacttcaagcagatctacagccagttcttcccccagggcgacagcagcacctacgccaccttcctgttcaatgcctttgacaccaaccatgatggctctgtgtcctttgaggactttgtggccggcctgagcgtcatcctgcggggcaccgtggatgaccggctgaactgggccttcaacctgtatgacctgaacaaggatggctgcatcaccaaggaggagatgctggacatcatgaagagcatctatgacatgatgggcaagtacacctacccagccctgcgggaggaggccccccgggagcacgtggagagcttcttccagaagatggacaggaacaaggatggagtggtgaccatcgaggagttcatcgagagctgccagaaggatgagaacatcatgaggtccatgcagctgtttgacaacgtcatctag

SEQ ID NO: 180878 - DNA, 858 bp, Artificial Sequence
  derived and/or modified sequence
atgcggggccagggccggaaggagagcctgagcgacagccgggacttggatggtagctatgatcaacttacagggcatccacccggccccacgaaaaaggctcttaagcaacgcttcctgaaacttttgccatgttgtggcccacaagccctgcccagcgtcagtgaaatcggcagggtgttcaggtttttgggagacagtagcttgccaagtgctctggcggctcccgcctcactccgccctcaccggcccagactcctggatcctgacagtgtggacgacgagttcgagttaagtacagtttgccataggccagaggggctggaacaacttcaggaacagaccaagtttacacgtaaagaactgcaggttctgtacagggggtttaagaacgagtgtcctagtggcattgtaaatgaagagaattttaaacagatttacagccagttcttcccccagggagattccagcacctacgcaactttcctctttaatgcattcgatactaaccacgatggctccgtttcattcgaagattttgtcgcaggcctgtctgtgattttacgcgggaccgtcgacgacagactgaactgggcttttaatctgtacgacctgaacaaggacgggtgcataaccaaggaggagatgctcgacatcatgaagagcatttatgatatgatggggaagtatacgtaccccgctctgcgtgaagaggcgccacgggaacacgtagagtctttttttcagaagatggataggaacaaagatggggtggttacaattgaagaattcatcgagtcctgccagaaggacgagaacatcatgcgctcaatgcaacttttcgacaacgtgatttag

SEQ ID NO: 180879 - RNA, 858 nt, Artificial Sequence
  derived and/or modified sequence
augcggggccaaggacgaaaggaaucccugagugauucaagggacuuggaugggucuuaugaccagcucaccggccauccgcccgggccgacaaagaaggcucugaaacaaagauuccucaaacuccuuccuugcuguggaccacaggcccuccccaguguuagugagauugguaggguuuuuagguuccuuggcgacucaucucucccaucugcuuuagccgcaccagcaucgcuccggccucacagaccucgguugcuggacccagacagcguggacgacgaauucgaacugagcacagucugucacagaccagaaggcuuggaacagcuacaagagcagacaaaguuuaccagaaaggaacuacagguguuauacaggggguuuaagaacgaaugccccagcggaauagugaaugaagaaaauuuuaagcaaaucuacucccaguucuuuccgcagggcgacucuuccacguacgcuacauuccucuucaaugcauuugacacaaaccacgacggauccgucucguucgaagacuuuguggcaggccugucugugauacugagaggcacuguagacgauagacucaacugggccuucaaucuguaugaucucaauaaggauggcuguaucacaaaggaggagauguuggacauuaugaagagcauauacgauaugaugggaaaauacacauacccugcccuccgagaggaggccccacgggagcacgucgaaucuuuuuuccaaaaaauggaucguaacaaggacggcguugucaccaucgaggaauuuaucgagucaugucaaaaagaugagaauauaaugaggucuaugcaguuguucgauaacgucaucuag

SEQ ID NO: 180880 - RNA, 858 nt, Artificial Sequence
  derived and/or modified sequence
augagaggacaagggcggaaagagucucucagcgauucucgggaccuugacggcucuuacgaucagcucacuggacauccgccuggccccaccaaaaaagcccuuaagcagagguuccucaaacuguugccuugcugcgguccgcaagcucucccuagcgugucugagauuggucgcguguuuagguuuuugggcgauagcagucugccaucagcccucgcggcccccgcaagccugcguccacauaggccccgucugcuagauccugacucuguugaugaugaauuugaguuaagcaccgucugucaucgcccugaaggccucgaacaacuccaggagcagacaaaguuuacccggaaagagcugcaaguacuuuaucggggauucaaaaacgaaugccccucaggaaucgucaacgaagaaaacuuuaaacaaaucuacagucaauucuucccccagggagacaguucuaccuacgcaaccuuccucuucaaugcauucgacacaaaucacgaugggaguguaaguuucgaagauuuuguugccggguuaagcguuauauugagagguaccguggaugauagguugaauugggccuuuaaccuguaugacuugaauaaagauggauguauaacaaaagaagaaauguuggauaucaugaagagcauuuacgacaugaugggaaaauacaccuacccagcucugagggaggaagccccaagagaacacguugagucauucuuucagaagauggauagaaacaaggauggaguugugacgaucgaggaauuuauagagucaugccagaaggaugaaaauaucaugcggucaaugcaacuguucgacaaugugauuuag

SEQ ID NO: 180881 - protein, 216 aa, Artificial Sequence
  derived and/or modified sequence
MGAVMGTFSSLQTKQRRPSKDKIEDELEMTMVCHRPEGLEQLEAQTNFTKRELQVLYRGFKNECPSGVVNEDTFKQIYAQFFPHGDASTYAHYLFNAFDTTQTGSVKFEDFVTALSILLRGTVHEKLRWTFNLYDINKDGYINKEEMMDIVKAIYDMMGKYTYPVLKEDTPRQHVDVFFQKMDKNKDGIVTLDEFLESCQEDDNIMRSLQLFQNVM

SEQ ID NO: 180882 - DNA, 2020 bp, Artificial Sequence
  derived and/or modified sequence
caggcagcaggcagcaggcgggcgcgctgtggctccgcgccgcgcggtccgggctctgttcattcatgattggtactcggccctccgagacccagcccgagcgcagggaggggagccgagtgtgcggcaggaggggcgggcggacggcggctcccgcaccgcacgcggcgctggctcggcagcctcggccgggcggccgctctggccccgtgtccagtgccaggcaggcttcagggcaccgtcctcggccctgggcgagggaaccgccgggccgggtcctcgcgcggggaagcggttccgaaggctcgcggggagcggctagccctgagtccctgcatgtgcggggctgaagaaggaagccagaagcctcctagcctcgcctccacgcttgctgaataccaagctgcaggcgagctgccgggcgcttttctctcctccaattcagagtagacaaaccacggggatttctttccagggtaggggaggggccgggcccggggtcccaactcgcactcaagtcttcgctgccatgggggccgtcatgggcaccttctcatctctgcaaaccaaacaaaggcgaccctcgaaagataagattgaagatgagctggagatgaccatggtttgccatcggcccgagggactggagcagctcgaggcccagaccaacttcaccaagagggagctgcaggtcctttatcgaggcttcaaaaatgagtgccccagtggtgtggtcaacgaagacacattcaagcagatctatgctcagtttttccctcatggagatgccagcacgtatgcccattacctcttcaatgccttcgacaccactcagacaggctccgtgaagttcgaggactttgtaaccgctctgtcgattttattgagaggaactgtccacgagaaactaaggtggacatttaatttgtatgacatcaacaaggacggatacataaacaaagaggagatgatggacattgtcaaagccatctatgacatgatggggaaatacacatatcctgtgctcaaagaggacactccaaggcagcatgtggacgtcttcttccagaaaatggacaaaaataaagatggcatcgtaactttagatgaatttcttgaatcatgtcaggaggacgacaacatcatgaggtctctccagctgtttcaaaatgtcatgtaactggtgacactcagccattcagctctcagagacattgtactaaacaaccaccttaacaccctgatctgcccttgttctgattttacacaccaactcttgggacagaaacaccttttacactttggaagaattctctgctgaagactttctatggaacccagcatcatgtggctcagtctctgattgccaactcttcctctttcttcttcttgagagagacaagatgaaatttgagtttgttttggaagcatgctcatctcctcacactgctgccctatggaaggtccctctgcttaagcttaaacagtagtgcacaaaatatgctgcttacgtgcccccagcccactgcctccaagtcaggcagaccttggtgaatctggaagcaagaggacctgagccagatgcacaccatctctgatggcctcccaaaccaatgtgcctgtttctcttcctttggtgggaagaatgagagttatccagaacaattaggatctgtcatgaccagattgggagagccagcacctaacatatgtgggataggactgaattattaagcatgatattgtctgatgacccaaactgcccatgtcatttgtttccagaaacgaggaccaataattctctcacactggcatttgtgctggtagtacaagtcctttaatatgtccaggaagggagccattgcccagtggtccatatctccaccacatcccctgcttgagcccagcgctgcatgtccctcccaagaagtccagaatgcctgcaaattgctgtaattttataccatgttctaaccaataaacagaactatttcttacactctcaaaaaaaaaaaaaaaa

SEQ ID NO: 180883 - DNA, 651 bp, Artificial Sequence
  derived and/or modified sequence
atgggcgcagtcatgggtacctttagctctctgcaaacaaaacagagaaggcctagtaaagataagattgaggacgagttggaaatgacaatggtgtgtcataggcctgagggtctggagcaactggaggctcagacgaactttactaagcgggaactccaggtgctctacagaggctttaaaaatgagtgtccttccggggtggttaacgaggacacatttaagcagatctatgcccagttctttcctcacggagacgccagtacgtatgcacactatctgtttaatgcttttgatactacccagactgggtccgtcaagttcgaggattttgttacagccttatctatcctcctgcgaggcacggtgcacgagaagctgagatggactttcaacctatatgatatcaacaaagatggatacatcaacaaagaagagatgatggatatcgttaaggcgatatatgacatgatgggcaaatacacttacccagtcctcaaggaggacactccaaggcaacatgtggatgtgttcttccagaaaatggataagaacaaagatggcattgtgacactagatgaatttctggaaagctgccaggaagacgataatatcatgaggagcctgcagctgtttcaaaacgtcatgtag

SEQ ID NO: 180884 - DNA, 651 bp, Artificial Sequence
  derived and/or modified sequence
atgggagcagtgatgggcaccttcagcagcctgcagactaagcagagacgccctagcaaagacaagattgaagatgagctggagatgactatggtctgtcacagacccgagggcctggagcaactggaagcacagactaattttacaaaacgggagttacaagttctgtaccgcggatttaaaaacgagtgtccttccggcgttgtgaatgaagacacgtttaagcagatatacgcacagtttttcccgcacggagatgcaagtacatatgcccactatctgtttaacgccttcgacactacgcaaaccgggtcagtgaagttcgaggacttcgtgacggcactgagcatcttactgagaggaacggtgcacgagaaattgaggtggacattcaacctttatgatatcaacaaggatggctacatcaataaggaagagatgatggatatagtgaaggccatctacgatatgatggggaagtatacgtaccccgtcctaaaagaagacacaccccgacagcacgtggacgtgttctttcagaaaatggacaaaaacaaggatgggattgtcacactggacgagttcctcgaaagctgccaggaagatgacaacattatgcgctcgcttcagttgtttcagaatgttatgtag

SEQ ID NO: 180885 - DNA, 651 bp, Artificial Sequence
  derived and/or modified sequence
atgggcgcagttatgggaaccttctcgagcctccaaacgaagcagagacgaccctcgaaagacaaaattgaagacgaactagagatgactatggtgtgccaccggccagagggactggaacagctggaagcccagaccaattttacaaagagggagttacaggttctgtaccgaggctttaaaaatgagtgtccatcaggggtggtcaatgaggatacctttaaacagatttatgctcagttctttcctcacggtgatgcgtccacctacgcccactatttgtttaacgctttcgacactacacagacgggcagtgtgaagttcgaggacttcgttacagcactctcaattctcttgcgagggaccgtgcacgaaaaacttaggtggacatttaatctgtacgacatcaacaaagacggatacataaataaagaggagatgatggacattgttaaagcaatttatgatatgatgggcaaatatacctacccggttcttaaggaggatacacctcgtcagcacgtcgacgttttcttccaaaaaatggacaaaaacaaggacggaatcgtgactctggatgagtttcttgaaagctgccaagaggatgataacatcatgcgttccctacaactatttcagaacgtgatgtag

SEQ ID NO: 180886 - DNA, 651 bp, Artificial Sequence
  derived and/or modified sequence
atgggtgcagtcatgggcacattctcttccttgcagacaaagcaacgtagacccagcaaagacaagattgaggatgagcttgagatgacaatggtctgtcacaggcctgagggactagagcaactggaggcccagaccaactttaccaagagggagctgcaggttttgtatagggggttcaaaaacgagtgccctagtggagtcgttaatgaggatacgtttaaacaaatctacgcccagttctttccacacggagatgcaagcacctacgcccattatctttttaatgctttcgacactacacagacaggatcagttaaattcgaggatttcgttacagccctgagtatacttttacgagggactgttcacgagaagctgagatggacttttaatctttacgacataaacaaagatggctatatcaataaggaagaaatgatggacatagtgaaggcgatctatgatatgatgggtaagtacacctatccagtcttgaaagaagacactcccagacaacacgtcgatgtattcttccagaagatggacaagaacaaagatggaatcgtgactctcgatgaatttctggagtcctgccaggaagatgataacattatgcggtctctgcaactgtttcagaatgtgatgtag

SEQ ID NO: 180887 - DNA, 651 bp, Artificial Sequence
  derived and/or modified sequence
atgggggctgtcatggggactttttccagtctacagacaaaacagcgtcgcccatcaaaggacaagatagaggacgaacttgaaatgacaatggtatgtcacagaccagagggattggaacagctagaagcccagacgaactttactaaacgtgagcttcaggtgttgtatagagggtttaaaaacgaatgccctagtggagtggtcaacgaagatacatttaagcaaatatacgctcagttttttccccacggagacgcttcaacctacgcacattacctgtttaacgctttcgatacaactcaaaccggatccgtgaagttcgaagattttgtgacagcactctctattctgctgagaggaaccgtgcacgagaaactgagatggaccttcaatctgtatgatattaacaaggacggatatattaataaagaggagatgatggacatcgtaaaggcgatctatgacatgatgggcaagtacacatacccggtcctgaaagaagacacgcccagacaacacgtggatgtattttttcaaaagatggataagaataaagatggcatcgtgacactcgacgaattcctcgaatcttgccaagaggacgataacattatgcgatcacttcagctgtttcagaatgtcatgtag

SEQ ID NO: 180888 - DNA, 651 bp, Artificial Sequence
  derived and/or modified sequence
atgggtgccgttatgggcactttttcatccctgcagacgaagcaacgacgtccctctaaagataagattgaagatgagctcgagatgacaatggtgtgtcaccggccagagggcttagagcagttggaggctcagactaactttactaaacgcgaactgcaagtcctgtataggggctttaagaacgagtgcccttccggagttgttaatgaagacacatttaagcagatctacgcgcagttctttcctcatggagatgcatcgacatatgcacactatttattcaatgcttttgataccacacaaacaggttctgtaaagttcgaggactttgttacggccttgtcaattttactgcgcggcacagtacacgaaaaattgcgttggacattcaacctgtatgacatcaacaaagacgggtacataaataaagaggagatgatggacatcgtgaaagccatatatgatatgatggggaagtacacttatccagtgctcaaagaagatacccccagacagcatgtggatgttttttttcagaagatggacaagaacaaagacggaatcgtaaccctcgacgaatttctcgaatcatgccaggaggatgacaatataatgagatccctccagctgttccagaatgtgatgtag

SEQ ID NO: 180889 - DNA, 651 bp, Artificial Sequence
  derived and/or modified sequence
atgggcgccgtgatgggcaccttcagcagcctgcagaccaagcagagaagacccagcaaggacaagatcgaggacgagctggagatgaccatggtgtgccacagacccgagggcctggagcagctggaggcccagaccaacttcaccaagagagagctgcaggtgctgtacagaggcttcaagaacgagtgccccagcggcgtggtgaacgaggacaccttcaagcagatctacgcccagttcttcccccacggcgacgccagcacctacgcccactacctgttcaacgccttcgacaccacccagaccggcagcgtgaagttcgaggacttcgtgaccgccctgagcatcctgctgagaggcaccgtgcacgagaagctgagatggaccttcaacctgtacgacatcaacaaggacggctacatcaacaaggaggagatgatggacatcgtgaaggccatctacgacatgatgggcaagtacacctaccccgtgctgaaggaggacacccccagacagcacgtggacgtgttcttccagaagatggacaagaacaaggacggcatcgtgaccctggacgagttcctggagagctgccaggaggacgacaacatcatgagaagcctgcagctgttccagaacgtgatgtag

SEQ ID NO: 180890 - DNA, 2014 bp, Artificial Sequence
  derived and/or modified sequence
gctggcagcaggcagcaggcagcaggcgggcgcgctgtggctccgcgccgcgcggtccgggctctgttcattcatgattggtactcggccctccgagacccagcccgagcgcagggaggggagccgagtgtgcggcaggaggggcgggcggacggcggctcccgcaccgcacgcggcgctggctcggcagcctcggccgggcggccgctctggccccgtgtccagtgccaggcaggcttcagggcaccgtcctcggccctgggcgagggaaccgccgggccgggtcctcgcgcggggaagcggttccgaaggctcgcggggagcggctagccctgagtccctgcatgtgcggggctgaagaaggaagccagaagcctcctagcctcgcctccacgcttgctgaataccaagctgcaggcgagctgccgggcgcttttctctcctccaattcagagtagacaaaccacggggatttctttccagggtaggggaggggccgggcccggggtcccaactcgcactcaagtcttcgctgccatgggggccgtcatgggcaccttctcatctctgcaaaccaaacaaaggcgaccctcgaaagataagattgaagatgagctggagatgaccatggtttgccatcggcccgagggactggagcagctcgaggcccagaccaacttcaccaagagggagctgcaggtcctttatcgaggcttcaaaaatgagtgccccagtggtgtggtcaacgaagacacattcaagcagatctatgctcagtttttccctcatggagatgccagcacgtatgcccattacctcttcaatgccttcgacaccactcagacaggctccgtgaagttcgaggactttgtaaccgctctgtcgattttattgagaggaactgtccacgagaaactaaggtggacatttaatttgtatgacatcaacaaggacggatacataaacaaagaggagatgatggacattgtcaaagccatctatgacatgatggggaaatacacatatcctgtgctcaaagaggacactccaaggcagcatgtggacgtcttcttccagaaaatggacaaaaataaagatggcatcgtaactttagatgaatttcttgaatcatgtcaggaggacgacaacatcatgaggtctctccagctgtttcaaaatgtcatgtaactggtgacactcagccattcagctctcagagacattgtactaaacaaccaccttaacaccctgatctgcccttgttctgattttacacaccaactcttgggacagaaacaccttttacactttggaagaattctctgctgaagactttctatggaacccagcatcatgtggctcagtctctgattgccaactcttcctctttcttcttcttgagagagacaagatgaaatttgagtttgttttggaagcatgctcatctcctcacactgctgccctatggaaggtccctctgcttaagcttaaacagtagtgcacaaaatatgctgcttacgtgcccccagcccactgcctccaagtcaggcagaccttggtgaatctggaagcaagaggacctgagccagatgcacaccatctctgatggcctcccaaaccaatgtgcctgtttctcttcctttggtgggaagaatgagagttatccagaacaattaggatctgtcatgaccagattgggagagccagcacctaacatatgtgggataggactgaattattaagcatgatattgtctgatgacccaaactgcccatgtcatttgtttccagaaacgaggaccaataattctctcacactggcatttgtgctggtagtacaagtcctttaatatgtccaggaagggagccattgcccagtggtccatatctccaccacatcccctgcttgagcccagcgctgcatgtccctcccaagaagtccagaatgcctgcaaattgctgtaattttataccatgttctaaccaataaacagaactatttcttacactctcaa

SEQ ID NO: 180891 - DNA, 651 bp, Artificial Sequence
  derived and/or modified sequence
atgggggccgttatgggtacattcagcagcctccagaccaagcagagacggccttcaaaagataagattgaggatgaactcgagatgaccatggtttgccatagaccggagggtcttgaacaactggaggcccagactaactttactaaaagggaactgcaggttctctaccgcggctttaagaacgagtgcccatctggggtcgtgaacgaagacactttcaaacagatctacgcgcagttctttcctcacggagatgcttctacatacgcacattatctctttaacgcctttgacacaacgcagaccggttccgttaagttcgaggactttgtcaccgcgctgtctattctgttacgggggacagtgcatgaaaaacttaggtggacatttaacttgtacgatattaacaaagatgggtacatcaacaaagaggaaatgatggacattgtcaaagcaatatatgatatgatgggtaaatatacttatccggtcctaaaagaggacactccccggcaacacgtggacgtcttttttcagaaaatggacaaaaataaggacggtatagtgacgctcgacgagtttctggagtcttgtcaggaggacgataacataatgagaagccttcaactcttccaaaacgtcatgtag

SEQ ID NO: 180892 - DNA, 651 bp, Artificial Sequence
  derived and/or modified sequence
atgggtgctgtgatggggacctttagttcattgcaaaccaaacagagacgcccatccaaggacaagatagaagatgaacttgagatgacaatggtgtgccatcgccctgaggggcttgagcagctggaagctcaaacgaatttcacaaaacgtgagttacaggtgttgtacagaggttttaagaacgagtgtcctagtggcgttgtaaatgaggatacgttcaaacagatctatgcacaattttttccacacggggacgcaagtacctacgcccactatctgtttaatgcttttgatacgacacagactggatctgtcaagtttgaggatttcgtgacagccttaagcatcctgctgaggggaacagtgcacgagaagttgcgctggacttttaacttatacgatattaacaaagacggttacatcaataaggaagagatgatggatattgtcaaagccatctacgatatgatgggaaagtacacatacccagttctgaaggaggatacccctcgtcagcacgtcgacgttttcttccagaagatggacaaaaataaggacggaatagtgactctcgacgagttcctggaatcttgtcaggaggacgacaatataatgcggagcctgcaactcttccaaaatgtcatgtag

SEQ ID NO: 180893 - DNA, 651 bp, Artificial Sequence
  derived and/or modified sequence
atgggcgctgtgatgggcaccttcagcagcctgcagaccaagcagaggcggcccagcaaggacaagattgaagatgagctggagatgaccatggtgtgccacaggcctgagggcctggagcagctggaggcccagaccaacttcaccaagcgggagctgcaggtgctgtaccggggcttcaagaatgaatgtcccagcggcgtggtgaatgaagacaccttcaagcagatctatgcccagttcttcccccatggagatgccagcacctacgcccactacctgttcaatgcctttgacaccacccagacaggctctgtgaagtttgaagattttgtgacagccctgagcatcctgctgcggggcaccgtgcatgagaagctgcgctggaccttcaacctgtatgacatcaacaaggatggctacatcaacaaggaggagatgatggacatcgtgaaggccatctatgacatgatgggcaagtacacctaccctgtgctgaaggaggacaccccccggcagcacgtggatgtgttcttccagaagatggacaagaacaaggatggcatcgtgaccctggatgagttcctggagagctgccaggaggatgacaacatcatgaggagcctgcagctgttccagaatgtgatgtag

SEQ ID NO: 180894 - DNA, 651 bp, Artificial Sequence
  derived and/or modified sequence
atgggcgccgtgatgggcaccttcagcagcctgcagaccaagcagagacggccatcgaaggacaaaattgaagacgagctggagatgacgatggtttgtcataggcccgagggccttgagcagctggaagcccagaccaatttcaccaagagggaacttcaggtgctctatcgcggctttaagaacgaatgcccatcaggggtggtgaacgaggacacgttcaagcagatctatgcgcaattctttccacacggggacgcctccacctatgcccactatttatttaatgcctttgacaccacccaaacaggttccgtgaagtttgaggacttcgttaccgcacttagcatactgctgcgcggtaccgtgcacgaaaagctgaggtggacattcaacttgtatgatatcaacaaagatgggtacatcaataaagaggagatgatggacatcgtcaaggctatctatgatatgatgggaaagtatacataccctgtactgaaagaggatactccccgacagcatgtggatgtgttctttcagaagatggacaagaacaaagacggcatcgtgaccctggacgagttcctggaatcttgtcaggaagacgataacatcatgaggagccttcagctgtttcaaaacgtcatgtag

SEQ ID NO: 180895 - DNA, 651 bp, Artificial Sequence
  derived and/or modified sequence
atgggcgccgtgatgggcaccttcagcagcctgcagaccaagcagcggcgcccttccaaagacaaaatcgaggacgaacttgaaatgactatggtctgtcatagacctgagggactcgaacagttagaggcccagaccaacttcaccaagcgggagctgcaagtgctgtaccggggttttaaaaatgagtgtcccagcggcgtagtaaatgaggatacctttaagcagatttatgcccagttttttccacacggagacgcctccacctacgctcattatctttttaacgccttcgataccacacagaccgggtcggtcaagttcgaggattttgtgactgcattatctatactcttgcggggcactgttcacgagaagctccggtggacctttaatctgtacgacatcaacaaggacggctatattaacaaggaggaaatgatggatatcgtgaaggcaatatacgatatgatggggaaatacacttatcctgttctgaaagaagacacccccagacagcatgtggacgtttttttccagaagatggataagaataaggatggaattgtgacgctggatgagttcttggagtcttgtcaagaagacgataatatcatgcgtagtctgcagctgtttcaaaatgtcatgtag

SEQ ID NO: 180896 - DNA, 2004 bp, Artificial Sequence
  derived and/or modified sequence
caggcagcaggcagcaggcgggcgcgctgtggctccgcgccgcgcggtccgggctctgttcattcatgattggtactcggccctccgagacccagcccgagcgcagggaggggagccgagtgtgcggcaggaggggcgggcggacggcggctcccgcaccgcacgcggcgctggctcggcagcctcggccgggcggccgctctggccccgtgtccagtgccaggcaggcttcagggcaccgtcctcggccctgggcgagggaaccgccgggccgggtcctcgcgcggggaagcggttccgaaggctcgcggggagcggctagccctgagtccctgcatgtgcggggctgaagaaggaagccagaagcctcctagcctcgcctccacgcttgctgaataccaagctgcaggcgagctgccgggcgcttttctctcctccaattcagagtagacaaaccacggggatttctttccagggtaggggaggggccgggcccggggtcccaactcgcactcaagtcttcgctgccatgggggccgtcatgggcaccttctcatctctgcaaaccaaacaaaggcgaccctcgaaagataagattgaagatgagctggagatgaccatggtttgccatcggcccgagggactggagcagctcgaggcccagaccaacttcaccaagagggagctgcaggtcctttatcgaggcttcaaaaatgagtgccccagtggtgtggtcaacgaagacacattcaagcagatctatgctcagtttttccctcatggagatgccagcacgtatgcccattacctcttcaatgccttcgacaccactcagacaggctccgtgaagttcgaggactttgtaaccgctctgtcgattttattgagaggaactgtccacgagaaactaaggtggacatttaatttgtatgacatcaacaaggacggatacataaacaaagaggagatgatggacattgtcaaagccatctatgacatgatggggaaatacacatatcctgtgctcaaagaggacactccaaggcagcatgtggacgtcttcttccagaaaatggacaaaaataaagatggcatcgtaactttagatgaatttcttgaatcatgtcaggaggacgacaacatcatgaggtctctccagctgtttcaaaatgtcatgtaactggtgacactcagccattcagctctcagagacattgtactaaacaaccaccttaacaccctgatctgcccttgttctgattttacacaccaactcttgggacagaaacaccttttacactttggaagaattctctgctgaagactttctatggaacccagcatcatgtggctcagtctctgattgccaactcttcctctttcttcttcttgagagagacaagatgaaatttgagtttgttttggaagcatgctcatctcctcacactgctgccctatggaaggtccctctgcttaagcttaaacagtagtgcacaaaatatgctgcttacgtgcccccagcccactgcctccaagtcaggcagaccttggtgaatctggaagcaagaggacctgagccagatgcacaccatctctgatggcctcccaaaccaatgtgcctgtttctcttcctttggtgggaagaatgagagttatccagaacaattaggatctgtcatgaccagattgggagagccagcacctaacatatgtgggataggactgaattattaagcatgatattgtctgatgacccaaactgcccatgtcatttgtttccagaaacgaggaccaataattctctcacactggcatttgtgctggtagtacaagtcctttaatatgtccaggaagggagccattgcccagtggtccatatctccaccacatcccctgcttgagcccagcgctgcatgtccctcccaagaagtccagaatgcctgcaaattgctgtaattttataccatgttctaaccaataaacagaactatttcttacactctc

SEQ ID NO: 180897 - RNA, 651 nt, Artificial Sequence
  derived and/or modified sequence
augggcgcaguuaugggaaccuucucgagccuccaaacgaagcagagacgacccucgaaagacaaaauugaagacgaacuagagaugacuauggugugccaccggccagagggacuggaacagcuggaagcccagaccaauuuuacaaagagggaguuacagguucuguaccgaggcuuuaaaaaugaguguccaucagggguggucaaugaggauaccuuuaaacagauuuaugcucaguucuuuccucacggugaugcguccaccuacgcccacuauuuguuuaacgcuuucgacacuacacagacgggcagugugaaguucgaggacuucguuacagcacucucaauucucuugcgagggaccgugcacgaaaaacuuagguggacauuuaaucuguacgacaucaacaaagacggauacauaaauaaagaggagaugauggacauuguuaaagcaauuuaugauaugaugggcaaauauaccuacccgguucuuaaggaggauacaccucgucagcacgucgacguuuucuuccaaaaaauggacaaaaacaaggacggaaucgugacucuggaugaguuucuugaaagcugccaagaggaugauaacaucaugcguucccuacaacuauuucagaacgugauguag

SEQ ID NO: 180898 - RNA, 651 nt, Artificial Sequence
  derived and/or modified sequence
augggugcagucaugggcacauucucuuccuugcagacaaagcaacguagacccagcaaagacaagauugaggaugagcuugagaugacaauggucugucacaggccugagggacuagagcaacuggaggcccagaccaacuuuaccaagagggagcugcagguuuuguauaggggguucaaaaacgagugcccuaguggagucguuaaugaggauacguuuaaacaaaucuacgcccaguucuuuccacacggagaugcaagcaccuacgcccauuaucuuuuuaaugcuuucgacacuacacagacaggaucaguuaaauucgaggauuucguuacagcccugaguauacuuuuacgagggacuguucacgagaagcugagauggacuuuuaaucuuuacgacauaaacaaagauggcuauaucaauaaggaagaaaugauggacauagugaaggcgaucuaugauaugauggguaaguacaccuauccagucuugaaagaagacacucccagacaacacgucgauguauucuuccagaagauggacaagaacaaagauggaaucgugacucucgaugaauuucuggaguccugccaggaagaugauaacauuaugcggucucugcaacuguuucagaaugugauguag

SEQ ID NO: 180899 - RNA, 651 nt, Artificial Sequence
  derived and/or modified sequence
augggggcugucauggggacuuuuuccagucuacagacaaaacagcgucgcccaucaaaggacaagauagaggacgaacuugaaaugacaaugguaugucacagaccagagggauuggaacagcuagaagcccagacgaacuuuacuaaacgugagcuucagguguuguauagaggguuuaaaaacgaaugcccuaguggaguggucaacgaagauacauuuaagcaaauauacgcucaguuuuuuccccacggagacgcuucaaccuacgcacauuaccuguuuaacgcuuucgauacaacucaaaccggauccgugaaguucgaagauuuugugacagcacucucuauucugcugagaggaaccgugcacgagaaacugagauggaccuucaaucuguaugauauuaacaaggacggauauauuaauaaagaggagaugauggacaucguaaaggcgaucuaugacaugaugggcaaguacacauacccgguccugaaagaagacacgcccagacaacacguggauguauuuuuucaaaagauggauaagaauaaagauggcaucgugacacucgacgaauuccucgaaucuugccaagaggacgauaacauuaugcgaucacuucagcuguuucagaaugucauguag

SEQ ID NO: 180900 - RNA, 651 nt, Artificial Sequence
  derived and/or modified sequence
augggugccguuaugggcacuuuuucaucccugcagacgaagcaacgacgucccucuaaagauaagauugaagaugagcucgagaugacaauggugugucaccggccagagggcuuagagcaguuggaggcucagacuaacuuuacuaaacgcgaacugcaaguccuguauaggggcuuuaagaacgagugcccuuccggaguuguuaaugaagacacauuuaagcagaucuacgcgcaguucuuuccucauggagaugcaucgacauaugcacacuauuuauucaaugcuuuugauaccacacaaacagguucuguaaaguucgaggacuuuguuacggccuugucaauuuuacugcgcggcacaguacacgaaaaauugcguuggacauucaaccuguaugacaucaacaaagacggguacauaaauaaagaggagaugauggacaucgugaaagccauauaugauaugauggggaaguacacuuauccagugcucaaagaagauacccccagacagcauguggauguuuuuuuucagaagauggacaagaacaaagacggaaucguaacccucgacgaauuucucgaaucaugccaggaggaugacaauauaaugagaucccuccagcuguuccagaaugugauguag

SEQ ID NO: 180901 - protein, 656 aa, Artificial Sequence
  derived and/or modified sequence
MEGDGSDPEPPDAGEDSKSENGENAPIYCICRKPDINCFMIGCDNCNEWFHGDCIRITEKMAKAIREWYCRECREKDPKLEIRYRHKKSRERDGNERDSSEPRDEGGGRKRPVPDPDLQRRAGSGTGVGAMLARGSASPHKSSPQPLVATPSQHHQQQQQQIKRSARMCGECEACRRTEDCGHCDFCRDMKKFGGPNKIRQKCRLRQCQLRARESYKYFPSSLSPVTPSESLPRPRRPLPTQQQPQPSQKLGRIREDEGAVASSTVKEPPEATATPEPLSDEDLPLDPDLYQDFCAGAFDDHGLPWMSDTEESPFLDPALRKRAVKVKHVKRREKKSEKKKEERYKRHRQKQKHKDKWKHPERADAKDPASLPQCLGPGCVRPAQPSSKYCSDDCGMKLAANRIYEILPQRIQQWQQSPCIAEEHGKKLLERIRREQQSARTRLQEMERRFHELEAIILRAKQQAVREDEESNEGDSDDTDLQIFCVSCGHPINPRVALRHMERCYAKYESQTSFGSMYPTRIEGATRLFCDVYNPQSKTYCKRLQVLCPEHSRDPKVPADEVCGCPLVRDVFELTGDFCRLPKRQCNRHYCWEKLRRAEVDLERVRVWYKLDELFEQERNVRTAMTNRAGLLALMLHQTIQHDPLTTDLRSSADR

SEQ ID NO: 180902 - DNA, 1971 bp, Artificial Sequence
  derived and/or modified sequence
atggagggtgatgggagcgaccctgaaccacccgacgcgggtgaggactccaagagtgagaatggtgaaaacgcccccatttactgtatatgcagaaaaccagacatcaactgtttcatgattggatgcgacaattgtaatgagtggtttcatggcgactgtattcgaatcaccgaaaagatggctaaagctatcagggaatggtactgtcgtgagtgcagggaaaaagatcccaagctggagattcgctaccgacataaaaagagcagagagagggacggcaatgagagggactcatcagaacccagagacgaggggggagggagaaagagacccgtcccagaccctgacctgcaacgaagggccggatctggcacaggagttggtgccatgcttgccagaggcagcgctagccctcataagagctcccctcagccactcgtggctacgccgagccaacaccaccaacagcagcagcagcagataaagcgcagcgccaggatgtgcggagaatgtgaagcgtgccgtcgcaccgaggactgcggccattgtgacttttgtagagatatgaaaaaattcggcgggcctaacaaaatccggcagaagtgtagattgcggcagtgccagctgagggcacgagagtcttacaagtattttcccagcagcctcagccctgttaccccatctgagtccctgccacgcccccggcggcctctgcccactcagcagcagccgcaacctagtcagaaacttggccggattcgggaggacgaaggcgcagtggcctcatccaccgttaaggaaccacctgaagctaccgccacacctgaaccattgagcgatgaagacctgccgctggaccccgatctctaccaggatttctgcgctggagcctttgatgatcatggtttaccctggatgtctgacactgaggaatcaccatttttggatcccgcgctgcgcaagagggcggtgaaggttaaacacgtcaaacgtcgtgagaaaaaatcggaaaaaaaaaaagaagagcgctacaaacggcatcgacagaaacaaaagcacaaagataaatggaagcatcctgaacgcgccgatgcgaaggacccagccagcctgccacagtgcttgggacctggatgcgttcgcccggcacagccatcaagcaagtattgttcagatgattgcggcatgaaactggcagcaaatagaatttacgagatattgccacagagaatacaacaatggcagcagtccccttgcattgcagaggaacacggcaagaagctgttagagcgaattcgacgggagcagcagagtgctcgaacccgcctgcaggagatggagagaaggttccacgaactagaggccattatcttacgcgccaagcaacaggcagtccgagaggacgaggaatccaacgagggagattcagacgatactgatctgcagatcttctgcgtcagctgtgggcacccgattaaccctagggtggccctacggcatatggaacgctgctatgcaaaatacgagagccagacttcttttggatcaatgtaccccaccaggatcgaaggggcgactaggcttttctgtgatgtgtataacccccagtcaaagacgtattgtaagaggctgcaagttctatgccctgagcacagtagggaccccaaagttcctgcagatgaggtgtgtggatgccctctagtgagggacgtctttgaactgaccggcgacttttgccgacttcccaagcgtcagtgtaataggcactattgttgggagaaattaaggagagctgaggtggatctcgagagggtgcgggtatggtacaagctggacgaactgttcgaacaggaacgcaatgtcaggactgctatgaccaatcgggccggactcctggctctgatgctgcaccagaccatccagcacgacccactgaccaccgacctacgatcctctgcggatcgctag

SEQ ID NO: 180903 - DNA, 1971 bp, Artificial Sequence
  derived and/or modified sequence
atggagggagatggcagtgaccctgagcccccagatgctggggaggacagcaagtcagaaaatggagaaaatgcccccatctactgcatctgcaggaagccagacatcaactgcttcatgattggctgtgacaactgcaatgagtggttccatggagactgcatccgcatcacagagaagatggccaaggccatccgggagtggtactgccgggagtgccgggagaaggaccccaagctggagatccgctaccgccacaagaagagccgggagagagatggaaatgaaagagacagcagcgagcccagagatgagggcggcggcaggaagaggcctgtgcctgaccctgacctgcagaggcgggccggcagcggcaccggggtgggcgccatgctggcccggggcagcgccagcccccacaagagcagcccccagcccctggtggccacccccagccagcaccaccagcagcagcagcagcagatcaagaggtctgccaggatgtgtggagaatgtgaggcctgcagaagaacagaggactgtggccactgtgacttctgccgggacatgaagaagtttggaggccccaacaagatccggcagaagtgccgcctgcggcagtgccagctgcgggcccgggagagctacaagtacttccccagcagcctgagccctgtgaccccatctgagagcctgccccggccccggcggcccctgcccacccagcagcagccccagcccagccagaagctgggccgcatccgggaggatgaaggagctgtggccagcagcacagtgaaggagcccccagaggccacagccaccccagagcccctgagtgatgaggacctgcccctggaccctgacctgtaccaggacttctgtgccggggcctttgatgaccacggcctgccctggatgtctgacacagaggagagccccttcctggaccctgccctgaggaagagagctgtgaaggtgaagcacgtgaagaggcgggagaagaagtctgagaagaagaaggaggagcgctacaagaggcaccggcagaagcagaagcacaaggacaagtggaagcaccctgagcgggcagatgccaaggaccctgccagcctgccccagtgcctgggccctggctgtgtgcggcctgcccagcccagcagcaagtactgcagtgatgactgtggcatgaagctggccgccaaccgcatctatgagatcctgccccagaggatccagcagtggcagcagagcccctgcatcgccgaggagcacggcaagaagctgctggagcgcatccggcgggagcagcagagcgcccggacccggctgcaggagatggagcggcgcttccacgagctggaggccatcatcctgcgggccaagcagcaggccgtgcgggaggatgaggagagcaatgaaggagacagtgatgacacagacctgcagatcttctgtgtgtcctgtggccaccccatcaacccccgggtggccctgcggcacatggagcgctgctacgccaagtatgagagccagaccagctttggctccatgtaccccaccagaattgaaggagccaccaggctcttctgtgatgtgtacaacccccagagcaagacctactgcaagaggctgcaggtgctgtgcccagagcacagccgggaccccaaggtgcctgcagatgaggtgtgtggctgccccctggtgagagatgtgtttgagctgaccggggacttctgccgcctgcccaagaggcagtgcaacagacactactgctgggagaagctgcggcgggcagaggtggacctggagcgggtgcgggtgtggtacaagctggatgagctgtttgagcaggagagaaatgtgaggacagccatgaccaacagagctggcctgctggccctgatgctgcaccagaccatccagcacgaccccctgaccacagacctgcggagcagcgctgacagatag

SEQ ID NO: 180904 - DNA, 1971 bp, Artificial Sequence
  derived and/or modified sequence
atggagggcgacggcagcgaccccgagccccccgacgccggcgaggactctaagtcagagaacggcgagaatgcacctatctactgtatttgcagaaaacccgatatcaattgtttcatgatcggctgtgataattgcaatgagtggtttcacggcgactgtatccgcatcacagaaaaaatggctaaggcgattcgcgagtggtactgccgggagtgtagggagaaggatcctaaactagaaatccgctacagacacaagaaatcccgagaaagggatgggaatgaacgagacagcagtgaacctagagatgagggaggaggacggaaaaggccagtcccagaccctgatctgcagaggcgggcagggagcggcaccggagtgggcgccatgctggcccgcgggagcgcctcccctcacaaatccagtccccagcctctggtggcgaccccctctcagcatcatcagcagcagcagcagcagattaaacgcagtgcccgcatgtgcggcgagtgtgaagcttgtcgccgcaccgaagactgtggccattgcgatttctgccgcgatatgaaaaaatttggcggtcccaacaaaattaggcaaaagtgtcgactgcggcagtgccagctcagagcccgagagtcctataaatacttcccttcctctctctcacctgtgaccccctctgaaagtctcccccgtcctagaaggccacttccaacccaacagcagccccagcccagccagaaactaggacgcatcagggaggacgagggcgcggttgcaagttcaacggtcaaagagcccccagaggccaccgccacaccagaacccctcagcgatgaagatctccccctagaccccgatctgtaccaagatttctgtgctggggcctttgacgatcacggtctaccctggatgtcagacaccgaggaatctccatttcttgatcccgccctgcgaaaaagggccgtgaaggtaaagcacgtgaaaagacgagaaaagaagtcagagaaaaagaaggaagaaaggtacaaaaggcatcgccagaagcagaaacacaaggataagtggaaacaccccgagcgcgccgatgccaaagatcctgccagcctgccgcagtgcttagggccaggctgcgtgaggcccgcacaacccagctccaaatactgtagtgacgactgtgggatgaagctggcggctaatcgaatttacgagatcctgccccagagaatccaacagtggcagcagagcccatgcattgcagaagaacacggtaagaagctgttggagcggattaggcgggagcagcagtctgctcggactagacttcaggaaatggagaggcgcttccatgagctcgaggcaattatcttgcgagcgaagcagcaggccgtcagggaggatgaggagagtaacgagggagattctgatgataccgatctgcagatcttttgtgtgtcttgtggccacccaattaatccccgcgtggctcttcgacacatggaacggtgctacgctaagtatgagagccagacttcctttggcagcatgtatcctactcgtattgaaggagccactcggctattctgtgacgtgtataacccccagtctaagacgtattgcaagaggttacaggtgctgtgtcccgagcactcaagagatcccaaagtgccagcggacgaagtgtgcggttgcccgctcgtcagagacgtcttcgaactgacaggagacttctgtcgtctgccaaaacggcaatgcaacaggcattactgttgggagaagctgcgccgcgccgaggtcgacttggagcgcgtaagagtctggtacaagctagacgagctatttgaacaggagcgaaatgtacgcacagccatgacaaatcgagctggattgctcgccctgatgctgcatcagaccatccagcacgaccccctgaccactgacttaagatctagcgctgaccggtag

SEQ ID NO: 180905 - DNA, 1971 bp, Artificial Sequence
  derived and/or modified sequence
atggaaggcgatggatccgatcccgagcctcccgatgcgggagaggatagtaaatcagaaaatggcgaaaatgcgccaatctactgtatatgcaggaagcccgacatcaattgttttatgatagggtgtgataactgcaatgagtggttccacggcgactgcatccggatcaccgagaaaatggcaaaggcaatcagggaatggtactgccgggaatgtcgtgaaaaggatcccaagctggagataagatatcgacataaaaaatccagagagcgagacggaaacgagcgcgattcaagcgagccccgtgacgaaggagggggaagaaagcgccctgtaccggatcccgatctccaaagacgggctggcagcgggacaggagtgggcgcaatgctggctagaggcagcgccagcccccacaaatctagccctcagcccctggtggccaccccctctcagcaccaccaacagcagcagcagcagatcaagcggagtgcgagaatgtgcggagagtgcgaggcctgtagacgcacagaagattgtggccactgtgacttctgccgcgatatgaaaaaatttggagggccaaataaaatcagacagaaatgccgtctgcgtcagtgccaactgagggcaagggagagctataagtactttccctccagcctgtccccagtgacacctagcgaatcattacccaggcctcgtcgaccattacctacacagcaacaacctcagcctagccaaaagctcggtcgcatcagagaagacgaaggcgctgttgcttcatctacagtgaaagagccacctgaggcgacagcaacgcctgaacctctgtctgatgaggatctccccctggacccagacctctatcaggatttctgtgcgggagcttttgacgaccacggactgccatggatgtcggatactgaggagtcccccttcctggatccagccctgcgcaagcgggcagtgaaagtgaagcacgtgaaaaggcgggagaagaagtctgagaaaaagaaagaagaacgttacaaacgccataggcaaaagcaaaaacataaagacaaatggaagcaccctgagagggccgacgccaaagaccccgcaagtttgccccagtgtttaggaccaggctgcgtgagaccagcccagccctcctctaaatactgtagcgatgattgcggcatgaagttggctgcaaaccgcatctatgaaattctgccccagaggatccaacagtggcagcagtctccatgtattgccgaagagcacggcaaaaagctactagaaaggatccgcagagaacaacaaagtgctcggacccgcctacaggagatggagagaagattccatgaactggaagctatcattctgagggccaagcagcaggctgtgcgcgaagatgaagagtcaaatgaaggggacagtgacgacacagacctccaaatcttttgcgtgagttgtggacaccccattaacccacgtgtggcgctgcgccacatggagcggtgctacgccaagtacgagtctcagaccagctttgggagcatgtaccctactcgtatcgagggggctacaaggctcttctgcgatgtgtataaccctcagtccaagacctactgcaagcgactgcaggtgctttgccccgagcattcccgagacccaaaagtgccagcggatgaagtctgtggctgccctctcgtgcgcgatgtgttcgagctaacaggcgatttctgcagactacctaaacgccaatgtaatcgccattattgctgggagaagctgcgacgagctgaagtcgacctggagagggtaagagtctggtacaaactcgacgagttgtttgaacaggaacggaacgttcgtactgcaatgacaaatagggccggtcttctcgctctgatgctgcatcagaccattcagcacgacccactcacaaccgacctgcgatcatccgcagatcgctag

SEQ ID NO: 180906 - DNA, 2936 bp, Artificial Sequence
  derived and/or modified sequence
tgaagtcggagacgacagaggaactggtttcctccgccccgcaaggcacacagcctgccgacgccccattaatacatgtggaaggggaaagagactgaatggaggaatgaatacaacttgatccaggtcgtgcttcggaagcggtcactttacctgtgaacctctctgcctgacaaacgggcaatgtacggaatcaaccaccaagatggcggcgcccgtgaagaatccgcaattaggtcgccgtcatatgtcgcctaggaacgtacggaattcgacccacgtacggaatcggattccaagatgacggcatctatgaggaagtcacgcagtaggtgcagccatgttgcctgtacgtcgaggccgtacaagcagccgccgtacggactctactgacaaggtggcggcgccctcgggaaagccacattagagcgcggccatgttcccggcgaacatatggattcggccaccatacggatacgataagcaagatggcggcgcctgaggggtcttgggggctctaggccggccacctactggtttgcagcggagacgacgcatggggcctgcgcaataggagtacgctgcctgggaggcgtgactagaagcggaagtagttgtgggcgcctttgcaaccgcctgggacgccgccgagtggtctgtgcaggttcgcgggtcgctggcgggggtcgtgagggagtgcgccgggagcggagatatggagggagatggttcagacccagagcctccagatgccggggaggacagcaagtccgagaatggggagaatgcgcccatctactgcatctgccgcaaaccggacatcaactgcttcatgatcgggtgtgacaactgcaatgagtggttccatggggactgcatccggatcactgagaagatggccaaggccatccgggagtggtactgtcgggagtgcagagagaaagaccccaagctagagattcgctatcggcacaagaagtcacgggagcgggatggcaatgagcgggacagcagtgagccccgggatgagggtggagggcgcaagaggcctgtccctgatccagacctgcagcgccgggcagggtcagggacaggggttggggccatgcttgctcggggctctgcttcgccccacaaatcctctccgcagcccttggtggccacacccagccagcatcaccagcagcagcagcagcagatcaaacggtcagcccgcatgtgtggtgagtgtgaggcatgtcggcgcactgaggactgtggtcactgtgatttctgtcgggacatgaagaagttcgggggccccaacaagatccggcagaagtgccggctgcgccagtgccagctgcgggcccgggaatcgtacaagtacttcccttcctcgctctcaccagtgacgccctcagagtccctgccaaggccccgccggccactgcccacccaacagcagccacagccatcacagaagttagggcgcatccgtgaagatgagggggcagtggcgtcatcaacagtcaaggagcctcctgaggctacagccacacctgagccactctcagatgaggacctacctctggatcctgacctgtatcaggacttctgtgcaggggcctttgatgaccatggcctgccctggatgagcgacacagaagagtccccattcctggaccccgcgctgcggaagagggcagtgaaagtgaagcatgtgaagcgtcgggagaagaagtctgagaagaagaaggaggagcgatacaagcggcatcggcagaagcagaagcacaaggataaatggaaacacccagagagggctgatgccaaggaccctgcgtcactgccccagtgcctggggcccggctgtgtgcgccccgcccagcccagctccaagtattgctcagatgactgtggcatgaagctggcagccaaccgcatctacgagatcctcccccagcgcatccagcagtggcagcagagcccttgcattgctgaagagcacggcaagaagctgctcgaacgcattcgccgagagcagcagagtgcccgcactcgccttcaggaaatggaacgccgattccatgagcttgaggccatcattctacgtgccaagcagcaggctgtgcgcgaggatgaggagagcaacgagggtgacagtgatgacacagacctgcagatcttctgtgtttcctgtgggcaccccatcaacccacgtgttgccttgcgccacatggagcgctgctacgccaagtatgagagccagacgtcctttgggtccatgtaccccacacgcattgaaggggccacacgactcttctgtgatgtgtataatcctcagagcaaaacatactgtaagcggctccaggtgctgtgccccgagcactcacgggaccccaaagtgccagctgacgaggtatgcgggtgcccccttgtacgtgatgtctttgagctcacgggtgacttctgccgcctgcccaagcgccagtgcaatcgccattactgctgggagaagctgcggcgtgcggaagtggacttggagcgcgtgcgtgtgtggtacaagctggacgagctgtttgagcaggagcgcaatgtgcgcacagccatgacaaaccgcgcgggattgctggccctgatgctgcaccagacgatccagcacgatcccctcactaccgacctgcgctccagtgccgaccgctgagcctcctggcccggaccccttacaccctgcattccagatgggggagccgcccggtgcccgtgtgtccgttcctccactcatctgtttctccggttctccctgtgcccatccaccggttgaccgcccatctgcctttatcagagggactgtccccgtcgacatgttcagtgcctggtggggctgcggagtccactcatccttgcctcctctccctgggttttgttaataaaattttgaagaaaccaaggaa

SEQ ID NO: 180907 - DNA, 1971 bp, Artificial Sequence
  derived and/or modified sequence
atggagggcgacggcagcgaccccgagccccccgacgccggcgaggacagcaagagcgagaacggcgagaacgcccccatctactgcatctgcagaaagcccgacatcaactgcttcatgatcggctgcgacaactgcaacgagtggttccacggcgactgcatcagaatcaccgagaagatggccaaggccatcagagagtggtactgcagagagtgcagagagaaggaccccaagctggagatcagatacagacacaagaagagcagagagagagacggcaacgagagagacagcagcgagcccagagacgagggcggcggcagaaagagacccgtgcccgaccccgacctgcagagaagagccggcagcggcaccggcgtgggcgccatgctggccagaggcagcgccagcccccacaagagcagcccccagcccctggtggccacccccagccagcaccaccagcagcagcagcagcagatcaagagaagcgccagaatgtgcggcgagtgcgaggcctgcagaagaaccgaggactgcggccactgcgacttctgcagagacatgaagaagttcggcggccccaacaagatcagacagaagtgcagactgagacagtgccagctgagagccagagagagctacaagtacttccccagcagcctgagccccgtgacccccagcgagagcctgcccagacccagaagacccctgcccacccagcagcagccccagcccagccagaagctgggcagaatcagagaggacgagggcgccgtggccagcagcaccgtgaaggagccccccgaggccaccgccacccccgagcccctgagcgacgaggacctgcccctggaccccgacctgtaccaggacttctgcgccggcgccttcgacgaccacggcctgccctggatgagcgacaccgaggagagccccttcctggaccccgccctgagaaagagagccgtgaaggtgaagcacgtgaagagaagagagaagaagagcgagaagaagaaggaggagagatacaagagacacagacagaagcagaagcacaaggacaagtggaagcaccccgagagagccgacgccaaggaccccgccagcctgccccagtgcctgggccccggctgcgtgagacccgcccagcccagcagcaagtactgcagcgacgactgcggcatgaagctggccgccaacagaatctacgagatcctgccccagagaatccagcagtggcagcagagcccctgcatcgccgaggagcacggcaagaagctgctggagagaatcagaagagagcagcagagcgccagaaccagactgcaggagatggagagaagattccacgagctggaggccatcatcctgagagccaagcagcaggccgtgagagaggacgaggagagcaacgagggcgacagcgacgacaccgacctgcagatcttctgcgtgagctgcggccaccccatcaaccccagagtggccctgagacacatggagagatgctacgccaagtacgagagccagaccagcttcggcagcatgtaccccaccagaatcgagggcgccaccagactgttctgcgacgtgtacaacccccagagcaagacctactgcaagagactgcaggtgctgtgccccgagcacagcagagaccccaaggtgcccgccgacgaggtgtgcggctgccccctggtgagagacgtgttcgagctgaccggcgacttctgcagactgcccaagagacagtgcaacagacactactgctgggagaagctgagaagagccgaggtggacctggagagagtgagagtgtggtacaagctggacgagctgttcgagcaggagagaaacgtgagaaccgccatgaccaacagagccggcctgctggccctgatgctgcaccagaccatccagcacgaccccctgaccaccgacctgagaagcagcgccgacagatag

SEQ ID NO: 180908 - protein, 201 aa, Artificial Sequence
  derived and/or modified sequence
MARSVRVLVDMDGVLADFEAGLLRGFRRRFPEEPHVPLEQRRGFLAREQYRALRPDLADKVASVYEAPGFFLDLEPIPGALDAVREMNDLPDTQVFICTSPLLKYHHCVGEKYRWVEQHLGPQFVERIILTRDKTVVLGDLLIDDKDTVRGQEETPSWEHILFTCCHNRHLVLPPTRRRLLSWSDNWREILDSKRGAAQRE

SEQ ID NO: 180909 - DNA, 606 bp, Artificial Sequence
  derived and/or modified sequence
atggcacgatccgtgcgagtcctcgtggacatggacggtgttctcgccgacttcgaggcgggcctgctgcgtggtttccggcggcgctttcccgaggagccccatgtgcccctggagcagagaaggggattcctggcacgcgagcagtaccgcgccttgagaccggatttagctgacaaggtggcgtccgtatatgaggcacccgggtttttcctcgacctcgaacctattcctggtgcgttagatgccgtgcgcgagatgaatgacctccccgacactcaagtctttatatgcactagccctctgttgaaataccaccactgtgtgggagaaaagtatagatgggtggaacagcacttaggcccgcaatttgtggagcgcattatcttgacacgggataagacagtggtgttaggggatctcctaattgatgacaaggatactgtgcggggacaggaggaaactcctagctgggaacacattctatttacctgctgccataataggcatctcgtgctaccgcccacacgccggcggttactctcgtggagcgacaattggcgcgaaattctcgattcaaagagaggcgccgctcagcgggaatag

SEQ ID NO: 180910 - DNA, 606 bp, Artificial Sequence
  derived and/or modified sequence
atggcccggtctgtgcgggtgctggtggacatggatggagtgctggccgactttgaggccggcctgctgcggggcttcagaagacgcttccctgaggagccccacgtgcccctggagcagaggcggggcttcctggcccgggagcagtaccgggccctgcggccagacctggccgacaaggtggcctctgtgtatgaggcccctggcttcttcctggacctggagcccatccctggggccctggatgctgtgcgggagatgaatgacctgcctgacacccaggtgttcatctgcaccagccccctgctgaagtaccaccactgtgtgggggagaagtaccgctgggtggagcagcacctgggcccccagtttgtggagcgcatcatcctgacccgggacaagacagtggtgctgggggacctgctgattgatgacaaggacacagtgcggggccaggaggagacccccagctgggagcacatcctcttcacctgctgccacaacagacacctggtgctgccccccacccggcggcggctgctgtcctggagcgacaactggagggagatcctggacagcaagagaggagctgcccagcgggagtag

SEQ ID NO: 180911 - DNA, 606 bp, Artificial Sequence
  derived and/or modified sequence
atggcccggagcgtgcgggtgctggtggacatggacggcgtgctggcggactttgaggccggactgctccgcggtttcagacggcgctttcctgaggaaccacatgttccccttgaacaacgacgcggcttcctggcgagggaacaataccgcgccctgagaccagacttagcggataaggtggcttcggtctacgaagccccaggattctttttggatttagaaccaattccaggcgcgctcgatgctgtcagggaaatgaacgacctccctgacactcaagtgtttatatgcacctcacccctgctgaagtatcaccattgtgttggtgagaaataccgctgggtggagcagcacctcgggccgcagttcgtggaacgaatcatccttacacgggataagactgtggtgctgggagacctattaatagacgataaagacaccgtacgagggcaagaggagactccttcctgggaacacattcttttcacctgttgccataataggcacctagtgctgcctccaaccaggcgaaggctgctctcctggagcgacaattggagagagatattagacagtaaacggggtgccgctcagcgggagtag

SEQ ID NO: 180912 - DNA, 606 bp, Artificial Sequence
  derived and/or modified sequence
atggccagaagtgtcagggtgctagtggatatggatggtgtactggccgacttcgaggcaggactgttaagaggttttaggcgcaggtttccagaggagcctcacgtgcctctggaacagaggaggggctttctggcccgagagcagtatagggctttgcgcccagatctggcagacaaggttgcctcagtgtacgaggctccaggtttcttcctggatctggagccaattcccggagcccttgacgcagttcgggagatgaatgaccttcccgatacacaagttttcatctgtacgagtccgctgttgaaatatcaccattgcgttggtgagaagtataggtgggtggagcaacacctgggacctcagttcgtggagcgtatcatcctgactcgcgacaagacagtagtgcttggcgacctcttgattgacgataaggataccgtcaggggtcaggaagaaacacctagttgggagcacattctctttacctgctgtcataatcgccacctcgtgctgcccccaacgaggaggcgactgctgtcctggtcagacaactggcgggagatcctggactccaaaagaggagcggctcagagggagtag

SEQ ID NO: 180913 - DNA, 940 bp, Artificial Sequence
  derived and/or modified sequence
agcagcgctccctccgcttccggccgagcccgcgccccccagaccccgagagctcgcagctccggcccggcggcgatggcgcggagcgtgcgcgtgctggtggacatggacggcgtcctggccgacttcgaggccggcctcctgcggggcttccgccgccgcttccctgaggagccgcacgtgccgctggagcaacgccgcggcttcctggcccgcgagcagtaccgcgccctgcggcccgacctggcggataaagtggccagtgtgtacgaagccccgggctttttcctggacctggagcccatcccgggagccttggacgctgtgcgggagatgaacgacctaccggacacgcaggtcttcatctgcaccagccccctgctgaagtaccaccactgtgtgggtgagaagtaccgctgggtggagcagcacctggggccccagttcgtagaacgaattatcctgacaagggacaagacggtggtcttgggggacctgctcattgatgacaaggacacagttcgaggccaggaggagaccccaagctgggagcacatcttgttcacctgctgccacaatcggcacctggtcctgcccccgacaaggagacggctgctctcctggagtgacaactggagggagatcttagatagcaagcgcggagctgcgcagcgggaatgagcggggatgccgcgggcagcagctggagctaaaggaagggcaggcccacaggggccaccgcagagccgagtcggggcggcatcgtgctggtgcctctggccccgtggagtggagcaggcagataccgttaagcgctgtgctaccgggccccaggcccagccacccggtacctcccgagaggctgtccctggaccctggctggcatggaaatacagtgggaaaaccagtcgggacctttaataaaagaccttggctttct

SEQ ID NO: 180914 - DNA, 606 bp, Artificial Sequence
  derived and/or modified sequence
atggccagaagcgtgagagtgctggtggacatggacggcgtgctggccgacttcgaggccggcctgctgagaggcttcagaagaagattccccgaggagccccacgtgcccctggagcagagaagaggcttcctggccagagagcagtacagagccctgagacccgacctggccgacaaggtggccagcgtgtacgaggcccccggcttcttcctggacctggagcccatccccggcgccctggacgccgtgagagagatgaacgacctgcccgacacccaggtgttcatctgcaccagccccctgctgaagtaccaccactgcgtgggcgagaagtacagatgggtggagcagcacctgggcccccagttcgtggagagaatcatcctgaccagagacaagaccgtggtgctgggcgacctgctgatcgacgacaaggacaccgtgagaggccaggaggagacccccagctgggagcacatcctgttcacctgctgccacaacagacacctggtgctgccccccaccagaagaagactgctgagctggagcgacaactggagagagatcctggacagcaagagaggcgccgcccagagagagtag

SEQ ID NO: 180915 - protein, 581 aa, Artificial Sequence
  derived and/or modified sequence
MVFRNVGRPPEEEDVEAAPEPGPSELLCPRHRCALDPKALPPGLALERTWGPAAGLEAQLAALGLGQPAGPGVKTVGGGCCPCPCPPQPPPPQPQPPAAAPQAGEDPTETSDALLVLEGLESEAESLETNSCSEEELSSPGRGGGGGGRLLLQPPGPELPPVPFPLQDLVPLGRLSRGEQQQQQQQQPPPPPPPPGPLRPLAGPSRKGSFKIRLSRLFRTKSCNGGSGGGDGTGKRPSGELAASAASLTDMGGSAGRELDAGRKPKLTRTQSAFSPVSFSPLFTGETVSLVDVDISQRGLTSPHPPTPPPPPRRSLSLLDDISGTLPTSVLVAPMGSSLQSFPLPPPPPPHAPDAFPRIAPIRAAESLHSQPPQHLQCPLYRPDSSSFAASLRELEKCGWYWGPMNWEDAEMKLKGKPDGSFLVRDSSDPRYILSLSFRSQGITHHTRMEHYRGTFSLWCHPKFEDRCQSVVEFIKRAIMHSKNGKFLYFLRSRVPGLPPTPVQLLYPVSRFSNVKSLQHLCRFRIRQLVRIDHIPDLPLPKPLISYIRKFYYYDPQEEVYLSLKEAQLISKQKQEVEPST

SEQ ID NO: 180916 - DNA, 1746 bp, Artificial Sequence
  derived and/or modified sequence
atggtgttcagaaacgtgggcagaccccccgaggaggaggacgtggaggccgcccccgagcccggccccagcgagctgctgtgccccagacacagatgcgccctggaccccaaggccctgccccccggcctggccctggagagaacctggggccccgccgccggcctggaggcccagctggccgccctgggcctgggccagcccgccggccccggcgtgaagaccgtgggcggcggctgctgcccctgcccctgccccccccagcccccccccccccagccccagccccccgccgccgccccccaggccggcgaggaccccaccgagaccagcgacgccctgctggtgctggagggcctggagagcgaggccgagagcctggagaccaacagctgcagcgaggaggagctgagcagccccggcagaggcggcggcggcggcggcagactgctgctgcagccccccggccccgagctgccccccgtgcccttccccctgcaggacctggtgcccctgggcagactgagcagaggcgagcagcagcagcagcagcagcagcagccccccccccccccccccccccccggccccctgagacccctggccggccccagcagaaagggcagcttcaagatcagactgagcagactgttcagaaccaagagctgcaacggcggcagcggcggcggcgacggcaccggcaagagacccagcggcgagctggccgccagcgccgccagcctgaccgacatgggcggcagcgccggcagagagctggacgccggcagaaagcccaagctgaccagaacccagagcgccttcagccccgtgagcttcagccccctgttcaccggcgagaccgtgagcctggtggacgtggacatcagccagagaggcctgaccagcccccacccccccacccccccccccccccccagaagaagcctgagcctgctggacgacatcagcggcaccctgcccaccagcgtgctggtggcccccatgggcagcagcctgcagagcttccccctgcccccccccccccccccccacgcccccgacgccttccccagaatcgcccccatcagagccgccgagagcctgcacagccagcccccccagcacctgcagtgccccctgtacagacccgacagcagcagcttcgccgccagcctgagagagctggagaagtgcggctggtactggggccccatgaactgggaggacgccgagatgaagctgaagggcaagcccgacggcagcttcctggtgagagacagcagcgaccccagatacatcctgagcctgagcttcagaagccagggcatcacccaccacaccagaatggagcactacagaggcaccttcagcctgtggtgccaccccaagttcgaggacagatgccagagcgtggtggagttcatcaagagagccatcatgcacagcaagaacggcaagttcctgtacttcctgagaagcagagtgcccggcctgccccccacccccgtgcagctgctgtaccccgtgagcagattcagcaacgtgaagagcctgcagcacctgtgcagattcagaatcagacagctggtgagaatcgaccacatccccgacctgcccctgcccaagcccctgatcagctacatcagaaagttctactactacgacccccaggaggaggtgtacctgagcctgaaggaggcccagctgatcagcaagcagaagcaggaggtggagcccagcacctag

SEQ ID NO: 180917 - DNA, 1746 bp, Artificial Sequence
  derived and/or modified sequence
atggtgttcagaaacgtcggcagacccccggaggaggaggacgtggaagccgcccccgagccaggaccaagcgagctgctgtgcccaaggcaccggtgcgcacttgatcctaaggcacttccaccaggactggctttggagcgaacctggggccccgcagccgggctcgaagcccagctagccgctcttggcctgggacaacctgccggcccaggcgtgaaaaccgttggggggggatgctgtccttgcccttgccccccccagcctcccccaccccaacctcagcctccggcagcagctccccaagctggtgaagaccctacggaaacctccgatgctctgcttgtcctagaaggcctggagagcgaggctgaaagcctggagacaaattcttgttccgaagaagaacttagttccccaggaaggggtggcggcggcggagggcggctcctgcttcagccccctgggcctgagctgcctcctgtaccctttcccctccaagacctcgtccccctgggtaggctctctagaggcgagcagcagcaacagcagcagcagcagcctccaccacctccccctcccccagggcctctgcgccccctggctggtccgagtcgtaaaggctcttttaaaatccgcctttctcgactgtttcgaacaaagtcctgtaacggcgggtcaggcggcggggacgggacaggaaaacgcccctcaggtgagcttgccgccagtgccgccagtctgacagacatggggggctcggccggaagagagctggatgcaggtagaaagcccaaattgaccagaacacaaagtgcttttagtccagtctcgttcagccctttgtttactggggagaccgtgagcctggtcgacgtcgacatcagccagaggggcctcacaagccctcacccccctacccctccccctcccccaagaagatcgctttcactgttggacgacatctctggaacactgcccacctccgttctggtggcccctatgggttcctcactgcaatcctttccactccctccaccaccgcctccccatgcccctgatgcttttcctagaattgctcctatcagagccgctgaatctctgcactcacagcccccccagcacctccagtgtccactgtaccgccccgacagcagctcctttgccgccagcctccgagagctagaaaagtgtggatggtactgggggccaatgaattgggaggacgccgagatgaaattgaaggggaaaccagatggatccttcctcgtacgtgattccagtgatccgcgatatatcttgtccttgagtttccgcagccaggggattacacaccacaccagaatggagcactatagaggaaccttcagcctgtggtgccaccctaaatttgaggaccggtgtcagagtgttgtggaatttatcaagagagccatcatgcacagcaagaacggaaaatttctgtacttcctgaggagtagagtgccagggttgccaccaactcctgtacagctgctgtaccccgtgagccgtttttcaaatgttaagagcctgcagcatctgtgccgctttagaattcgccaactcgtacgtattgatcacattcccgacttgccgttgcctaaacccctgattagctatataagaaagttttactattatgacccccaggaagaggtttatctgtctctaaaagaagcccagctcatttccaagcagaagcaggaagtggagcccagcacctag

SEQ ID NO: 180918 - DNA, 1746 bp, Artificial Sequence
  derived and/or modified sequence
atggtgtttcgaaatgtggggcggccccccgaagaggaggacgttgaggcagcccccgagccagggccaagcgaactactctgcccccgccacaggtgcgcccttgatcccaaggctttacccccaggccttgcacttgaaaggacatggggcccagccgccggactggaagcccagctggctgctctgggactggggcagcccgccgggccaggagtgaagaccgttggggggggatgctgtccctgtccatgtccccctcaaccgccccccccacagccgcagccgcctgctgccgcaccccaagccggggaggacccaacagaaacatctgatgctttgctggtgctcgaagggctggaaagcgaagctgaatctttggagacaaatagctgcagcgaggaggaactgagttcaccaggcagagggggcggaggtggcggtcgcttactgctccagccacccggtccagaacttcccccagttccctttcctctacaagacctcgtaccactgggccgactaagcaggggagagcagcagcaacagcagcagcagcaaccaccaccgccgcctcccccccctggtcccttgaggcccctcgctggaccatcacgaaaaggcagcttcaagattcgattatcaagactgttccgtaccaagtcctgcaatggggggagtggcgggggtgacggaacagggaaacggcccagcggggaattggcggcaagcgccgcaagcctgaccgatatggggggttctgccggaagggaactcgatgccgggagaaaacccaagctcacaaggacccagagtgccttcagtccagtgtcttttagtccactcttcactggggagaccgtatccctcgtcgatgtcgatatcagccagcgaggacttacttccccgcatccaccaactcccccgcctcccccacggaggagcctgtcattgcttgacgatattagcgggacactacccacttccgtactggtcgcgcccatggggtcctcactgcaatcatttcctttacctcctcctcctccaccacacgcacctgatgcgttcccccgtattgctccaattcgagcagccgagagcctgcactctcagcccccacagcatctgcagtgcccactttacaggccggactcgagttccttcgcagcctctctccgggaactggagaaatgcggatggtattggggcccaatgaactgggaggacgctgagatgaaactcaagggcaaacccgatggcagcttccttgtgcgggactccagcgacccgcggtatatcctctccctttcttttcgctcacaggggattacgcatcacacacgcatggagcactataggggcactttctcactatggtgccacccgaaatttgaagatcggtgccagtctgttgtcgagttcatcaaacgcgccatcatgcactccaagaacggcaagtttttgtactttcttagatcccgggtgcccgggttgccaccaaccccggttcagcttctatacccggtgagccggtttagcaacgttaaatctctgcagcacctgtgcaggttcaggatcagacagctcgtcagaatcgatcacattcccgacctgcccctcccgaagcccctcatctcttacatccgcaaattttattactacgatccccaggaggaagtgtacctgtccctcaaagaagcccaactcatctccaaacaaaaacaggaggtggagccttccacctag

SEQ ID NO: 180919 - DNA, 1746 bp, Artificial Sequence
  derived and/or modified sequence
atggtgttcagaaatgtgggccggcccccagaggaggaggatgtggaggccgcccctgagcccggccccagcgagctgctgtgccccaggcaccgctgtgccctggaccccaaggccctgcccccaggcctggccctggagaggacctggggccctgctgctggcctggaggcccagctggccgccctgggcctgggccagcctgctggccctggggtgaagacagtgggcggcggctgctgcccctgcccctgccccccccagcccccaccaccccagccccagcccccagctgctgccccccaggccggggaggaccccacagagaccagtgatgccctgctggtgctggagggcctggagagcgaggccgagagcctggagaccaacagctgcagcgaggaggagctgagcagccctggccggggcggcggcggcggcggccgcctgctgctgcagcccccaggccctgagctgccccctgtgcccttccccctgcaggacctggtgcccctgggccgcctgagcagaggagagcagcagcagcagcagcagcagcagcccccacctcctcctcctcctcctggccccctgcggcccctggccggccccagcaggaagggcagcttcaagatccggctgagccgcctcttccgcaccaagagctgcaatggaggcagcggcggcggagatggcaccgggaagaggcccagcggggagctggccgccagcgctgccagcctgacagacatgggcggcagcgctggccgggagctggatgctggcaggaagcccaagctgaccaggacccagagcgccttcagccctgtgtccttcagccccctcttcaccggggagaccgtgtccctggtggatgtggacatcagccagaggggcctgaccagcccccacccccccaccccacctcctcctccaagaagaagcctgagcctgctggatgacatcagcggcaccctgcccacctctgtgctggtggcccccatgggcagcagcctgcagagcttccccctgcccccacctcctcctcctcatgccccagatgccttccccagaattgcccccatccgggctgctgagagcctgcacagccagcccccccagcacctgcagtgccccctgtacagaccagacagcagcagctttgctgccagcctgcgggagctggagaagtgtggctggtactggggccccatgaactgggaggatgctgagatgaagctgaagggcaagccagatggcagcttcctggtgcgggacagcagtgacccccgctacatcctgagcctgtccttccgcagccagggcatcacccaccacaccaggatggagcactaccggggcaccttcagcctgtggtgccaccccaagtttgaagatcgctgccagagcgtggtggagttcatcaagagggccatcatgcacagcaagaatggcaagttcctgtacttcctgcggagccgggtgcccggcctgccccccacccctgtgcagctgctgtaccctgtgagccgcttcagcaatgtgaagagcctgcagcacctgtgccgcttccgcatccggcagctggtgagaattgaccacatcccagacctgcccctgcccaagcccctcatctcctacatcaggaagttctactactatgacccccaggaggaggtgtacctgagcctgaaggaggcccagctgatcagcaagcagaagcaggaggtggagcccagcacctag

SEQ ID NO: 180920 - DNA, 1746 bp, Artificial Sequence
  derived and/or modified sequence
atggtgttccggaacgtgggccggccccccgaggaggaggacgtggaagccgcacctgaaccggggccctccgaactcctgtgccctcggcatcggtgtgcattggatcctaaggccctgccacctggtctggccctggagaggacctggggcccagccgccggtcttgaggcacagctcgccgccctcggtctgggccagccagctggccctggagtgaagacagtcggcggaggatgctgcccgtgtccttgcccgcctcaaccgccacccccacagcctcagccacccgccgccgctccccaggctggggaagatccaacagagacatccgatgcccttctcgtactggagggactagagtcggaggctgagtctttagaaacaaacagttgctctgaagaggaactcagctcccctggaaggggcggcggcggcggagggaggcttctgctgcagcccccaggaccggagctgcctcccgtaccattccctctgcaggacctggtgccccttgggcgcctctcaaggggcgagcagcaacagcagcaacaacaacagcctcctccccccccgccccctcctgggccacttaggcctctggctggtcccagcagaaagggatccttcaaaataagactgagtcgtctcttcaggaccaagtcttgtaacggtggatctggggggggcgatgggaccggcaagaggccttcaggggaactggcagctagcgccgcttctctgaccgatatgggagggtcagccggacgagaactagatgctggtcgaaaacctaaactgacacgaacgcaaagtgccttctcccccgtgtctttctcaccacttttcacgggtgaaacagtctcactggtcgacgtggacatcagccaaaggggattgacatcaccgcatccaccaacccctccaccaccaccaaggcgtagcttgtcgttactggatgacatctccggaaccctgccaacaagcgtgctggtggctcctatgggatctagcttgcagagctttcccctacctccccccccgcctccacatgcaccagacgcgtttccacgcatcgcaccaatcagagccgctgagtccctccatagtcagccaccacagcatctgcagtgccccctttaccggccagattccagctctttcgcagctagccttcgcgagctagagaagtgcgggtggtattggggaccaatgaactgggaagatgccgaaatgaagttgaaaggtaagcccgatggaagctttctcgtgcgagactcctccgacccccgctatatactatccctgtccttccgctctcaaggcattactcatcacacccgaatggaacattacaggggtacgttcagcttatggtgccaccctaaatttgaggatcgttgccagtccgtggtggagtttattaagcgggcgatcatgcacagtaaaaatggaaagttcctttacttcctccggtccagagtccccggactccctcccacccccgtccaattgctttaccctgtgtccaggttctcaaacgtgaaaagcctccaacacctgtgccgtttcaggatccggcagctggtgaggattgaccatatccccgatctgccactgcccaaacctctgatcagctacatacggaagttttactattacgacccccaagaagaggtatatctatctctcaaggaggcacagcttatcagcaaacagaaacaggaagtggaacctagcacatag

SEQ ID NO: 180921 - DNA, 1746 bp, Artificial Sequence
  derived and/or modified sequence
atggtgttccggaacgtgggccggccccccgaggaggaggacgtggaggccgcgcctgagcccggtccatccgaactgctgtgtccgcgccatcggtgcgcattggaccccaaggcactgccaccaggcctggccctggaacgcacatggggaccagctgccggactggaagcccagcttgcagccctgggcctgggccagccagctgggcccggggttaagactgtaggcgggggatgttgtccctgtccgtgcccaccacagccgcccccaccccagccacagccgcctgccgcagcaccccaggcaggcgaggacccaaccgaaacctccgatgcgctgcttgtcttggagggtctggagagtgaagcagagtctttggagactaactcatgcagcgaagaagagctctcatcacctggtcgcggcgggggaggtggcggacgtttactcctacaacctcccggtcccgagctgccacctgtcccatttcctctccaagacctcgtgcccctcgggagactgagtcggggtgagcagcagcagcagcagcagcaacagccgcccccgcccccaccaccccctggccctctgagacccctggccggtccttcaagaaaaggctctttcaaaatcagactcagccgattgttccgtactaagagctgcaacggcggctctggaggtggggacggaactgggaagcgcccatctggggaactggccgcctcagctgcgtcgctgactgatatgggagggtctgctggaagggagctcgacgcaggacgaaaaccaaaacttacccggactcagtctgcattttcccccgtgagcttctccccactgtttaccggcgagaccgtatcactagtcgacgttgatatttcccagcgcggccttaccagtcctcatccccctacacccccaccgcccccaagacgttctctctccctgttggatgatattagtggcacgcttcccacatccgtgctcgtggccccaatgggctcctcactgcagtctttccctctgccacctcctccccccccccatgctccggatgcctttcccagaattgcgcctatccgggcggcagaaagcctgcactctcagccgcctcagcacctacagtgtcccctatacagacccgacagttcctcgttcgcagcctctcttcgcgaacttgagaaatgtggctggtactggggccctatgaactgggaagatgccgaaatgaagctgaaaggtaaacctgatgggagtttcctggtgagagactcttccgacccccgctacatacttagtcttagctttcggtcccagggtattacccaccacacacgcatggaacactaccgcggtactttctccctgtggtgccaccctaaatttgaggataggtgccagtccgttgtggagtttataaagagggccattatgcattctaaaaacggaaagtttctctactttctaaggagtcgcgtgcctgggttaccaccgacaccagtgcagctcctctaccctgttagtagattctctaatgtaaagtcgcttcagcacctgtgtcgatttaggattcgacaattggtgagaattgatcatatccccgacctgccgctgcctaaacccttgattagttacataagaaagttctactattacgatccacaggaggaagtctatttgtcgctgaaggaagcccagctgataagtaaacaaaagcaggaagttgaaccgtctacctag

SEQ ID NO: 180922 - DNA, 1746 bp, Artificial Sequence
  derived and/or modified sequence
atggtctttagaaatgtgggcagaccaccggaagaggaggatgttgaagccgcacctgaaccaggcccatccgagctcctctgcccacgccaccgatgcgcccttgaccccaaagccctgccacccggtctagctttggagcggacctggggacctgctgcaggtcttgaggcccagttggcggcactaggactgggccagccagcagggcctggggtgaagaccgtggggggaggctgttgcccatgtccgtgtcctccacagccaccccctccccagccacagcccccagccgctgcgccacaagctggagaggaccccaccgagacctccgacgccctgctggtgctggagggtttagagtccgaggcagagagtctagaaaccaacagctgtagcgaagaagagctctcctcgcctggcaggggcggtgggggaggcggacgcctcctgctacaaccccctgggcctgaactgcctcccgtgccctttccgctgcaggacctggtgccccttgggcgtctctctagaggagaacagcaacagcaacagcagcaacagcctccccctcccccaccaccaccagggcctttgagacctctcgcgggacccagccgcaagggtagttttaagatccgactctccagattattcagaacgaaaagctgcaacggcggtagcgggggtggagatgggacaggaaaaaggccatcaggcgaactggccgctagcgcagctagtttgacggatatgggcggaagtgccggacgcgaattggacgccggtcgcaaacccaaacttacgcggacacaatcagccttcagcccagttagttttagccccctttttacaggggagaccgtctcgctagtggacgttgatattagtcaacggggactcacatccccacatcccccaacgcccccacctcccccacggcgaagcctgagcttactagacgacatatctggcaccctccctacttcagttcttgtggccccaatgggcagttctttgcagtcttttcccttgccccctcctccccctccccatgcacctgatgcctttccgaggatcgctcctataagagctgccgaatcacttcacagccagcctcctcagcacctccaatgcccgctctatcggccagacagctcaagctttgcagcctcactgcgagagcttgaaaagtgtgggtggtactggggtcctatgaactgggaggatgctgaaatgaagctgaagggtaaacctgacgggagcttcctggtgcgcgattctagcgatcctagatacatcctttctctgtcattcaggagtcagggaatcacacatcatacacggatggaacattacagaggcacgttttccttatggtgccaccccaagttcgaggaccggtgccagtccgtggtggagtttatcaaaagagcaatcatgcactcaaaaaatggtaagtttctgtactttctgaggtccagagtgcctggcctgccacccactcctgtgcagctgctgtaccccgttagtagattctcgaacgtaaagtcactccaacatttatgtagattccggattcgccagttggtacgaatcgaccatatccctgacctgccactccccaaacccctgatcagttatatccgaaagttctactattacgaccctcaagaggaggtttacttatctcttaaggaggcacaactgataagtaagcaaaagcaggaggtggagccctctacttag

SEQ ID NO: 180923 - DNA, 1746 bp, Artificial Sequence
  derived and/or modified sequence
atggttttccgcaacgtgggccgacctcctgaggaggaggatgtcgaagccgctccagaacctggacccagcgagttgctgtgtccgcgtcatcggtgcgcattggatccaaaggcactccctcccggtctcgctttagagagaacctggggccctgctgctggtcttgaagcgcaattagcggcactggggctaggccagcctgctggacctggcgtgaaaaccgtcggaggaggctgctgtccctgcccttgtcctccccagccacccccacctcagcctcagcctcccgcagctgcaccccaggctggcgaagatccgacagagacctctgacgcccttctggttctcgagggcctggagtccgaggccgagtcactagagacaaactcctgcagcgaggaggagctctcatctcctggacgcggaggcggaggaggcggtaggctgctgctccaacctcctggcccagagttaccacctgtcccttttcctctccaggatctggtccccctggggagactgtcgagaggcgagcagcaacagcagcagcagcagcaacccccaccgcctccgccacctcccggacctctgagacccctggcgggaccgagccggaaagggtcgtttaaaattcgccttagccgactcttccgtaccaagagttgcaacgggggaagcgggggaggcgatgggaccggcaaaaggccgtccggggaattagcagcctcagcagcatccctcaccgatatggggggaagcgccggaagggagttggacgccggacgcaagcccaaactcactcggacccaatcagccttctcccccgtgtcgttctctcctctattcactggggagaccgtatccctggtggatgtggacatttcccaaagagggctgacgagtcctcacccaccgaccccacccccacctcccagacggagcctgagtctgcttgatgacatctcgggcaccctgccgacttccgtgctcgtggcgcctatgggaagctcactgcaatcctttccgcttccgcctccaccccctccacacgcacctgatgcctttccaaggattgcgccaattagagccgctgagagcctccactcccagcccccacaacacctgcagtgtcccctttaccggcctgactcgtcttcctttgccgcatccttgcgagagctcgagaaatgtggttggtactgggggccaatgaactgggaggacgccgaaatgaagttgaaaggtaaaccagatggatccttcctggtgcgggatagctctgatcctcgttatatcctcagcctgtctttccggtctcagggaattactcatcatacaaggatggaacattacagaggtactttcagcctctggtgtcatcccaagtttgaagataggtgccagtctgtcgtagagtttattaagcgcgctatcatgcactccaaaaatggcaaatttctgtatttcttacggagcagagtcccgggacttcccccaacacccgtacagctgctgtacccagtgtcgcgctttagcaatgtcaagtccctgcagcacctgtgccggtttcgaatccgccagctagttcgaatcgaccatatacccgacctcccactgccaaaacccctaatctcttacattcgcaagttctactattacgacccccaggaagaagtttacctctctctgaaagaggcacagctgatttccaaacaaaaacaagaggtcgagcctagtacatag

SEQ ID NO: 180924 - DNA, 2149 bp, Artificial Sequence
  derived and/or modified sequence
ctccttggctatggagaggcggcccccgagccaggccctccgccaccgcccccgggccatggccccccgccgccacccttcctcgcgcggcccggcccgcggggctcccggccgccgcagctgatggtgttccgcaacgtgggtcggccgccggaggaggaggacgtggaggcggccccggagccgggaccctcggaactgctgtgtccccggcaccgctgtgccctggaccccaaggccctgccgccgggcttggcgctcgagcggacctggggcccggcggctggactagaggcgcagttggcggctctggggctcgggcagccggcggggccgggggtcaagacagtcggtgggggttgctgcccgtgtccgtgtcctcctcagccgccccctccgcagccccagccgcctgctgccgccccgcaggccggggaggaccccacggaaacgagcgacgcgctgctggtcctggagggcttggaatcggaggccgagagcctggagactaacagctgctcggaagaggagctcagcagcccgggtcgcggaggaggagggggcggccggcttctgctgcagcccccaggccctgaattacctccggtgcccttcccgctgcaggacttggtccctctggggcgcctgagtagaggggagcagcagcagcagcagcagcagcaacctcccccgcccccgcctcctcccgggcccctccggccactcgcgggtccttctcggaagggctccttcaaaatccgcctcagtcgcctctttcgcaccaagagctgcaacggtggctccggcggtggggatgggaccggcaagaggccttctggagagctggctgcttcagctgcgagcctgacagacatgggaggctctgcgggccgggagctggacgcggggaggaaacccaagttgacaagaactcaaagtgccttttctccggtctccttcagccccctgttcacaggtgaaactgtgtcgcttgtggatgtggacatttctcagcggggcctgacctctccacaccctccaactccccctcctcctccgagaagaagcctcagcctcctagatgatatcagtgggacgctgcctacatctgtccttgtggctccgatggggtcttccttgcagtctttccccctacctccgcctcctccaccccatgccccagatgcatttccccggattgctcccatccgagcagctgaatccctgcacagccaacccccacagcacctccagtgtcccctctaccggcctgactcgagcagctttgcagccagccttcgagagttggagaagtgtggttggtattgggggccaatgaattgggaagatgcagagatgaagctgaaagggaaaccagatggttctttcctggtacgagacagttctgatcctcgttacatcctgagcctcagtttccgatcacagggtatcacccaccacactagaatggagcactacagaggaaccttcagcctgtggtgtcatcccaagtttgaggaccgctgtcaatctgttgtagagtttattaagagagccattatgcactccaagaatggaaagtttctctatttcttaagatccagggttccaggactgccaccaactcctgtccagctgctctatccagtgtcccgattcagcaatgtcaaatccctccagcacctttgcagattccggatacgacagctcgtcaggatagatcacatcccagatctcccactgcctaaacctctgatctcttatatccgaaagttctactactatgatcctcaggaagaggtatacctgtctctaaaggaagcgcagctcatttccaaacagaagcaagaggtggaaccctccacgtagcgaggggctccctgctggtcaccaccaagggcatttggttgccaagctccagctttgaagaaccaaattaagctaccatgaaaagaagaggaaaagtgagggaacaggaaggttgggattctctgtgcagagactttggttccccacgcagccctggggcttggaagaagcacatgaccgtactctgcgtggggctccacctcacacccacccctgggcatcttaggactggaggggctccttggaaaactggaagaagtctcaacactgtttctttttc

SEQ ID NO: 180925 - DNA, 2030 bp, Artificial Sequence
  derived and/or modified sequence
atggtgttccgcaacgtgggtcggccgccggaggaggaggacgtggaggcggccccggagccgggaccctcggaactgctgtgtccccggcaccgctgtgccctggaccccaaggccctgccgccgggcttggcgctcgagcggacctggggcccggcggctggactagaggcgcagttggcggctctggggctcgggcagccggcggggccgggggtcaagacagtcggtgggggttgctgcccgtgtccgtgtcctcctcagccgccccctccgcagccccagccgcctgctgccgccccgcaggccggggaggaccccacggaaacgagcgacgcgctgctggtcctggagggcttggaatcggaggccgagagcctggagactaacagctgctcggaagaggagctcagcagcccgggtcgcggaggaggagggggcggccggcttctgctgcagcccccaggccctgaattacctccggtgcccttcccgctgcaggacttggtccctctggggcgcctgagtagaggggagcagcagcagcagcagcagcagcaacctcccccgcccccgcctcctcccgggcccctccggccactcgcgggtccttctcggaagggctccttcaaaatccgcctcagtcgcctctttcgcaccaagagctgcaacggtggctccggcggtggggatgggaccggcaagaggccttctggagagctggctgcttcagctgcgagcctgacagacatgggaggctctgcgggccgggagctggacgcggggaggaaacccaagttgacaagaactcaaagtgccttttctccggtctccttcagccccctgttcacaggtgaaactgtgtcgcttgtggatgtggacatttctcagcggggcctgacctctccacaccctccaactccccctcctcctccgagaagaagcctcagcctcctagatgatatcagtgggacgctgcctacatctgtccttgtggctccgatggggtcttccttgcagtctttccccctacctccgcctcctccaccccatgccccagatgcatttccccggattgctcccatccgagcagctgaatccctgcacagccaacccccacagcacctccagtgtcccctctaccggcctgactcgagcagctttgcagccagccttcgagagttggagaagtgtggttggtattgggggccaatgaattgggaagatgcagagatgaagctgaaagggaaaccagatggttctttcctggtacgagacagttctgatcctcgttacatcctgagcctcagtttccgatcacagggtatcacccaccacactagaatggagcactacagaggaaccttcagcctgtggtgtcatcccaagtttgaggaccgctgtcaatctgttgtagagtttattaagagagccattatgcactccaagaatggaaagtttctctatttcttaagatccagggttccaggactgccaccaactcctgtccagctgctctatccagtgtcccgattcagcaatgtcaaatccctccagcacctttgcagattccggatacgacagctcgtcaggatagatcacatcccagatctcccactgcctaaacctctgatctcttatatccgaaagttctactactatgatcctcaggaagaggtatacctgtctctaaaggaagcgcagctcatttccaaacagaagcaagaggtggaaccctccacgtagcgaggggctccctgctggtcaccaccaagggcatttggttgccaagctccagctttgaagaaccaaattaagctaccatgaaaagaagaggaaaagtgagggaacaggaaggttgggattctctgtgcagagactttggttccccacgcagccctggggcttggaagaagcacatgaccgtactctgcgtggggctccacctcacacccacccctgggcatcttaggactggaggggctccttggaaaactggaagaagtctcaacactgtttctttttcagaa

SEQ ID NO: 180926 - protein, 606 aa, Artificial Sequence
  derived and/or modified sequence
MSDTSESGAGLTRFQAEASEKDSSSMMQTLLTVTQNVEVPETPKASKALEVSEDVKVSKASGVSKATEVSKTPEAREAPATQASSTTQLTDTQVLAAENKSLAADTKKQNADPQAVTMPATETKKVSHVADTKVNTKAQETEAAPSQAPADEPEPESAAAQSQENQDTRPKVKAKKARKVKHLDGEEDGSSDQSQASGTTGGRRVSKALMASMARRASRGPIAFWARRASRTRLAAWARRALLSLRSPKARRGKARRRAAKLQSSQEPEAPPPRDVALLQGRANDLVKYLLAKDQTKIPIKRSDMLKDIIKEYTDVYPEIIERAGYSLEKVFGIQLKEIDKNDHLYILLSTLEPTDAGILGTTKDSPKLGLLMVLLSIIFMNGNRSSEAVIWEVLRKLGLRPGIHHSLFGDVKKLITDEFVKQKYLDYARVPNSNPPEYEFFWGLRSYYETSKMKVLKFACKVQKKDPKEWAAQYREAMEADLKAAAEAAAEAKARAEIRARMGIGLGSENAAGPCNWDEADIGPWAKARIQAGAEAKAKAQESGSASTGASTSTNNSASASASTSGGFSAGASLTATLTFGLFAGLGGAGASTSGSSGACGFSYK

SEQ ID NO: 180927 - protein, 588 aa, Artificial Sequence
  derived and/or modified sequence
MSDTSESGAGLTRFQAEASEKDSSSMMQTLLTVTQNVEVPETPKASKATEVSKTPEAREAPATQASSTTQLTDTQVLAAENKSLAADTKKQNADPQAVTMPATETKKVSHVADTKVNTKAQETEAAPSQAPADEPEPESAAAQSQENQDTRPKVKAKKARKVKHLDGEEDGSSDQSQASGTTGGRRVSKALMASMARRASRGPIAFWARRASRTRLAAWARRALLSLRSPKARRGKARRRAAKLQSSQEPEAPPPRDVALLQGRANDLVKYLLAKDQTKIPIKRSDMLKDIIKEYTDVYPEIIERAGYSLEKVFGIQLKEIDKNDHLYILLSTLEPTDAGILGTTKDSPKLGLLMVLLSIIFMNGNRSSEAVIWEVLRKLGLRPGIHHSLFGDVKKLITDEFVKQKYLDYARVPNSNPPEYEFFWGLRSYYETSKMKVLKFACKVQKKDPKEWAAQYREAMEADLKAAAEAAAEAKARAEIRARMGIGLGSENAAGPCNWDEADIGPWAKARIQAGAEAKAKAQESGSASTGASTSTNNSASASASTSGGFSAGASLTATLTFGLFAGLGGAGASTSGSSGACGFSYK

SEQ ID NO: 180928 - protein, 550 aa, Artificial Sequence
  derived and/or modified sequence
MWRSQRHRRPQRVSKTPEAREAPATQASSTTQLTDTQVLAAENKSLAADTKKQNADPQAVTMPATETKKVSHVADTKVNTKAQETEAAPSQAPADEPEPESAAAQSQENQDTRPKVKAKKARKVKHLDGEEDGSSDQSQASGTTGGRRVSKALMASMARRASRGPIAFWARRASRTRLAAWARRALLSLRSPKARRGKARRRAAKLQSSQEPEAPPPRDVALLQGRANDLVKYLLAKDQTKIPIKRSDMLKDIIKEYTDVYPEIIERAGYSLEKVFGIQLKEIDKNDHLYILLSTLEPTDAGILGTTKDSPKLGLLMVLLSIIFMNGNRSSEAVIWEVLRKLGLRPGIHHSLFGDVKKLITDEFVKQKYLDYARVPNSNPPEYEFFWGLRSYYETSKMKVLKFACKVQKKDPKEWAAQYREAMEADLKAAAEAAAEAKARAEIRARMGIGLGSENAAGPCNWDEADIGPWAKARIQAGAEAKAKAQESGSASTGASTSTNNSASASASTSGGFSAGASLTATLTFGLFAGLGGAGASTSGSSGACGFSYK

SEQ ID NO: 180929 - protein, 521 aa, Artificial Sequence
  derived and/or modified sequence
MSDTSESGAGLTRFQAEASEKDSSSMMQTLLTVTQNVEVPETPKASSTTQLTDTQVLAAENKSLAADTKKQNADPQAVTMPATETKKVSHVADTKVNTKAQETEAAPSQAPADEPEPESAAAQSQENQDTRPKVKAKKARKVKHLDGEEDGSSDQSQASGTTGGRRVSKARRRAAKLQSSQEPEAPPPRDVALLQGRANDLVKYLLAKDQTKIPIKRSDMLKDIIKEYTDVYPEIIERAGYSLEKVFGIQLKEIDKNDHLYILLSTLEPTDAGILGTTKDSPKLGLLMVLLSIIFMNGNRSSEAVIWEVLRKLGLRPGIHHSLFGDVKKLITDEFVKQKYLDYARVPNSNPPEYEFFWGLRSYYETSKMKVLKFACKVQKKDPKEWAAQYREAMEADLKAAAEAAAEAKARAEIRARMGIGLGSENAAGPCNWDEADIGPWAKARIQAGAEAKAKAQESGSASTGASTSTNNSASASASTSGGFSAGASLTATLTFGLFAGLGGAGASTSGSSGACGFSYK

SEQ ID NO: 180930 - DNA, 1821 bp, Artificial Sequence
  derived and/or modified sequence
atgagcgatacatcggagagtggcgccggcctgaccagatttcaggctgaagccagtgaaaaggattcttcctctatgatgcagacactgcttaccgtgactcagaacgtggaggtcccggagacacctaaggcttcaaaagctctggaagtctcggaagacgttaaggtgtcaaaagcaagtggtgtaagtaaagccacggaagtctccaaaaccccagaggcacgggaagctcctgcaactcaagcctcctctacgactcagctcaccgatacccaggtgcttgccgcggagaacaagtcactcgccgccgacactaagaaacagaatgctgatcctcaagcggtaacaatgcccgccacggaaactaagaaggtgtcgcacgtggcggacacaaaagtcaatacaaaagcccaggagaccgaggccgcaccctcccaggccccggcagatgagcctgagcctgaatccgcagcagcccaatcccaggaaaatcaggataccagaccaaaggtcaaagccaagaaggcacgcaaggtcaagcacctggatggggaagaagacggaagttctgaccaaagccaggcaagcggaactacagggggccgaagggtttcaaaggccctcatggcatctatggcccggcgggcttctaggggtcccattgctttttgggctaggcgggcaagccgcaccaggctcgcggcctgggccaggagagctttactcagcctgaggtctcccaaggcgagaagagggaaggcacggaggagggctgcgaaacttcaatcaagccaggagcctgaagcccctcctcctcgggacgttgccttactccagggacgcgctaatgatctcgttaagtacctgttggccaaggaccagaccaagatccctatcaaaagatctgatatgctcaaggacatcatcaaagaatacaccgatgtttatccagagataatcgaacgggccggttattcactcgaaaaggtcttcggaatacagctgaaggagattgacaaaaatgaccacctctatatattgctgagcacgcttgaacccacagatgctggcattctgggcaccaccaaggactcgcccaagttggggctgctcatggtattgctgagcattattttcatgaacggaaaccgctcgagtgaggccgtgatctgggaagtgctcagaaaactgggactacggcccggtattcaccacagccttttcggcgatgtaaaaaagctcatcaccgatgaatttgtcaagcaaaaatatctcgactacgctagagtccccaactcaaatccccccgaatatgagtttttctggggacttcgcagctattacgaaacctccaaaatgaaggtactgaagtttgcatgcaaagtccagaagaaggatcccaaagagtgggccgcgcaatacagggaggcaatggaagcagacctcaaagccgcagcggaggctgctgccgaagctaaggcgagagctgagatcagagcccgcatggggatcgggctgggaagcgagaacgccgcaggaccctgtaattgggacgaggctgacattggtccatgggccaaggcaaggattcaggctggtgcagaggccaaggccaaagctcaggagagcggatctgcttctaccggagccagcacctcgaccaacaatagcgcatctgccagtgcctctactagcggtggcttctcagccggcgcctcgctaaccgcgacactgacttttggtctgttcgccggacttgggggagctggcgcaagtacctccggcagttcaggagcttgcggcttctcttataaatag

SEQ ID NO: 180931 - DNA, 1821 bp, Artificial Sequence
  derived and/or modified sequence
atgtctgacaccagcgagagcggggccggcctgacccgcttccaggccgaggccagcgagaaggacagcagctccatgatgcagaccctgctgactgtgacccagaatgtggaggtgcctgagacccccaaggccagcaaggccctggaggtgtctgaagatgtgaaggtgtccaaggccagcggcgtgtccaaggccacagaggtgtccaagaccccagaggcccgggaggccccagccacccaggccagcagcaccacccagctgacagacacccaggtgctggccgctgagaacaagagcctggccgctgacaccaagaagcagaatgctgacccccaggccgtgaccatgcctgccacagagaccaagaaggtgagccacgtggccgacaccaaggtgaacaccaaggcccaggagacagaagctgcccccagccaggccccagcagatgagcctgagcctgagagcgctgctgcccagagccaggagaaccaggacacccggcccaaggtgaaggccaagaaggccaggaaggtgaagcacctggatggagaagaagatggcagcagtgaccagagccaggccagcggcaccaccggcggcagaagagtgtccaaggccctgatggcctccatggcccggcgggccagccggggccccatcgccttctgggcccggcgggccagcaggacccggctggccgcctgggcccggcgggccctgctgagcctgcggagccccaaggcccggcggggcaaggccaggagaagagctgccaagctgcagagcagccaggagcctgaggcccccccaccaagagatgtggccctgctgcagggccgggccaatgacctggtgaagtacctgctggccaaggaccagaccaagatccccatcaagagaagtgacatgctgaaggacatcatcaaggagtacacagatgtgtacccagagatcatcgagcgggccggctacagcctggagaaggtgtttggcatccagctgaaggagattgacaagaatgaccacctgtacatcctgctgagcaccctggagcccacagatgctggcatcctgggcaccaccaaggacagccccaagctgggcctgctgatggtgctgctgagcatcatcttcatgaatggaaacagaagcagcgaggccgtcatctgggaggtgctgaggaagctgggcctgcggcccggcatccaccacagcctgtttggagatgtgaagaagctgatcacagatgaatttgtgaagcagaagtacctggactatgcccgggtgcccaacagcaaccccccagaatatgagttcttctggggcctgcggagctactatgagaccagcaagatgaaggtgctgaagtttgcctgcaaggtgcagaagaaggaccccaaggagtgggccgcccagtaccgggaggccatggaggccgacctgaaggctgctgctgaggccgctgctgaggccaaggcccgggcagagatccgggccaggatgggcatcggcctgggctctgaaaatgctgctggcccctgcaactgggatgaagctgacatcggcccctgggccaaggcccgcatccaggccggggctgaggccaaggccaaggcccaggagagcggcagcgccagcactggagccagcaccagcaccaacaacagcgccagcgccagcgccagcaccagcggcggcttctctgctggggccagcctgacagccaccctgaccttcggcctgtttgctggcctgggcggggccggggccagcaccagcggcagcagcggggcctgtggcttctcctacaagtag

SEQ ID NO: 180932 - DNA, 1821 bp, Artificial Sequence
  derived and/or modified sequence
atgagcgacaccagcgagagcggcgccggcctgacccggttccaggccgaggcctcagaaaaagactctagctctatgatgcagaccctgctgacagttactcagaatgtggaggtacccgaaactccaaaggccagtaaggcactggaagtctcggaggacgtgaaggtttctaaggcatccggggtgtccaaggcaacagaagtgagcaagactcctgaagccagagaggcccctgcaacacaggccagctctacaacccagttgacggatactcaggttctggccgcagaaaacaaaagccttgcagccgacactaagaaacagaacgccgacccgcaggcagtgaccatgcctgcgaccgagacaaagaaggtaagccatgttgccgatacgaaggtgaacacaaaagcacaggaaactgaggccgcgccaagccaggcaccagccgatgagcctgaaccagagagcgccgcagcccagagtcaggaaaaccaagacacgagaccaaaggttaaagccaaaaaagctcgaaaggtcaagcacctggatggtgaggaggatgggtctagcgaccaaagccaggcgtctggcacaactgggggaaggagggtgtcgaaagcgctgatggctagtatggcccgtcgggcatccagaggcccaatcgccttctgggccagacgcgccagcaggacaaggctggcagcctgggcacggagagccttgctgagcctgagaagccctaaggcccggcgcggcaaagctcggcgacgagcagcaaagctacagtcgagtcaggagcccgaggcaccaccacctagggacgtggccctcctgcagggccgtgctaacgacctggtcaagtatttactggccaaggaccaaaccaaaattccaataaaaaggagtgacatgctcaaggatattatcaaggaatacactgacgtctatcccgaaatcatagagcgggccgggtactctttggaaaaggtttttggcatccaattgaaagagatcgacaagaacgatcatctctatattctgcttagtacactggagcctacagacgcaggaattttgggtacgactaaggatagtcccaaactggggctgctgatggtgctgctgtccattatctttatgaatggcaatcggtcatctgaggctgtgatttgggaggttctgcgcaagctcgggctcagaccagggatccaccatagcctttttggcgacgtgaaaaaactaattacagatgagtttgtcaagcaaaagtatcttgactacgcccgtgttccaaattccaatcctcctgagtacgagttcttctggggcttgcggtcatattacgagacttctaaaatgaaagttctgaagtttgcatgcaaagtgcagaagaaggatcccaaggagtgggccgcacagtatagagaggcaatggaagccgatctgaaagccgcagccgaggcagcagcagaagctaaagcccgggcagaaattcgggccagaatgggcattggtttgggatccgagaacgccgctggtccctgcaattgggacgaggccgacatcggaccatgggccaaagcgcgcatacaggccggagccgaagcaaaagccaaagcccaggaaagtggaagcgcatctactggggcttccacaagtacaaacaacagcgcctcagcatcagcctcaacctccggtggcttctccgcaggagcgagcctcacagctacgctgacttttgggttgttcgcaggccttgggggggcaggggccagtaccagcggaagtagtggcgcatgcggcttctcctacaaatag

SEQ ID NO: 180933 - DNA, 1821 bp, Artificial Sequence
  derived and/or modified sequence
atgtcagacacatccgagagtggggcaggactgacaaggtttcaggctgaagcctccgagaaagactcctcatcaatgatgcagacactgttgaccgtaacacagaacgttgaagtacctgagacaccaaaggcctccaaagccctggaggtgtctgaggatgttaaagtcagtaaggcgtccggagtgagtaaagctactgaggtgtccaagactccagaggccagagaagcccctgcaacacaggcctcaagcaccacgcagctcaccgacacacaggtgcttgccgcagaaaataagtccctagcggctgataccaaaaaacaaaatgctgatccacaagccgtaacaatgcctgcaaccgagaccaaaaaagtcagccatgtggcagataccaaggtaaatacgaaagctcaggaaactgaggccgcaccatcccaggcacccgcagacgaaccagaacccgaaagcgctgccgctcaatctcaagagaaccaggatacaaggcctaaggtgaaagccaagaaagcccgaaaagttaagcacctcgatggggaagaagacgggtcaagcgaccagtcgcaggcttccggaacaaccggcggacgcagggtgagcaaggccctgatggctagcatggcgaggagagcaagccgtggcccaatcgcattttgggccaggcgcgcatctagaaccagactagctgcctgggcgcgtagagcattactcagcctgcggtcgccgaaggcaaggagaggaaaggctagaagacgagctgcgaaactgcaatccagccaggaacctgaggctccgccacctagggacgtcgctctgctgcaggggagggcaaatgatttggtgaagtacctgcttgctaaagatcaaaccaaaatcccgataaaacggtcagatatgctgaaagacatcattaaagaatacacagacgtgtatccagagattattgagcgagcaggctacagcctcgagaaggtgttcggcattcagttgaaggaaattgacaaaaacgatcatctgtatattctgctgtccacgctggagccgacggacgccggaatccttggtactaccaaagactcccctaaactcgggctgctgatggtgctgctttccattatctttatgaatggaaatcgttcttctgaggccgttatctgggaagtacttcggaaactaggcctgaggccaggcattcaccactccttattcggcgacgtcaagaagttgatcacagacgagttcgtcaagcaaaagtacctcgattacgctagagtgcccaacagcaacccgccagagtacgaattcttctggggtctgcggtcctactacgagacctctaaaatgaaggtcctgaagttcgcctgtaaagtgcaaaagaaggacccgaaggagtgggcagcccagtatcgagaggccatggaggccgacctgaaggccgcagcggaagccgcagcagaggccaaagcacgtgcagagataagagcgaggatggggatcggactgggtagcgaaaatgccgcaggaccatgtaactgggacgaagctgacataggcccttgggcgaaggcgaggatccaggcaggggctgaagccaaagctaaggctcaggaatccggctccgcatcaacaggtgcctcgacatctacgaacaactccgcctccgcctcagcctcaacttccggtggcttcagcgccggtgcctcactgactgcaaccctcacatttggcttattcgctggtctgggtggggctggagcctccacatccggctcctcgggcgcttgcggcttctcgtacaagtag

SEQ ID NO: 180934 - DNA, 1821 bp, Artificial Sequence
  derived and/or modified sequence
atgagcgacaccagcgagagcggcgccggcctgaccagattccaggccgaggccagcgagaaggacagcagcagcatgatgcagaccctgctgaccgtgacccagaacgtggaggtgcccgagacccccaaggccagcaaggccctggaggtgagcgaggacgtgaaggtgagcaaggccagcggcgtgagcaaggccaccgaggtgagcaagacccccgaggccagagaggcccccgccacccaggccagcagcaccacccagctgaccgacacccaggtgctggccgccgagaacaagagcctggccgccgacaccaagaagcagaacgccgacccccaggccgtgaccatgcccgccaccgagaccaagaaggtgagccacgtggccgacaccaaggtgaacaccaaggcccaggagaccgaggccgcccccagccaggcccccgccgacgagcccgagcccgagagcgccgccgcccagagccaggagaaccaggacaccagacccaaggtgaaggccaagaaggccagaaaggtgaagcacctggacggcgaggaggacggcagcagcgaccagagccaggccagcggcaccaccggcggcagaagagtgagcaaggccctgatggccagcatggccagaagagccagcagaggccccatcgccttctgggccagaagagccagcagaaccagactggccgcctgggccagaagagccctgctgagcctgagaagccccaaggccagaagaggcaaggccagaagaagagccgccaagctgcagagcagccaggagcccgaggcccccccccccagagacgtggccctgctgcagggcagagccaacgacctggtgaagtacctgctggccaaggaccagaccaagatccccatcaagagaagcgacatgctgaaggacatcatcaaggagtacaccgacgtgtaccccgagatcatcgagagagccggctacagcctggagaaggtgttcggcatccagctgaaggagatcgacaagaacgaccacctgtacatcctgctgagcaccctggagcccaccgacgccggcatcctgggcaccaccaaggacagccccaagctgggcctgctgatggtgctgctgagcatcatcttcatgaacggcaacagaagcagcgaggccgtgatctgggaggtgctgagaaagctgggcctgagacccggcatccaccacagcctgttcggcgacgtgaagaagctgatcaccgacgagttcgtgaagcagaagtacctggactacgccagagtgcccaacagcaacccccccgagtacgagttcttctggggcctgagaagctactacgagaccagcaagatgaaggtgctgaagttcgcctgcaaggtgcagaagaaggaccccaaggagtgggccgcccagtacagagaggccatggaggccgacctgaaggccgccgccgaggccgccgccgaggccaaggccagagccgagatcagagccagaatgggcatcggcctgggcagcgagaacgccgccggcccctgcaactgggacgaggccgacatcggcccctgggccaaggccagaatccaggccggcgccgaggccaaggccaaggcccaggagagcggcagcgccagcaccggcgccagcaccagcaccaacaacagcgccagcgccagcgccagcaccagcggcggcttcagcgccggcgccagcctgaccgccaccctgaccttcggcctgttcgccggcctgggcggcgccggcgccagcaccagcggcagcagcggcgcctgcggcttcagctacaagtag

SEQ ID NO: 180935 - DNA, 1767 bp, Artificial Sequence
  derived and/or modified sequence
atgagtgacacttctgagagcggtgccggtctcacgagattccaggccgaggccagtgagaaggacagttcctctatgatgcagaccctcttgacggtgacacagaacgtcgaggttccagagacccctaaggcgagtaaggccactgaggtctctaagactccagaagcaagggaggcgcccgctacccaggcttcatccacgacccagctgacggacacccaggttctggctgccgagaacaaaagtctcgcagctgatacaaaaaagcagaatgccgaccctcaggcagtaacaatgcccgcgactgaaaccaagaaagtctctcatgtcgctgacacaaaggttaacaccaaggcacaagagactgaggccgccccctctcaggcacccgcagatgagcccgaaccagaatcagctgccgcccagtctcaggaaaaccaggatactcggccaaaagtcaaggccaagaaggctcgaaaagtgaaacatctggatggagaagaggacgggtcctctgaccagtcacaggcatccggtacaactggagggcgtcgcgtgtcaaaagcattgatggcctctatggctagaagggcctcccgaggccccatagccttctgggcaaggcgcgctagtaggaccagactggccgcgtgggctcgtagggctctattgagtcttcggtcgccgaaggcacgaaggggcaaagctcgacggcgggccgcaaagcttcagagttcgcaagagcccgaggctccgcctcctagggacgtcgctttgctgcagggtcgggcaaatgacctcgtgaagtatcttctggcaaaagaccagacaaagattcctatcaaacgctctgatatgctgaaggatatcatcaaggagtacaccgatgtgtatccagaaattatcgaacgcgccggatactccctggagaaggtgttcggaatccaactaaaagaaatagataagaacgatcacttatacatcttgcttagtaccctggaacccactgacgccggcatcttgggaactaccaaagactcccccaagctgggcctgctgatggtgttgctgagcataatcttcatgaacgggaaccgttcatccgaagccgtcatttgggaggtccttaggaaattgggcctgagacccggcatccatcacagcttattcggggacgttaagaagctgatcactgatgaattcgtcaagcagaaatacctagactacgctcgtgtccctaacagtaaccctcccgaatatgaatttttttggggattgagaagctattatgaaactagtaagatgaaggttctgaagtttgcctgcaaggttcagaagaaggatcccaaggaatgggcagcccaatacagagaggcaatggaggctgaccttaaagccgccgcagaggccgcggcagaggcaaaggctagagctgagattcgagcacgcatgggtatcggtctgggctctgaaaacgctgcaggcccttgcaactgggacgaggccgacatagggccttgggccaaggctcgtattcaggctggcgctgaagccaaggcgaaagcccaagaatccggtagtgccagtaccggcgcttccacgagcacgaataattctgcaagtgcctccgcaagcacatctggcggatttagcgccggggcctcgctgacagctacgcttacttttgggctgtttgccggtctcggaggcgcaggggccagtactagcggaagttcaggcgcctgtggtttcagttacaagtag

SEQ ID NO: 180936 - DNA, 1653 bp, Artificial Sequence
  derived and/or modified sequence
atgtggcggtcccaaaggcatagaagacctcagagagttagtaaaaccccggaggcacgagaagcccccgcaactcaggcttcctcaaccacacagctgaccgacacccaggtccttgcagccgaaaataagagcctcgcggccgatacaaagaagcaaaatgctgatccccaggcggtaacgatgccagcaactgaaaccaagaaggtgagccatgttgccgataccaaggtcaacacgaaggcgcaggagactgaagccgcaccgtcacaggccccggctgatgagcctgaacccgagagtgccgctgcccagtcacaggaaaatcaggacaccaggcccaaggtgaaggccaaaaaggcacggaaggtgaagcacctcgatggggaggaagatggttcgtctgaccaaagccaggcaagcggcactaccggagggcggcgggtctctaaggccctgatggctagcatggcgcgacgggcctcaaggggcccaattgctttttgggctcgccgagcgagtaggacacgactggccgcctgggcacgcagagccctgttgtcactacgttcccccaaagcccggagaggcaaggcaaggcggcgggcagcaaaactgcagagctcgcaggagcccgaagcgccccccccacgtgacgtcgccttgttgcaaggtcgtgccaatgatttggtgaagtatctgctagccaaagaccagacgaaaattcctattaagagaagcgatatgctgaaagacattatcaaggaatacactgacgtctatcctgagattatcgagcgcgcaggatactcacttgagaaggtttttggtattcagctgaaggagatcgacaagaacgaccatctgtacatactgctgagcactctggaacctactgatgcagggatcctgggcaccactaaggattcgccaaagctgggtttgctgatggtgctcctgtccattatattcatgaatggaaaccggagctctgaggccgtgatctgggaagttctgaggaaattgggacttaggccggggattcaccactccttattcggggacgtgaaaaagctgattaccgacgaattcgtaaagcagaaatacctcgactacgcacgagtccccaattctaacccccctgagtacgaatttttctggggcctgcgatcatattatgagacctccaagatgaaagtgttgaagtttgcctgcaaggttcagaagaaagaccctaaagagtgggcagcgcagtaccgcgaagccatggaagctgacttaaaggctgcagcagaagctgcggcagaggcaaaagctagggccgagatccgagcaaggatgggaatcggcctcggtagcgagaatgcagcaggcccatgcaattgggacgaggctgatatcggcccctgggcaaaggcacgtatccaagctggcgccgaggcaaaagccaaagcacaggaaagtggaagcgcatccaccggcgcctcaacgagtactaataatagcgcatccgcctctgcgtccacgagtgggggattctcagctggcgcctccttaactgctaccctgacgttcggcctgttcgcaggactgggaggggccggtgcaagcacatccggttccagtggcgcttgtggcttctcgtacaaatag

SEQ ID NO: 180937 - DNA, 1821 bp, Artificial Sequence
  derived and/or modified sequence
atgagcgacacaagcgagtcaggcgcaggactgacccggtttcaagctgaggcttcggagaaggattcatcttccatgatgcagacactgctcaccgtcacgcagaacgttgaagtgccagagacgcctaaagcgtccaaggctttggaggtgagtgaggacgtcaaagtgtcaaaagcttcaggagtgtctaaggcaactgaagtctccaagacaccagaagcacgcgaagctcccgcaacccaggcgagcagcaccacccagttgacggacacacaggtgttagctgccgagaataaaagtctcgcagccgacactaagaagcaaaacgccgacccccaggcagtcaccatgcccgccaccgagaccaaaaaggtatctcacgtcgccgacaccaaagttaataccaaggctcaggaaaccgaagcagccccctctcaagcccctgccgatgaacccgagccagaaagtgcggcggctcagtctcaggaaaatcaagatactagacccaaagtcaaagcaaagaaggcgcggaaagtaaagcaccttgatggagaggaagatggctcatcagaccaatctcaggcctcgggaaccacaggaggtcgccgcgtgagcaaagcgctgatggcctccatggcgcggagggctagccgggggcctatcgctttttgggctcggcgcgcttcaaggacaaggctggcagcctgggccagaagggccctgctgtcattgaggtctcccaaggcccgaagaggtaaggctaggaggcgcgccgcaaaactacaatctagccaggaacccgaggcccccccgccaagggatgtcgctttgttgcagggccgcgctaacgacctggtgaagtacctcctcgctaaggatcaaacaaagattccaattaaaagaagcgatatgttgaaggatataatcaaagagtacactgatgtgtaccccgaaattatcgaaagggccgggtattctctggaaaaggttttcggcattcagctgaaagaaattgacaagaatgatcatctgtatatcctgttgtctactctggagcctacagacgccggcatccttggcactaccaaggattcccctaaactgggactcctgatggttctactgtcgattatcttcatgaacgggaatcgttcgagtgaggcggtgatttgggaagtactgcgtaaactgggactgaggcccgggatccaccattctctgttcggcgacgtgaagaaattgataaccgacgaatttgtaaagcaaaagtatttggattatgccagggtgccaaactcaaatcctccagagtacgaattcttttgggggttgcggagctactacgaaaccagcaaaatgaaggtgttaaaattcgcctgtaaggtccaaaagaaagacccaaaggaatgggctgcccagtatcgtgaggctatggaagccgatctgaaagcggctgccgaggcagcagccgaggcaaaggcccgggccgaaatccgcgctagaatgggaattggcttaggatcagaaaacgccgccggcccctgtaactgggacgaagcggacatagggccatgggcaaaagcgcggatccaggccggggcagaagctaaggccaaggctcaggagagcggcagcgcctcaactggcgcttcaacttctaccaacaactcagccagtgcaagtgcatcgactagtggcgggttctccgctggcgcgtccctgacagctacccttacttttggactgttcgccggcctggggggggcaggcgccagtacgtctggctcctcaggtgcctgtggattctcttacaagtag

SEQ ID NO: 180938 - DNA, 1821 bp, Artificial Sequence
  derived and/or modified sequence
atgtccgatactagcgagtccggcgccggtctgacaaggtttcaggccgaggcttccgagaaagactcaagcagtatgatgcagaccttactaacagtgacacagaatgtcgaggttcccgaaacccccaaggcttccaaggccctggaggtcagcgaggatgttaaggtgtccaaagcctcaggtgtttcaaaggctacagaagtttcgaagacacccgaagcgagagaggccccggctacccaggcgtcgtccacgacacagttgacagatacacaggtgctagccgccgaaaacaagagtctggctgccgatacaaagaagcagaatgctgaccctcaagccgtgacgatgcctgcaaccgagactaagaaggtgtcccatgtcgctgataccaaggtcaatactaaagcccaggaaactgaagccgcaccctcccaggcccccgcagacgaacccgagcctgaatccgctgccgcgcagtctcaggaaaaccaagatactcgacccaaggtgaaggccaagaaggccagaaaagtcaaacatctggatggcgaagaggatggctccagcgatcaaagtcaggcgtctggtactaccggcggaagaagagtgtcaaaggctctcatggcgtccatggctcgcagggcttctagaggacctatagccttctgggctagacgggcctctcgcacaaggctcgccgcatgggctcggagggcactgttaagtctgcggagtcccaaagcccggagagggaaggcgcgcaggcgagccgccaagcttcagagctctcaagagcccgaggccccaccccccagagatgtggcccttttgcaggggagagccaacgatctggttaagtacttactcgccaaagatcagacgaagataccgattaaacggagcgatatgctcaaagacattattaaggaatacaccgacgtgtatccagagatcattgaaagggcgggatacagtctggaaaaagtgtttggaattcagctcaaagaaatcgacaagaatgaccacctgtacatcctactgagcacccttgaaccaacagacgccggcatcctcggcaccactaaggatagccctaaacttggattgcttatggtgttgttgtctatcatcttcatgaacggaaatcggtcctcagaagccgtgatatgggaggtgttgaggaaactcggtctgcggcccggtattcatcactccctgttcggtgatgtgaaaaaattaataacagacgagttcgtaaagcagaagtatctggactacgctcgggtgcctaactctaacccacccgagtacgagttcttctggggactgaggtcctattacgagacatccaagatgaaagtactgaagttcgcttgtaaggtgcagaagaaagacccaaaggagtgggccgcccagtatcgcgaggcaatggaggctgacctcaaggccgctgcggaagccgctgctgaagcaaaagcccgagccgaaattagggcacgtatgggaatcgggctggggtcggagaacgccgctggcccttgtaattgggacgaagccgacatcggtccctgggcgaaggccaggattcaagcgggagccgaggccaaagccaaagctcaggaatccggctccgcctccacaggagcatcaaccagcacaaacaacagcgcaagcgccagtgcctccacatccggcgggttctcagcaggagccagccttaccgcaacattgacatttggcctcttcgcgggtctgggaggcgctggagcatccacgagtgggagttccggggcttgcggcttttcttataaatag

SEQ ID NO: 180939 - DNA, 1566 bp, Artificial Sequence
  derived and/or modified sequence
atgtcggacactagcgaatcaggcgcaggtctaactaggttccaagctgaagccagcgaaaaagacagcagcagtatgatgcagactttactgactgtcactcagaacgttgaggtcccggagacccccaaggccagcagtaccacacagctcacagatacccaggtacttgctgccgagaataagagcctcgccgccgataccaagaaacaaaacgccgacccacaggcggtcactatgcccgcaacggagaccaaaaaggtaagtcacgttgctgacaccaaagtcaacaccaaagcccaggaaacagaggccgctccaagccaggccccagccgacgagccggaacctgagtccgctgccgctcagagccaggagaaccaagacacccggccaaaagttaaagcaaaaaaggcccgaaaagtcaagcatctggacggcgaagaggatgggtcctccgatcagagccaagcaagcggcactaccgggggccgcagggtgagcaaggctcgacggcgggcagccaagctgcaaagctcccaggaaccagaggccccgccccctcgagatgtggcgctgctgcaggggagagcaaacgatctggtgaaatatctactggctaaggaccagaccaaaatacctatcaagcggtctgacatgcttaaagacatcataaaagagtacaccgacgtctatcctgagattatagagcgcgccggttactctctggaaaaggtctttgggatccagcttaaggaaatagataaaaatgatcacctctatattctgctgtccacactggagccaaccgacgctgggatactgggtaccacaaaggattcaccaaagctgggattactcatggtgctgctaagcataatctttatgaacggaaaccgaagctccgaggccgtaatttgggaggttctgaggaaactgggtctgcggcccggtatccaccattccctatttggcgacgtcaagaaactgattacagacgaatttgtgaaacaaaagtaccttgattatgcacgcgtgcctaatagcaatcctccagagtatgaattcttctggggcctacgttcctattatgagacatcaaagatgaaggtgctgaagttcgcctgtaaagtgcagaaaaaagatcctaaagagtgggctgcccagtaccgcgaagctatggaagcagatctcaaggctgccgccgaggccgctgccgaagctaaggcacgagccgaaattcgcgcaaggatgggcattgggttgggatctgaaaacgccgccggaccttgtaactgggatgaggccgatatcggcccgtgggccaaggctcggattcaagccggggcagaggctaaggctaaagcccaagaatcgggatccgcttcaaccggggcatctacatccacaaataactcagcctctgcatccgcctccacctctgggggattcagtgctggtgctagcctgacagctaccttgactttcgggctgtttgccggcctgggcggtgccggcgcctcgacatcaggcagctctggagcgtgcgggttttcgtacaagtag

SEQ ID NO: 180940 - DNA, 1566 bp, Artificial Sequence
  derived and/or modified sequence
atgagcgatacttcagaatccggggcaggcctgacaaggtttcaggccgaggcctcggagaaggactcgtcctccatgatgcagacactgctcaccgtaacccaaaacgtcgaagtgcctgagacacccaaagcctcttccactacccagctgactgacacccaggtgttggctgccgaaaataagagtctagccgctgacacaaaaaaacagaacgctgatccccaagctgttaccatgcccgccaccgaaacaaagaaagtgtcccatgtggcggatactaaagtgaataccaaggcccaggagacagaagctgccccttcgcaggcccccgccgatgagcctgagcccgagtccgctgccgcacagtctcaggaaaatcaagatacaaggcctaaggtaaaagcaaaaaaagcacggaaggtgaaacacctggatggagaggaggacggttcttccgaccagtctcaggcctctggcactacaggcggcagacgcgtctctaaagcccgacgccgcgctgcaaagctccagtcgagccaagaacccgaggctcctcctccgagggacgtggccctcctgcaaggccgggccaacgatctggtgaaatacctgctcgctaaggatcaaaccaagatcccaattaaaaggtctgacatgcttaaggacattatcaaggaatacacagatgtctatcctgaaatcatcgagagagcaggatattctttagagaaagtgtttgggatccagttaaaggaaattgataaaaacgaccacctgtatatcctgctcagcacactggaacccactgatgcaggaattcttggaaccactaaagatagccctaaactcggtctccttatggtcctgctcagtatcatttttatgaatggtaatagatccagcgaagccgtgatctgggaggtgttacgcaagctgggcctgaggcctgggattcatcacagccttttcggcgacgtgaaaaagttgattactgatgaattcgtgaaacaaaaataccttgattatgcaagagtgcccaacagcaatccacctgagtacgagttcttttggggcctgcgcagttactacgaaacctccaaaatgaaggtgctgaaatttgcttgcaaagtgcaaaagaaggaccccaaggagtgggccgcccagtatagggaggcaatggaggcggacctcaaggcagccgccgaggctgccgccgaagcaaaagctagagccgaaatccgggcgcgcatgggcataggactgggaagcgagaatgcagccgggccctgtaactgggacgaggccgatataggaccatgggccaaagctagaattcaggcaggagctgaggccaaggcaaaggcccaagagtccggcagcgcatctacaggtgcttccacctcaactaataattccgccagtgcatcagccagcacatcaggcggattttcagccggggcatcactgaccgctaccctgacattcgggctctttgccggattgggtggagccggagctagcacttcaggctcttccggagcttgtggcttctcatataagtag

SEQ ID NO: 180941 - DNA, 1821 bp, Artificial Sequence
  derived and/or modified sequence
atgagcgatacttcggagagtggggccggcctaactagattccaagctgaagctagcgagaaggacagctccagtatgatgcagacgcttctcacggtaacacagaatgtcgaagtgccagaaactcctaaggcgagcaaagccctagaggtctcagaagatgttaaagtgagtaaagcttcaggtgttagcaaggccactgaggtttccaaaactcccgaggcacgtgaggcgccagctacacaggcctcttcgactacccagcttaccgatacacaagtcctagcagccgaaaataagtccctggcggctgatactaaaaagcagaacgcagatcctcaggcagtcaccatgcctgccaccgaaacaaagaaggtgtcccatgtcgccgacactaaagtgaatacaaaggcccaggaaactgaggcagcccccagccaggcgcctgcagatgaaccggaacctgaatccgccgccgctcaatctcaggagaaccaggacacaaggcccaaagttaaggccaagaaggctcgcaaagtgaaacacctggatggggaagaagacggatctagcgaccagtctcaggcgtcaggcaccaccggcggccgcagagtgtctaaagcactgatggcctccatggcccgtagagccagccgggggccaatcgcgttttgggcccgtcgcgcgtcccgcacgagacttgcagcctgggccagacgcgcgctcctgtcgctgaggtcacctaaagccagacgcggaaaggctcgacggagagccgccaagctccaaagcagtcaggagcctgaagccccccctccaagggatgtagccctgttgcaaggtcgcgctaacgacttggtgaaatatttactggccaaggaccagaccaaaattcctatcaaacgcagtgacatgttgaaggatataattaaggagtatactgatgtctacccagagatcatcgagagggcgggctattccctcgagaaggtgttcggcattcagctgaaggaaattgataagaatgaccatttgtacattttgctatctaccctcgaacctaccgatgctggaatactcggcactaccaaggactctcccaaattaggcctgctcatggttctgctgtctataattttcatgaatgggaataggagcagtgaggccgtgatttgggaggtactgagaaagctgggactgcgtcctggcatccatcactccctgttcggggatgttaaaaaattgatcacggatgagttcgttaagcaaaaatacctggattatgctagggtgccaaacagtaatccacccgagtacgaattcttctggggcctcaggagctattacgagaccagcaaaatgaaggtgctcaaattcgcctgtaaggttcagaaaaaggatccaaaggaatgggctgcgcaataccgtgaggctatggaggctgatctgaaggccgcagccgaggctgccgctgaggctaaagcgcgagccgagatcagagcgcgtatgggcattggcctgggcagcgagaatgcagctggcccgtgcaactgggatgaagcggacatcggcccttgggccaaggccaggattcaggccggagcagaggccaaagccaaggcccaggagagcggctccgcgagcaccggagcctcaacatcaaccaacaattctgcgtcagcaagtgccagcacttccggcgggttttctgctggcgcatcacttactgcaactctaactttcggtctgtttgccggtctaggtggcgccggcgcatctaccagtggaagttccggcgcatgcggtttctcctataaatag

SEQ ID NO: 180942 - DNA, 1821 bp, Artificial Sequence
  derived and/or modified sequence
atgtctgatacgtctgagtcaggggctggtctaacacgcttccaggctgaagcgtctgaaaaagacagttcttccatgatgcagacgttgttaaccgtgacccaaaatgtggaggtacccgagaccccaaaagcttctaaggcacttgaggtttctgaagatgtcaaggtgagcaaagccagtggtgtgagcaaggccactgaggtgagtaagacacccgaggcacgtgaggctccagccacacaggcatcttccactacacagctgaccgacacccaggtactggcagccgagaacaaaagccttgcagctgatacaaaaaagcagaacgccgatccacaggccgtgactatgcctgccacggaaacaaaaaaagtaagccacgtggctgatacgaaagttaatactaaggcccaggagactgaagccgcccccagtcaagcccccgctgacgagcccgagcccgagagcgcagcagcgcagagccaagaaaaccaggacacaaggccgaaagtcaaagcgaaaaaggccaggaaagttaagcatcttgatggggaagaagacgggtcgtctgatcagagccaggcaagcggcactaccggcggacgaagggtgagcaaagctctgatggcaagtatggcgcgaagggcaagtcgtggcccaatcgctttctgggccagacgggctagccgcactcggcttgccgcctgggccaggagagctttgctgagtctgaggtcacccaaggctagaagaggaaaagctcgtcggcgagcggcaaagcttcagagctcacaggagcccgaagcaccccctccacgagatgttgccctgctgcagggtcgggccaacgacctggttaaatacctcctcgcaaaggatcagacaaaaattccaatcaaaaggagcgacatgctgaaagatatcatcaaggagtacacagatgtctaccctgagattatagagcgggcgggatacagcttagaaaaagtcttcggtattcagctgaaagaaattgacaagaatgatcatctctacattctgctgagcacacttgaacccactgatgctggcattctcggcacgaccaaggattcacccaagctgggattgttgatggtcctactaagtatcatctttatgaacggcaatcgctcaagcgaagcagtcatctgggaggttctgcggaagctcggactccgcccaggcatccatcactctctcttcggagatgtaaagaaactgatcacagacgaatttgtgaagcagaaatatctggactatgctcgtgttcctaactctaatccacccgaatatgaattcttttggggtctcaggtcatattatgaaacttctaaaatgaaggtgctgaagtttgcctgtaaggttcaaaagaaagatcctaaggagtgggccgcacagtacagagaggcaatggaggcggatcttaaggccgcggcagaggctgccgctgaggctaaagctcgggccgagattcgggccaggatgggcatcggactagggtctgagaatgctgccggcccttgtaattgggacgaggctgacataggcccctgggcaaaggcgaggatacaggccggcgctgaggcaaaggcaaaagcgcaggagtcgggctcagcatcgaccggagcttccacctccacgaataacagcgctagtgcatctgcctctacgtctggcggattttcagcaggtgccagtcttactgccaccctgacctttggtctgtttgctggtctcggcggtgctggcgcttcgaccagtggatctagtggtgcctgtgggtttagctacaagtag

SEQ ID NO: 180943 - DNA, 1767 bp, Artificial Sequence
  derived and/or modified sequence
atgtctgacaccagcgagagcggggccggcctgacccgcttccaggccgaggccagcgagaaggacagcagctccatgatgcagaccctgctgactgtgacccagaatgtggaggtgcctgagacccccaaggccagcaaggccacagaggtgtccaagaccccagaggcccgggaggccccagccacccaggccagcagcaccacccagctgacagacacccaggtgctggccgctgagaacaagagcctggccgctgacaccaagaagcagaatgctgacccccaggccgtgaccatgcctgccacagagaccaagaaggtgagccacgtggccgacaccaaggtgaacaccaaggcccaggagacagaagctgcccccagccaggccccagcagatgagcctgagcctgagagcgctgctgcccagagccaggagaaccaggacacccggcccaaggtgaaggccaagaaggccaggaaggtgaagcacctggatggagaagaagatggcagcagtgaccagagccaggccagcggcaccaccggcggcagaagagtgtccaaggccctgatggcctccatggcccggcgggccagccggggccccatcgccttctgggcccggcgggccagcaggacccggctggccgcctgggcccggcgggccctgctgagcctgcggagccccaaggcccggcggggcaaggccaggagaagagctgccaagctgcagagcagccaggagcctgaggcccccccaccaagagatgtggccctgctgcagggccgggccaatgacctggtgaagtacctgctggccaaggaccagaccaagatccccatcaagagaagtgacatgctgaaggacatcatcaaggagtacacagatgtgtacccagagatcatcgagcgggccggctacagcctggagaaggtgtttggcatccagctgaaggagattgacaagaatgaccacctgtacatcctgctgagcaccctggagcccacagatgctggcatcctgggcaccaccaaggacagccccaagctgggcctgctgatggtgctgctgagcatcatcttcatgaatggaaacagaagcagcgaggccgtcatctgggaggtgctgaggaagctgggcctgcggcccggcatccaccacagcctgtttggagatgtgaagaagctgatcacagatgaatttgtgaagcagaagtacctggactatgcccgggtgcccaacagcaaccccccagaatatgagttcttctggggcctgcggagctactatgagaccagcaagatgaaggtgctgaagtttgcctgcaaggtgcagaagaaggaccccaaggagtgggccgcccagtaccgggaggccatggaggccgacctgaaggctgctgctgaggccgctgctgaggccaaggcccgggcagagatccgggccaggatgggcatcggcctgggctctgaaaatgctgctggcccctgcaactgggatgaagctgacatcggcccctgggccaaggcccgcatccaggccggggctgaggccaaggccaaggcccaggagagcggcagcgccagcactggagccagcaccagcaccaacaacagcgccagcgccagcgccagcaccagcggcggcttctctgctggggccagcctgacagccaccctgaccttcggcctgtttgctggcctgggcggggccggggccagcaccagcggcagcagcggggcctgtggcttctcctacaagtag

SEQ ID NO: 180944 - DNA, 1653 bp, Artificial Sequence
  derived and/or modified sequence
atgtggaggagccagaggcaccggcggccccagagggtgtccaagaccccagaggcccgggaggccccagccacccaggccagcagcaccacccagctgacagacacccaggtgctggccgctgagaacaagagcctggccgctgacaccaagaagcagaatgctgacccccaggccgtgaccatgcctgccacagagaccaagaaggtgagccacgtggccgacaccaaggtgaacaccaaggcccaggagacagaagctgcccccagccaggccccagcagatgagcctgagcctgagagcgctgctgcccagagccaggagaaccaggacacccggcccaaggtgaaggccaagaaggccaggaaggtgaagcacctggatggagaagaagatggcagcagtgaccagagccaggccagcggcaccaccggcggcagaagagtgtccaaggccctgatggcctccatggcccggcgggccagccggggccccatcgccttctgggcccggcgggccagcaggacccggctggccgcctgggcccggcgggccctgctgagcctgcggagccccaaggcccggcggggcaaggccaggagaagagctgccaagctgcagagcagccaggagcctgaggcccccccaccaagagatgtggccctgctgcagggccgggccaatgacctggtgaagtacctgctggccaaggaccagaccaagatccccatcaagagaagtgacatgctgaaggacatcatcaaggagtacacagatgtgtacccagagatcatcgagcgggccggctacagcctggagaaggtgtttggcatccagctgaaggagattgacaagaatgaccacctgtacatcctgctgagcaccctggagcccacagatgctggcatcctgggcaccaccaaggacagccccaagctgggcctgctgatggtgctgctgagcatcatcttcatgaatggaaacagaagcagcgaggccgtcatctgggaggtgctgaggaagctgggcctgcggcccggcatccaccacagcctgtttggagatgtgaagaagctgatcacagatgaatttgtgaagcagaagtacctggactatgcccgggtgcccaacagcaaccccccagaatatgagttcttctggggcctgcggagctactatgagaccagcaagatgaaggtgctgaagtttgcctgcaaggtgcagaagaaggaccccaaggagtgggccgcccagtaccgggaggccatggaggccgacctgaaggctgctgctgaggccgctgctgaggccaaggcccgggcagagatccgggccaggatgggcatcggcctgggctctgaaaatgctgctggcccctgcaactgggatgaagctgacatcggcccctgggccaaggcccgcatccaggccggggctgaggccaaggccaaggcccaggagagcggcagcgccagcactggagccagcaccagcaccaacaacagcgccagcgccagcgccagcaccagcggcggcttctctgctggggccagcctgacagccaccctgaccttcggcctgtttgctggcctgggcggggccggggccagcaccagcggcagcagcggggcctgtggcttctcctacaagtag

SEQ ID NO: 180945 - DNA, 1566 bp, Artificial Sequence
  derived and/or modified sequence
atgtctgacaccagcgagagcggggccggcctgacccgcttccaggccgaggccagcgagaaggacagcagctccatgatgcagaccctgctgactgtgacccagaatgtggaggtgcctgagacccccaaggccagcagcaccacccagctgacagacacccaggtgctggccgctgagaacaagagcctggccgctgacaccaagaagcagaatgctgacccccaggccgtgaccatgcctgccacagagaccaagaaggtgagccacgtggccgacaccaaggtgaacaccaaggcccaggagacagaagctgcccccagccaggccccagcagatgagcctgagcctgagagcgctgctgcccagagccaggagaaccaggacacccggcccaaggtgaaggccaagaaggccaggaaggtgaagcacctggatggagaagaagatggcagcagtgaccagagccaggccagcggcaccaccggcggcagaagagtgtccaaggcccggcggcgggccgccaagctgcagagcagccaggagcctgaggcccccccaccaagagatgtggccctgctgcagggccgggccaatgacctggtgaagtacctgctggccaaggaccagaccaagatccccatcaagagaagtgacatgctgaaggacatcatcaaggagtacacagatgtgtacccagagatcatcgagagagctggctacagcctggagaaggtgtttggcatccagctgaaggagattgacaagaatgaccacctgtacatcctgctgagcaccctggagcccacagatgctggcatcctgggcaccaccaaggacagccccaagctgggcctgctgatggtgctgctgagcatcatcttcatgaatggaaacagaagcagcgaggccgtcatctgggaggtgctgaggaagctgggcctgcggcccggcatccaccacagcctgtttggagatgtgaagaagctgatcacagatgaatttgtgaagcagaagtacctggactatgcccgggtgcccaacagcaaccccccagaatatgagttcttctggggcctgcggagctactatgagaccagcaagatgaaggtgctgaagtttgcctgcaaggtgcagaagaaggaccccaaggagtgggccgcccagtaccgggaggccatggaggccgacctgaaggctgctgctgaggccgctgctgaggccaaggcccgggcagagatccgggccaggatgggcatcggcctgggctctgaaaatgctgctggcccctgcaactgggatgaggccgacatcggcccctgggccaaggcccgcatccaggccggggctgaggccaaggccaaggcccaggagagcggcagcgccagcactggagccagcaccagcaccaacaacagcgccagcgccagcgccagcaccagcggcggcttctctgctggggccagcctgacagccaccctgaccttcggcctgtttgctggcctgggcggggccggggccagcaccagcggcagcagcggggcctgtggcttctcctacaagtag

SEQ ID NO: 180946 - DNA, 1932 bp, Artificial Sequence
  derived and/or modified sequence
ggagggcagtctccgagtttcggaggggcttggagtgagtggacgcactcgggaattgtaggaggacgaggctcagctcttgccaggccaaattgagacatgtctgacacaagcgagagtggtgcaggtctaactcgcttccaggctgaagcttcagaaaaggacagtagctcgatgatgcagactctgttgacagtgacccagaatgtggaggtcccagagacaccgaaggcctcaaaggcactggaggtctcagaggatgtgaaggtctcaaaagcctctggggtctcaaaggccacagaggtctcaaagaccccagaggctcgggaggcacctgccacccaggcctcatctactactcagctgactgatacccaggttctggcagctgaaaacaagagtctagcagctgacaccaagaaacagaatgctgacccgcaggctgtgacaatgcctgccactgagaccaaaaaggtcagccatgtggctgatacaaaggtcaatacaaaggctcaggagactgaggctgcaccctctcaggccccagcagatgaacctgagcctgagagtgcagctgcccagtctcaggagaatcaggatactcggcccaaggtcaaagccaagaaagcccgaaaggtgaagcatctggatggggaagaggatggcagcagtgatcagagtcaggcttctggaaccacaggtggccgaagggtctcaaaggccctaatggcctcaatggcccgcagggcttcaaggggtcccatagccttttgggcccgcagggcatcaaggactcggttggctgcttgggcccggagagccttgctctccctgagatcacctaaagcccgtaggggcaaggctcgccgtagagctgccaagctccagtcatcccaagagcctgaagcaccaccacctcgggatgtggcccttttgcaagggagggcaaatgatttggtgaagtaccttttggctaaagaccagacgaagattcccatcaagcgctcggacatgctgaaggacatcatcaaagaatacactgatgtgtaccccgaaatcattgaacgagcaggctattccttggagaaggtatttgggattcaattgaaggaaattgataagaatgaccacttgtacattcttctcagcaccttagagcccactgatgcaggcatactgggaacgactaaggactcacccaagctgggtctgctcatggtgcttcttagcatcatcttcatgaatggaaatcggtccagtgaggctgtcatctgggaggtgctgcgcaagttggggctgcgccctgggatacatcattcactctttggggacgtgaagaagctcatcactgatgagtttgtgaagcagaagtacctggactatgccagagtccccaatagcaatccccctgaatatgagttcttctggggcctgcgctcttactatgagaccagcaagatgaaagtcctcaagtttgcctgcaaggtacaaaagaaggatcccaaggaatgggcagctcagtaccgagaggcgatggaagcggatttgaaggctgcagctgaggctgcagctgaagccaaggctagggccgagattagagctcgaatgggcattgggctcggctcggagaatgctgccgggccctgcaactgggacgaagctgatatcggaccctgggccaaagcccggatccaggcgggagcagaagctaaagccaaagcccaagagagtggcagtgccagcactggtgccagtaccagtaccaataacagtgccagtgccagtgccagcaccagtggtggcttcagtgctggtgccagcctgaccgccactctcacatttgggctcttcgctggccttggtggagctggtgccagcaccagtggcagctctggtgcctgtggtttctcctacaagtgagattttaggtat

SEQ ID NO: 180947 - DNA, 1848 bp, Artificial Sequence
  derived and/or modified sequence
tagagaaggcagacgcatcccgaactcgctggaggacaaggctcagctcttgccaggccaaattgagacatgtctgacacaagcgagagtggtgcaggtctaactcgcttccaggctgaagcttcagaaaaggacagtagctcgatgatgcagactctgttgacagtgacccagaatgtggaggtcccagagacaccgaaggcctcaaaggccacagaggtctcaaagaccccagaggctcgggaggcacctgccacccaggcctcatctactactcagctgactgatacccaggttctggcagctgaaaacaagagtctagcagctgacaccaagaaacagaatgctgacccgcaggctgtgacaatgcctgccactgagaccaaaaaggtcagccatgtggctgatacaaaggtcaatacaaaggctcaggagactgaggctgcaccctctcaggccccagcagatgaacctgagcctgagagtgcagctgcccagtctcaggagaatcaggatactcggcccaaggtcaaagccaagaaagcccgaaaggtgaagcatctggatggggaagaggatggcagcagtgatcagagtcaggcttctggaaccacaggtggccgaagggtctcaaaggccctaatggcctcaatggcccgcagggcttcaaggggtcccatagccttttgggcccgcagggcatcaaggactcggttggctgcttgggcccggagagccttgctctccctgagatcacctaaagcccgtaggggcaaggctcgccgtagagctgccaagctccagtcatcccaagagcctgaagcaccaccacctcgggatgtggcccttttgcaagggagggcaaatgatttggtgaagtaccttttggctaaagaccagacgaagattcccatcaagcgctcggacatgctgaaggacatcatcaaagaatacactgatgtgtaccccgaaatcattgaacgagcaggctattccttggagaaggtatttgggattcaattgaaggaaattgataagaatgaccacttgtacattcttctcagcaccttagagcccactgatgcaggcatactgggaacgactaaggactcacccaagctgggtctgctcatggtgcttcttagcatcatcttcatgaatggaaatcggtccagtgaggctgtcatctgggaggtgctgcgcaagttggggctgcgccctgggatacatcattcactctttggggacgtgaagaagctcatcactgatgagtttgtgaagcagaagtacctggactatgccagagtccccaatagcaatccccctgaatatgagttcttctggggcctgcgctcttactatgagaccagcaagatgaaagtcctcaagtttgcctgcaaggtacaaaagaaggatcccaaggaatgggcagctcagtaccgagaggcgatggaagcggatttgaaggctgcagctgaggctgcagctgaagccaaggctagggccgagattagagctcgaatgggcattgggctcggctcggagaatgctgccgggccctgcaactgggacgaagctgatatcggaccctgggccaaagcccggatccaggcgggagcagaagctaaagccaaagcccaagagagtggcagtgccagcactggtgccagtaccagtaccaataacagtgccagtgccagtgccagcaccagtggtggcttcagtgctggtgccagcctgaccgccactctcacatttgggctcttcgctggccttggtggagctggtgccagcaccagtggcagctctggtgcctgtggtttctcctacaagtgagattttaggtat

SEQ ID NO: 180948 - DNA, 2169 bp, Artificial Sequence
  derived and/or modified sequence
gacttcgagagggacttagagaaggcagacgcatcccgaactcgctggaggacaaggctcagctcttgccaggccaaattgagacatgtctgacacaagcgagagtggtgcaggtctaactcgcttccaggctgaagcttcagaaaaggacagtagctcgatgatgcagactctgttgacagtgacccagaatgtggaggtcccagagacaccgaaggcctcaaagggtctcaaagaccccagaggctcgggaggcacctgccacccaggcctcatctactactcagctgactgatacccaggttctggcagctgaaaacaagagtctagcagctgacaccaagaaacagaatgctgacccgcaggctgtgacaatgcctgccactgagaccaaaaaggtcagccatgtggctgatacaaaggtcaatacaaaggctcaggagactgaggctgcaccctctcaggccccagcagatgaacctgagcctgagagtgcagctgcccagtctcaggagaatcaggatactcggcccaaggtcaaagccaagaaagcccgaaaggtgaagcatctggatggggaagaggatggcagcagtgatcagagtcaggcttctggaaccacaggtggccgaagggtctcaaaggccctaatggcctcaatggcccgcagggcttcaaggggtcccatagccttttgggcccgcagggcatcaaggactcggttggctgcttgggcccggagagccttgctctccctgagatcacctaaagcccgtaggggcaaggctcgccgtagagctgccaagctccagtcatcccaagagcctgaagcaccaccacctcgggatgtggcccttttgcaagggagggcaaatgatttggtgaagtaccttttggctaaagaccagacgaagattcccatcaagcgctcggacatgctgaaggacatcatcaaagaatacactgatgtgtaccccgaaatcattgaacgagcaggctattccttggagaaggtatttgggattcaattgaaggaaattgataagaatgaccacttgtacattcttctcagcaccttagagcccactgatgcaggcatactgggaacgactaaggactcacccaagctgggtctgctcatggtgcttcttagcatcatcttcatgaatggaaatcggtccagtgaggctgtcatctgggaggtgctgcgcaagttggggctgcgccctgggatacatcattcactctttggggacgtgaagaagctcatcactgatgagtttgtgaagcagaagtacctggactatgccagagtccccaatagcaatccccctgaatatgagttcttctggggcctgcgctcttactatgagaccagcaagatgaaagtcctcaagtttgcctgcaaggtacaaaagaaggatcccaaggaatgggcagctcagtaccgagaggcgatggaagcggatttgaaggctgcagctgaggctgcagctgaagccaaggctagggccgagattagagctcgaatgggcattgggctcggctcggagaatgctgccgggccctgcaactgggacgaagctgatatcggaccctgggccaaagcccggatccaggcgggagcagaagctaaagccaaagcccaagagagtggcagtgccagcactggtgccagtaccagtaccaataacagtgccagtgccagtgccagcaccagtggtggcttcagtgctggtgccagcctgaccgccactctcacatttgggctcttcgctggccttggtggagctggtgccagcaccagtggcagctctggtgcctgtggtttctcctacaagtgagattttaggtatctgccttggtttcagtggggacatctggggcttatggggctgggatgaggagctggatgattctaggaaggcccaagttggagaatgatgtggagagtgtgccaagacactgcttttggcattttattcctttctgtttgctggatgtcaattgacccttttattttctcttacttgtgttttcagatattgttaatcctgccagtctttctcttcaagccagggtgcatcctcagaaacctactcaacacagcactctaggcagccactatcaatcaattgaagttgacactctgcattaaatctatttgcc

SEQ ID NO: 180949 - DNA, 1927 bp, Artificial Sequence
  derived and/or modified sequence
ggaggctgagacttcgagagggacttagagaaggcagacgcatcccgaactcgctggaggacaaggctcagctcttgccaggccaaattgagacatgtctgacacaagcgagagtggtgcaggtctaactcgcttccaggctgaagcttcagaaaaggacagtagctcgatgatgcagactctgttgacagtgacccagaatgtggaggtcccagagacaccgaaggcctcaaaggcactggaggtctcagaggatgtgaaggtctcaaaagcctctggggtctcaaaggccacagaggtctcaaagaccccagaggctcgggaggcacctgccacccaggcctcatctactactcagctgactgatacccaggttctggcagctgaaaacaagagtctagcagctgacaccaagaaacagaatgctgacccgcaggctgtgacaatgcctgccactgagaccaaaaaggtcagccatgtggctgatacaaaggtcaatacaaaggctcaggagactgaggctgcaccctctcaggccccagcagatgaacctgagcctgagagtgcagctgcccagtctcaggagaatcaggatactcggcccaaggtcaaagccaagaaagcccgaaaggtgaagcatctggatggggaagaggatggcagcagtgatcagagtcaggcttctggaaccacaggtggccgaagggtctcaaaggccctaatggcctcaatggcccgcagggcttcaaggggtcccatagccttttgggcccgcagggcatcaaggactcggttggctgcttgggcccggagagccttgctctccctgagatcacctaaagcccgtaggggcaaggctcgccgtagagctgccaagctccagtcatcccaagagcctgaagcaccaccacctcgggatgtggcccttttgcaagggagggcaaatgatttggtgaagtaccttttggctaaagaccagacgaagattcccatcaagcgctcggacatgctgaaggacatcatcaaagaatacactgatgtgtaccccgaaatcattgaacgagcaggctattccttggagaaggtatttgggattcaattgaaggaaattgataagaatgaccacttgtacattcttctcagcaccttagagcccactgatgcaggcatactgggaacgactaaggactcacccaagctgggtctgctcatggtgcttcttagcatcatcttcatgaatggaaatcggtccagtgaggctgtcatctgggaggtgctgcgcaagttggggctgcgccctgggatacatcattcactctttggggacgtgaagaagctcatcactgatgagtttgtgaagcagaagtacctggactatgccagagtccccaatagcaatccccctgaatatgagttcttctggggcctgcgctcttactatgagaccagcaagatgaaagtcctcaagtttgcctgcaaggtacaaaagaaggatcccaaggaatgggcagctcagtaccgagaggcgatggaagcggatttgaaggctgcagctgaggctgcagctgaagccaaggctagggccgagattagagctcgaatgggcattgggctcggctcggagaatgctgccgggccctgcaactgggacgaagctgatatcggaccctgggccaaagcccggatccaggcgggagcagaagctaaagccaaagcccaagagagtggcagtgccagcactggtgccagtaccagtaccaataacagtgccagtgccagtgccagcaccagtggtggcttcagtgctggtgccagcctgaccgccactctcacatttgggctcttcgctggccttggtggagctggtgccagcaccagtggcagctctggtgcctgtggtttctcctacaagtgagattttaggtat

SEQ ID NO: 180950 - DNA, 2048 bp, Artificial Sequence
  derived and/or modified sequence
agtctccgagtttcggaggggcttggagtgagtggacgcactcgggaattgtaggaggacgaggctcagctcttgccaggccaaattgagacatgtctgacacaagcgagagtggtgcaggtctaactcgcttccaggctgaagcttcagaaaaggacagtagctcgatgatgcagactctgttgacagtgacccagaatgtggaggtcccagagacaccgaaggcctcaaaggcactggaggtctcagaggatgtgaaggtctcaaaagcctctggggtctcaaaggccacagaggtctcaaagaccccagaggctcgggaggcacctgccacccaggcctcatctactactcagctgactgatacccaggttctggcagctgaaaacaagagtctagcagctgacaccaagaaacagaatgctgacccgcaggctgtgacaatgcctgccactgagaccaaaaaggtcagccatgtggctgatacaaaggtcaatacaaaggctcaggagactgaggctgcaccctctcaggccccagcagatgaacctgagcctgagagtgcagctgcccagtctcaggagaatcaggatactcggcccaaggtcaaagccaagaaagcccgaaaggtgaagcatctggatggggaagaggatggcagcagtgatcagagtcaggcttctggaaccacaggtggccgaagggtctcaaaggccctaatggcctcaatggcccgcagggcttcaaggggtcccatagccttttgggcccgcagggcatcaaggactcggttggctgcttgggcccggagagccttgctctccctgagatcacctaaagcccgtaggggcaaggctcgccgtagagctgccaagctccagtcatcccaagagcctgaagcaccaccacctcgggatgtggcccttttgcaagggagggcaaatgatttggtgaagtaccttttggctaaagaccagacgaagattcccatcaagcgctcggacatgctgaaggacatcatcaaagaatacactgatgtgtaccccgaaatcattgaacgagcaggctattccttggagaaggtatttgggattcaattgaaggaaattgataagaatgaccacttgtacattcttctcagcaccttagagcccactgatgcaggcatactgggaacgactaaggactcacccaagctgggtctgctcatggtgcttcttagcatcatcttcatgaatggaaatcggtccagtgaggctgtcatctgggaggtgctgcgcaagttggggctgcgccctgggatacatcattcactctttggggacgtgaagaagctcatcactgatgagtttgtgaagcagaagtacctggactatgccagagtccccaatagcaatccccctgaatatgagttcttctggggcctgcgctcttactatgagaccagcaagatgaaagtcctcaagtttgcctgcaaggtacaaaagaaggatcccaaggaatgggcagctcagtaccgagaggcgatggaagcggatttgaaggctgcagctgaggctgcagctgaagccaaggctagggccgagattagagctcgaatgggcattgggctcggctcggagaatgctgccgggccctgcaactgggacgaagctgatatcggaccctgggccaaagcccggatccaggcgggagcagaagctaaagccaaagcccaagagagtggcagtgccagcactggtgccagtaccagtaccaataacagtgccagtgccagtgccagcaccagtggtggcttcagtgctggtgccagcctgaccgccactctcacatttgggctcttcgctggccttggtggagctggtgccagcaccagtggcagctctggtgcctgtggtttctcctacaagtgagattttagatattgttaatcctgccagtctttctcttcaagccagggtgcatcctcagaaacctactcaacacagcactctaggcagccactatcaatcaattgaagttgacactctgcattaaatctatttgcc

SEQ ID NO: 180951 - DNA, 1798 bp, Artificial Sequence
  derived and/or modified sequence
agtctccgagtttcggaggggcttggagtgagtggacgcactcgggaattgtaggaggacgaggctcagctcttgccaggccaaattgagacatgtctgacacaagcgagagtggtgcaggtctaactcgcttccaggctgaagcttcagaaaaggacagtagctcgatgatgcagactctgttgacagtgacccagaatgtggaggtcccagagacaccgaaggcctcatctactactcagctgactgatacccaggttctggcagctgaaaacaagagtctagcagctgacaccaagaaacagaatgctgacccgcaggctgtgacaatgcctgccactgagaccaaaaaggtcagccatgtggctgatacaaaggtcaatacaaaggctcaggagactgaggctgcaccctctcaggccccagcagatgaacctgagcctgagagtgcagctgcccagtctcaggagaatcaggatactcggcccaaggtcaaagccaagaaagcccgaaaggtgaagcatctggatggggaagaggatggcagcagtgatcagagtcaggcttctggaaccacaggtggccgaagggtctcaaaggctcgccgtagagctgccaagctccagtcatcccaagagcctgaagcaccaccacctcgggatgtggcccttttgcaagggagggcaaatgatttggtgaagtaccttttggctaaagaccagacgaagattcccatcaagcgctcggacatgctgaaggacatcatcaaagaatacactgatgtgtaccccgaaatcattgaacgagcaggctattccttggagaaggtatttgggattcaattgaaggaaattgataagaatgaccacttgtacattcttctcagcaccttagagcccactgatgcaggcatactgggaacgactaaggactcacccaagctgggtctgctcatggtgcttcttagcatcatcttcatgaatggaaatcggtccagtgaggctgtcatctgggaggtgctgcgcaagttggggctgcgccctgggatacatcattcactctttggggacgtgaagaagctcatcactgatgagtttgtgaagcagaagtacctggactatgccagagtccccaatagcaatccccctgaatatgagttcttctggggcctgcgctcttactatgagaccagcaagatgaaagtcctcaagtttgcctgcaaggtacaaaagaaggatcccaaggaatgggcagctcagtaccgagaggcgatggaagcggatttgaaggctgcagctgaggctgcagctgaagccaaggctagggccgagattagagctcgaatgggcattgggctcggctcggagaatgctgccgggccctgcaactgggacgaagctgatatcggaccctgggccaaagcccggatccaggcgggagcagaagctaaagccaaagcccaagagagtggcagtgccagcactggtgccagtaccagtaccaataacagtgccagtgccagtgccagcaccagtggtggcttcagtgctggtgccagcctgaccgccactctcacatttgggctcttcgctggccttggtggagctggtgccagcaccagtggcagctctggtgcctgtggtttctcctacaagtgagattttagatattgttaatcctgccagtctttctcttcaagccagggtgcatcctcagaaacctactcaacacagcactctaggcagccactatcaatcaattgaagttgacactctgcattaaatctatttgccatttc

SEQ ID NO: 180952 - DNA, 1647 bp, Artificial Sequence
  derived and/or modified sequence
tagagaaggcagacgcatcccgaactcgctggaggacaaggctcagctcttgccaggccaaattgagacatgtctgacacaagcgagagtggtgcaggtctaactcgcttccaggctgaagcttcagaaaaggacagtagctcgatgatgcagactctgttgacagtgacccagaatgtggaggtcccagagacaccgaaggcctcatctactactcagctgactgatacccaggttctggcagctgaaaacaagagtctagcagctgacaccaagaaacagaatgctgacccgcaggctgtgacaatgcctgccactgagaccaaaaaggtcagccatgtggctgatacaaaggtcaatacaaaggctcaggagactgaggctgcaccctctcaggccccagcagatgaacctgagcctgagagtgcagctgcccagtctcaggagaatcaggatactcggcccaaggtcaaagccaagaaagcccgaaaggtgaagcatctggatggggaagaggatggcagcagtgatcagagtcaggcttctggaaccacaggtggccgaagggtctcaaaggctcgccgtagagctgccaagctccagtcatcccaagagcctgaagcaccaccacctcgggatgtggcccttttgcaagggagggcaaatgatttggtgaagtaccttttggctaaagaccagacgaagattcccatcaagcgctcggacatgctgaaggacatcatcaaagaatacactgatgtgtaccccgaaatcattgaacgagcaggctattccttggagaaggtatttgggattcaattgaaggaaattgataagaatgaccacttgtacattcttctcagcaccttagagcccactgatgcaggcatactgggaacgactaaggactcacccaagctgggtctgctcatggtgcttcttagcatcatcttcatgaatggaaatcggtccagtgaggctgtcatctgggaggtgctgcgcaagttggggctgcgccctgggatacatcattcactctttggggacgtgaagaagctcatcactgatgagtttgtgaagcagaagtacctggactatgccagagtccccaatagcaatccccctgaatatgagttcttctggggcctgcgctcttactatgagaccagcaagatgaaagtcctcaagtttgcctgcaaggtacaaaagaaggatcccaaggaatgggcagctcagtaccgagaggcgatggaagcggatttgaaggctgcagctgaggctgcagctgaagccaaggctagggccgagattagagctcgaatgggcattgggctcggctcggagaatgctgccgggccctgcaactgggacgaagctgatatcggaccctgggccaaagcccggatccaggcgggagcagaagctaaagccaaagcccaagagagtggcagtgccagcactggtgccagtaccagtaccaataacagtgccagtgccagtgccagcaccagtggtggcttcagtgctggtgccagcctgaccgccactctcacatttgggctcttcgctggccttggtggagctggtgccagcaccagtggcagctctggtgcctgtggtttctcctacaagtgagattttaggtat

SEQ ID NO: 180953 - DNA, 2189 bp, Artificial Sequence
  derived and/or modified sequence
agtggcataaacatgggctttggcgtcagacagccctgagcggggccccattgccccacccccgaggaaggcgagggggggtggcagggggctgcggaaaggggctgggctgggttgggctgtctgcagctctagtccaggaggctgagacttcgagagggacttagagaaggcagacgcatcccgaactcgctggaggacaaggctcagctcttgccaggccaaattgagacatgtctgacacaagcgagagtggtgcaggtctaactcgcttccaggctgaagcttcagaaaaggacagtagctcgatgatgcagactctgttgacagtgacccagaatgtggaggtcccagagacaccgaaggcctcaaaggcactggaggtctcagaggatgtgaaggtctcaaaagcctctggggtctcaaaggccacagaggtctcaaagaccccagaggctcgggaggcacctgccacccaggcctcatctactactcagctgactgatacccaggttctggcagctgaaaacaagagtctagcagctgacaccaagaaacagaatgctgacccgcaggctgtgacaatgcctgccactgagaccaaaaaggtcagccatgtggctgatacaaaggtcaatacaaaggctcaggagactgaggctgcaccctctcaggccccagcagatgaacctgagcctgagagtgcagctgcccagtctcaggagaatcaggatactcggcccaaggtcaaagccaagaaagcccgaaaggtgaagcatctggatggggaagaggatggcagcagtgatcagagtcaggcttctggaaccacaggtggccgaagggtctcaaaggccctaatggcctcaatggcccgcagggcttcaaggggtcccatagccttttgggcccgcagggcatcaaggactcggttggctgcttgggcccggagagccttgctctccctgagatcacctaaagcccgtaggggcaaggctcgccgtagagctgccaagctccagtcatcccaagagcctgaagcaccaccacctcgggatgtggcccttttgcaagggagggcaaatgatttggtgaagtaccttttggctaaagaccagacgaagattcccatcaagcgctcggacatgctgaaggacatcatcaaagaatacactgatgtgtaccccgaaatcattgaacgagcaggctattccttggagaaggtatttgggattcaattgaaggaaattgataagaatgaccacttgtacattcttctcagcaccttagagcccactgatgcaggcatactgggaacgactaaggactcacccaagctgggtctgctcatggtgcttcttagcatcatcttcatgaatggaaatcggtccagtgaggctgtcatctgggaggtgctgcgcaagttggggctgcgccctgggatacatcattcactctttggggacgtgaagaagctcatcactgatgagtttgtgaagcagaagtacctggactatgccagagtccccaatagcaatccccctgaatatgagttcttctggggcctgcgctcttactatgagaccagcaagatgaaagtcctcaagtttgcctgcaaggtacaaaagaaggatcccaaggaatgggcagctcagtaccgagaggcgatggaagcggatttgaaggctgcagctgaggctgcagctgaagccaaggctagggccgagattagagctcgaatgggcattgggctcggctcggagaatgctgccgggccctgcaactgggacgaagctgatatcggaccctgggccaaagcccggatccaggcgggagcagaagctaaagccaaagcccaagagagtggcagtgccagcactggtgccagtaccagtaccaataacagtgccagtgccagtgccagcaccagtggtggcttcagtgctggtgccagcctgaccgccactctcacatttgggctcttcgctggccttggtggagctggtgccagcaccagtggcagctctggtgcctgtggtttctcctacaagtgagattttagatattgttaatcctgccagtctttctcttcaagccagggtgcatcctcagaaacctactcaacacagcactctaggcagccactatcaatcaattgaagttgacactctgcattaaatctatttgcc

SEQ ID NO: 180954 - DNA, 2026 bp, Artificial Sequence
  derived and/or modified sequence
gggaaaaggggcggggtcctcagagctgccgcgctggcacatcttcctggagaaggggagggtgcggctgcagagaattgagacttagaagctttgaattcctgtatctgagaacggagtcgttgggggtggtggagggggttggaattggggacctacggaaggctcagctcttgccaggccaaattgagacatgtctgacacaagcgagagtggtgcaggtctaactcgcttccaggctgaagcttcagaaaaggacagtagctcgatgatgcagactctgttgacagtgacccagaatgtggaggtcccagagacaccgaaggcctcaaaggcactggaggtctcagaggatgtgaaggtctcaaaagcctctggggtctcaaaggccacagaggtctcaaagaccccagaggctcgggaggcacctgccacccaggcctcatctactactcagctgactgatacccaggttctggcagctgaaaacaagagtctagcagctgacaccaagaaacagaatgctgacccgcaggctgtgacaatgcctgccactgagaccaaaaaggtcagccatgtggctgatacaaaggtcaatacaaaggctcaggagactgaggctgcaccctctcaggccccagcagatgaacctgagcctgagagtgcagctgcccagtctcaggagaatcaggatactcggcccaaggtcaaagccaagaaagcccgaaaggtgaagcatctggatggggaagaggatggcagcagtgatcagagtcaggcttctggaaccacaggtggccgaagggtctcaaaggccctaatggcctcaatggcccgcagggcttcaaggggtcccatagccttttgggcccgcagggcatcaaggactcggttggctgcttgggcccggagagccttgctctccctgagatcacctaaagcccgtaggggcaaggctcgccgtagagctgccaagctccagtcatcccaagagcctgaagcaccaccacctcgggatgtggcccttttgcaagggagggcaaatgatttggtgaagtaccttttggctaaagaccagacgaagattcccatcaagcgctcggacatgctgaaggacatcatcaaagaatacactgatgtgtaccccgaaatcattgaacgagcaggctattccttggagaaggtatttgggattcaattgaaggaaattgataagaatgaccacttgtacattcttctcagcaccttagagcccactgatgcaggcatactgggaacgactaaggactcacccaagctgggtctgctcatggtgcttcttagcatcatcttcatgaatggaaatcggtccagtgaggctgtcatctgggaggtgctgcgcaagttggggctgcgccctgggatacatcattcactctttggggacgtgaagaagctcatcactgatgagtttgtgaagcagaagtacctggactatgccagagtccccaatagcaatccccctgaatatgagttcttctggggcctgcgctcttactatgagaccagcaagatgaaagtcctcaagtttgcctgcaaggtacaaaagaaggatcccaaggaatgggcagctcagtaccgagaggcgatggaagcggatttgaaggctgcagctgaggctgcagctgaagccaaggctagggccgagattagagctcgaatgggcattgggctcggctcggagaatgctgccgggccctgcaactgggacgaagctgatatcggaccctgggccaaagcccggatccaggcgggagcagaagctaaagccaaagcccaagagagtggcagtgccagcactggtgccagtaccagtaccaataacagtgccagtgccagtgccagcaccagtggtggcttcagtgctggtgccagcctgaccgccactctcacatttgggctcttcgctggccttggtggagctggtgccagcaccagtggcagctctggtgcctgtggtttctcctacaagtgagattttaggtat

SEQ ID NO: 180955 - DNA, 1767 bp, Artificial Sequence
  derived and/or modified sequence
atgagcgacaccagcgagagcggcgccggcctgacccggttccaggctgaggcttccgagaaagatagcagctcaatgatgcagactcttctgacagtcacacagaacgtggaggtccctgagactcccaaggccagcaaagcaaccgaagtgtctaagacacccgaggctagagaggcccctgctacacaggctagttctacaacacagttgacagatacccaggtgctggccgcggagaacaagtctctggctgccgacactaaaaaacagaacgccgatccacaggctgtcaccatgcccgctactgaaaccaagaaggttagccatgtagctgacaccaaggtaaacactaaagcccaggagacagaagcagcccccagccaagcacctgctgacgagcccgagccagagtctgcggcggcgcagtcccaagagaatcaggatacaaggcctaaagtgaaagcgaagaaagcccggaaggtgaaacaccttgatggtgaagaggacggctcatccgatcagtcacaggcgagcggaacaacagggggcagacgggtatcaaaggccctgatggcatcaatggcaaggcgtgctagtagggggcctattgcattctgggccagacgggcttcacggactcggctggctgcttgggctcggcgcgccctgctgtcccttcgcagccctaaagcacggagagggaaagctcgcaggagggcagccaagctgcaatcctcacaggagccagaagccccaccgccgcgggacgtggcgttgctgcagggaagggctaacgacttggtgaagtatctacttgctaaggaccagacaaagatccccatcaaaagatctgacatgctgaaagatatcatcaaagagtatacagacgtgtatcccgagattattgagcgtgcgggctactccctggagaaggttttcggcattcaactaaaagagatagataagaatgaccatctatatatcctgttgtctacgctggagccgacagacgctggaatactagggaccactaaagattctcctaaactgggactccttatggtgctgctgagcatcatctttatgaacggtaatcggagctctgaggctgtcatctgggaagttctccggaaactcggactgagacccggcatacatcactccctgttcggggacgtgaaaaaactaatcaccgacgagtttgtgaaacagaaatacctcgattatgccagggtgcccaacagcaacccgccagaatatgagtttttttgggggcttcggagttactacgagacttccaagatgaaagtacttaaatttgcatgcaaggtgcagaaaaaggacccaaaggagtgggctgcccagtacagggaggccatggaggctgatctgaaagccgccgccgaggcggcagccgaggcgaaagcgcgggccgagatcagggcaagaatgggaattggattaggcagtgagaatgccgctgggccctgcaactgggacgaggccgatatcggcccatgggcaaaggcccggatccaggcgggggcagaagccaaggccaaggctcaggagagcggcagcgcttctacaggggcctcgaccagcaccaacaactccgcatccgcgtccgcatccacctctggagggttttccgctggggcttctctaacagcaacactaacttttggactgttcgccgggctgggaggcgccggggcgagcacctcaggcagctccggcgcgtgtgggttcagttataagtag

SEQ ID NO: 180956 - DNA, 1653 bp, Artificial Sequence
  derived and/or modified sequence
atgtggcggagccagcggcaccggcggccccagcgggtgagcaagacacccgaggcccgcgaagccccagcgacccaggcatcttcaacaacccagctcacagatacccaggtgctggcggccgagaataagtcacttgccgccgacacaaagaagcagaatgctgatccacaggccgtgaccatgccagccacagagacgaagaaggtgtcgcatgtggccgacacaaaagttaatactaaggcacaggagaccgaagctgccccatcccaggcaccagctgatgagcccgagccagaatccgccgctgcccagagccaagagaatcaggatacacgaccaaaagtcaaggctaaaaaagctaggaaggtaaaacatctcgatggcgaagaggacgggtcttcagatcagtcccaggccagcggaacaacaggcggccggcgcgtgtccaaagccttaatggccagcatggcccgcagggcaagcaggggaccaatagccttctgggcacggcgtgcaagtcgcactcgactcgccgcttgggctcgccgtgccttactctcgttgcggtcccctaaagctcgcaggggaaaagcgcggcgacgggcagctaaacttcagtcttcacaggaacccgaggcccccccaccccgcgacgttgccttgctgcaggggcgagccaatgacctcgtgaaatatctcctcgccaaagaccagaccaagatccctataaagaggtctgatatgctgaaggatatcatcaaagagtacaccgacgtttaccccgagattattgagcgggcaggatactctctcgagaaggtctttgggatccagttgaaggagatagacaagaatgaccatttgtatattctgttatccacattagaaccaactgatgccgggattttgggcaccacaaaggacagccctaagctgggcctcctcatggtgctgttatcaattattttcatgaatggcaatagatccagcgaggccgttatatgggaagttctcaggaaactgggcctccgaccaggaatccaccactccctatttggtgacgtcaaaaagttgattacagacgagttcgtgaaacagaagtatctggattatgcaagggtgccgaacagcaacccgcctgagtacgaattcttctgggggctgcggtcatattatgaaacgtcgaaaatgaaggttctaaaatttgcatgcaaggtgcagaaaaaagacccaaaggagtgggccgcacaatacagggaggctatggaggcagatctcaaagccgccgctgaagcggcagctgaagcaaaagcacgcgccgaaatccgagcccgcatggggatcggcctgggctctgagaatgcagctggtccatgcaactgggacgaggctgacatcggcccatgggccaaagctcgcatacaggccggcgccgaagccaaggcaaaagcccaggaaagtgggtctgcatccaccggcgcttcaacctccactaataattcagcttcggcttctgcctctacatccggaggcttcagtgcgggggctagcctcacagcaaccttgacatttggattgttcgcaggactgggaggggctggagctagcacttctggcagctctggcgcatgtgggttcagctacaaatag

SEQ ID NO: 180957 - DNA, 1821 bp, Artificial Sequence
  derived and/or modified sequence
atgagcgacaccagcgagagcggcgccggcctgacccggttccaggccgaggcttcggagaaggatagctctagcatgatgcagacattgctgacagttacccagaacgttgaggtgcccgagacacctaaagcctcaaaagctctggaagtcagcgaggacgtcaaagtttcaaaagcttctggcgtgagcaaggccaccgaagtgagtaagacacctgaagcccgagaagctccggccactcaagcctccagcaccacacagctaaccgatacccaggtgctagccgccgaaaacaagagcctggctgcagatacaaaaaaacagaatgccgacccacaggctgttaccatgcctgcaacagagactaagaaagtgtctcatgttgcggataccaaggtcaatacaaaggcccaagagactgaggctgcccccagtcaggctccagccgatgaaccggagcccgagagcgccgcagcccagagtcaggagaaccaggatacccgtcctaaggtcaaagcgaagaaagcccgaaaagtgaagcacctcgacggcgaggaggatgggtcctccgatcaatcacaggcctccggaacgacaggcggcaggagggtctcaaaggcgctcatggccagcatggccagaagagcttcgagaggccccattgctttctgggcacggcgcgccagtaggaccaggcttgccgcctgggctcggagggccttattgtccctgaggagtccaaaagctcggagaggcaaagccagaagacgagcggcaaagctccagagcagtcaggaaccagaagcccctcctcctagagacgtggctctcctgcagggacgagccaacgacctggtcaaatacctgctcgcaaaggatcagacaaaaataccaatcaaaaggtctgacatgctcaaggacatcattaaggagtataccgacgtgtatcctgagatcatcgagagagctggctattcactggaaaaggtctttggcattcagctcaaagagatcgataagaacgaccacctctatatcctgctgtctacattggaaccaaccgacgccggaatactgggaacaacaaaggattcccccaagcttggtctactgatggtgctactgagcatcatcttcatgaatggtaatcgtagctctgaagccgtcatctgggaggttctgaggaagttaggcttacgcccgggaattcaccacagcctcttcggggatgtcaagaagctgatcacagacgagttcgtgaagcagaagtatctggattacgcccgcgtgcctaactcaaacccaccagaatatgagtttttctggggattgaggagttactatgaaacaagcaagatgaaggtgctcaagtttgcatgtaaggtacaaaagaaagatccgaaagaatgggctgctcaatatagagaagccatggaggcagacctcaaagccgcggccgaagccgccgctgaagctaaggcgcgcgccgaaattcgagctcgaatggggatcggcctgggatccgagaatgccgccgggccatgcaactgggatgaagccgacatcggaccctgggccaaagcaaggattcaggctggggcggaggcaaaggcaaaggcacaggaaagcggcagcgcttcgacaggtgcgtccacctcgacaaataacagtgcatcagcgtctgctagtacatcagggggcttcagtgcaggggccagcctgaccgccaccctgactttcggcctctttgcaggcttaggcggggcaggggcctccacctccggaagttcaggagcctgcgggttctcatacaaatag

SEQ ID NO: 180958 - DNA, 1821 bp, Artificial Sequence
  derived and/or modified sequence
atgagcgacaccagcgagagcggcgccggcctgacccggttccaggcggaagcttcagagaaggattcctcctccatgatgcagactcttcttactgttacccagaacgtcgaggtcccggagacgccaaaggccagcaaggcccttgaggtgtctgaggacgttaaggtctcaaaggcttcaggtgtgagtaaggctacagaagtatccaagacgcctgaggcccgcgaggctcctgcaactcaagcctcgtcgacaacccagctcacagacacccaggtcctggctgcggaaaacaaaagcctggctgccgataccaagaagcaaaacgcagatccacaggcagttaccatgcccgccaccgaaacaaagaaagtctcgcacgttgcagacactaaagttaatactaaggcacaggagactgaggcagctccatcacaggctcctgcagatgaacccgaaccagaatctgccgctgcccaatcacaggagaaccaggacactcgacccaaggtgaaggccaagaaagctcggaaagtgaagcatctcgatggggaagaggatggtagttctgaccagtcccaggcttcaggaactacaggtggaaggagggtgtctaaagccctcatggcttccatggccagaagggcttctaggggcccaattgccttttgggctcgtagggcttctaggacgcgcctggcggcctgggcccgtcgggccttgctgtctctgaggagccccaaagcaagacgtggtaaagcccgcaggcgggccgcaaaattgcaatccagccaggagcctgaagcccctcccccgcgtgatgtggctctattacagggtcgtgccaatgacctggttaagtacctgctagcaaaggaccagaccaagataccgatcaaaaggtcagatatgctgaaagatataattaaggagtacaccgacgtctatcctgagattatcgagcgcgctggatattcactggagaaggtttttggaatccagctaaaagaaatcgataaaaatgatcatttgtatatattgctcagcactctcgagcccactgacgccggcattctgggaacaaccaaagattccccaaagctcggccttctgatggtgctgttaagcataatcttcatgaacggaaataggagctccgaggctgtcatatgggaggtgctaagaaagctgggcctgcgacctggtattcatcattcactgtttggagacgtgaagaagttgatcactgatgaatttgtgaaacagaaatacctagattacgcacgagtcccaaactcaaacccccctgaatacgagttcttttgggggctacgctcatattacgagacctccaagatgaaggtccttaagtttgcttgcaaggttcagaagaaggaccctaaagagtgggctgcacagtatcgtgaagccatggaagccgacctgaaggctgcggctgaagccgctgctgaagccaaggcgcgagctgagattagggcacggatgggaatagggctggggagtgaaaacgctgccggaccctgtaattgggatgaggcagacattggcccctgggctaaagcacggatacaggctggcgccgaagccaaggcaaaagcacaagagtccggaagcgcatcaacaggggctagcacatctacgaataattcagcgagcgccagcgccagcaccagtgggggtttctctgctggcgcctcccttactgccactctgactttcgggctctttgctgggctgggcggagccggagcatcaacttccgggtcttccggcgcctgcggattcagctataagtag

SEQ ID NO: 180959 - DNA, 1566 bp, Artificial Sequence
  derived and/or modified sequence
atgagcgacaccagcgagagcggcgccggcctgacccggttccaggcggaggcctctgaaaaggattccagctccatgatgcaaacgcttctcacagttactcagaacgtggaggtccccgagactccgaaggccagtagcacaactcagcttacagacactcaagtgctcgcagccgaaaataagtctctggctgctgacaccaaaaaacaaaacgctgacccacaggccgtgactatgccagctaccgaaaccaaaaaagtgagccatgtggcggatactaaggtaaacactaaagcgcaggaaaccgaggccgccccatctcaggcacccgccgatgagccagagcctgagtcagcagcagcacagtcccaagagaaccaggatacgcgcccaaaggtcaaagctaaaaaggctcgaaaagtgaaacacctggatggggaggaggacggaagtagtgaccagtctcaagcctcaggtacaacaggcgggcggcgggtgtccaaagcacgtagaagagcagccaagcttcagagctcacaggaacccgaggccccaccgcctagagacgtggccctgcttcagggacgcgccaatgatcttgtgaaatacctgttggcaaaggatcaaacgaagatcccaataaagcgcagcgacatgctgaaggacattatcaaggaatacactgacgtttatcctgagataattgaacgcgctgggtattccttagagaaggtatttggaatacagctgaaggagatagataaaaacgatcatttgtacatcctgctgagcacactcgaacccaccgacgctggtatcctcgggactacaaaggactctcccaagcttggactgttgatggtgctactgtccatcatctttatgaacgggaatagaagtagtgaagcagtaatctgggaagtgctgagaaaactggggctcaggcccgggattcatcattctctgtttggggacgttaagaagctcatcactgacgagttcgtgaaacaaaagtacctggactacgcaagagtgcccaactctaatccccccgaatacgagtttttttggggtctgcgtagttactacgagacatctaagatgaaagttctgaagttcgcctgtaaggtccagaagaaggaccctaaggagtgggccgcacagtacagggaagcaatggaggctgacctgaaggccgctgctgaggcggctgccgaagcaaaggcacgggctgaaattcgggctaggatgggcatcgggcttggctccgaaaacgccgcaggcccgtgcaactgggacgaggctgacatcggaccatgggcaaaggcgaggatccaagctggtgccgaggccaaggccaaagctcaggagagtggcagcgcttcaactggagcctccacctcaacaaataattcagcctccgcctctgcaagtacatctggagggttctcagcaggggccagtctgactgccacgttgacattcggattgttcgccggcctgggaggcgctggagccagcacgtccgggtccagcggcgcctgcgggttctcctacaaatag

SEQ ID NO: 180960 - DNA, 1566 bp, Artificial Sequence
  derived and/or modified sequence
atgagcgacaccagcgagagcggcgccggcctgacccggttccaggccgaggcttccgagaaagacagttccagcatgatgcagaccttgctgactgtcacccagaatgtcgaggtcccagagactccaaaggcttcgtctaccacccagctcacagatactcaagtgcttgccgcagaaaataagtcactagccgccgacactaagaaacagaacgccgatccccaggcggttaccatgcccgctactgagaccaaaaaggtcagccatgtcgccgacactaaggtgaacaccaaagcacaagagaccgaagccgccccctctcaggctcctgcagatgagccagagcctgagagcgcagccgcgcagagccaggaaaaccaggatactcgcccgaaggtgaaggctaagaaggcacgtaaagtgaaacaccttgatggggaagaggatggctctagtgaccagtctcaagctagtggcacaaccggggggaggcgcgtgtccaaagcacgcagacgcgccgccaaactgcaatcatcacaggagccggaggctcccccacccagagacgtcgccctgttacagggtcgcgcaaacgacctcgtgaagtatttgcttgctaaggaccaaacaaagatcccaattaagagaagcgacatgctgaaggatattattaaggaatatacggacgtctatccggaaattatcgagagagcggggtattctctggaaaaggttttcggtatccagctgaaggagatcgataagaacgaccatctgtacattctgctatcaacgttagagccgaccgatgccggaattctaggaaccactaaggactcgccgaagttgggcttgctaatggttctgctcagcatcatctttatgaatggcaacaggtcatccgaggctgttatttgggaggtcctgaggaagttggggctcagaccgggaattcatcacagcctgtttggtgatgtcaagaagttaatcaccgatgagttcgtgaagcagaaatatttggattacgctcgcgtaccaaacagcaatccccctgagtacgagttcttctgggggctgaggtcttactacgagacgtctaagatgaaggtgctgaaatttgcgtgcaaagttcaaaaaaaggatccaaaggaatgggcggcccagtatcgcgaggccatggaggccgaccttaaagctgctgccgaggcagctgcagaagccaaggcccgagccgaaattagggcgagaatgggaataggcctcggaagcgagaacgccgccggtccatgcaactgggatgaggctgatatcgggccttgggcgaaagcccgcatccaggccggagccgaggccaaggccaaggcacaagagtcgggttctgcttccacaggggcaagtactagtaccaacaattcagccagtgctagcgcatcaacgtccggcgggtttagcgccggcgccagtttaaccgctacactaaccttcgggctgttcgccgggcttggtggggcaggcgcaagcaccagcggatcatctggcgcatgcggcttctcatacaagtag

SEQ ID NO: 180961 - DNA, 1821 bp, Artificial Sequence
  derived and/or modified sequence
atgagcgacaccagcgagagcggcgccggcctgacccggttccaggcggaggcctccgaaaaagacagttctagtatgatgcagacactgctgactgtgacccaaaacgttgaggtgccagaaactccaaaggcatccaaagccttggaggtctccgaggatgtgaaggtatctaaggcgtctggcgtgtcgaaggcaacagaagtgagcaagactcccgaagcccgtgaagcccctgcaacccaggcttccagcactacacagctgactgatactcaagtactggctgcagagaataaatcccttgcggccgataccaagaaacaaaatgccgaccctcaggccgtcaccatgcctgccacagagacaaaaaaagtttcacacgtggcagataccaaggtgaacacaaaggcccaggagacagaagcggccccctcccaggcaccagctgatgaaccggagcctgagagcgccgctgcccagagtcaggagaatcaggatactcggccgaaggtgaaggctaaaaaggctcgcaaggtcaagcacctcgacggagaagaggacggatccagcgatcagtctcaggcttcaggcactaccggcggtcggagagtgtcaaaggcactcatggcttcaatggcccgtagggccagtcgcggtccaatcgcattctgggcgagacgagcatcacgcactagattagccgcatgggcccgaagggctttattgagtctccggtctccaaaagcacgtcggggtaaagcccgacgccgggctgctaaactacagtcatcgcaagagcccgaggctccacctcctcgagacgtcgccttgctccaggggcgagccaacgacctggtgaagtatctcctcgccaaggatcaaacaaagattccgatcaaaaggtcggacatgctgaaggatataattaaggagtacactgacgtgtatcccgagattatcgaacgcgcaggatattccttggaaaaagtgttcgggatacagctcaaagaaatcgacaagaacgatcatctatacattctcttatccaccctggaaccaactgacgccggaatccttgggaccaccaaggactccccgaagcttgggctgttgatggtgctcttgtcaatcatcttcatgaacgggaatagaagtagtgaggctgttatttgggaagtgctcaggaagctgggcctgagacctggtattcatcatagcctgttcggggacgtgaagaaattgatcaccgatgagttcgtgaaacagaagtatctggattacgcccgggtccctaacagcaacccccccgagtatgagttcttctggggcttgcgcagctactatgagacatccaaaatgaaagttctgaagttcgcctgtaaggtgcagaaaaaagatccaaaggagtgggcagcccagtaccgcgaggctatggaagcagatctgaaagccgccgccgaggccgctgctgaggctaaggcacgagccgaaatccgagcaaggatgggaatagggctgggctccgagaacgccgcaggcccttgcaattgggatgaagcagacattggcccttgggccaaagctaggatccaggccggagcagaagccaaggccaaggcacaagagtcaggcagcgcaagtactggcgccagtactagcacaaacaactccgcttccgcgtcagccagcactagcggaggattcagcgcaggggcttctttaacggcaacacttaccttcggactcttcgccggcctagggggtgccggggccagtacttcaggttcatcaggcgcctgtggcttcagctataaatag

SEQ ID NO: 180962 - DNA, 1821 bp, Artificial Sequence
  derived and/or modified sequence
atgagcgacaccagcgagagcggcgccggcctgacccggttccaggcagaggcgagcgagaaagactcttctagcatgatgcaaaccctcttaacagtaacccaaaacgtggaagtgccggagacacctaaggcaagcaaagccctggaagtaagcgaggatgtgaaagtgtctaaagctagtggcgttagtaaagccactgaagtgtcaaagacacctgaagcccgcgaggctcctgctacccaagcaagctctactactcagttgacggacacacaggtgctggccgccgagaataagtcactcgctgctgacaccaagaagcagaacgcagacccgcaggccgtgacgatgcccgccacggagactaagaaggtcagccatgtggctgatacaaaagtgaataccaaagcccaggagactgaagccgccccaagccaagccccggccgacgaaccagagcctgagtcagcggccgcacagagccaggagaaccaggatactaggcctaaagttaaggcaaagaaggccagaaaagtgaagcatcttgatggagaggaagatggtagcagtgatcaaagtcaggcgtccggcacaaccggcggtcgccgggtttcaaaggcactcatggcttccatggcgcgcagggcaagtcgaggacctatcgctttttgggctagaagagcaagccgcactcggctcgctgcttgggccagacgtgcacttttgagcttaaggtccccaaaggccagaagggggaaggcacggagacgagccgcaaagctgcagagctctcaggagcccgaggctccccctcctcgggatgtggccctccttcagggcagagcgaacgacttggtgaagtatcttctggccaaagaccaaacaaaaattcctattaagcggtctgacatgcttaaagatatcataaaggaatacacagatgtgtaccccgaaatcatcgaacgtgccggatactctctggagaaggtcttcggtattcagctgaaggagatcgacaaaaacgatcatttgtatatcttactaagcacactggaacccactgacgccggaatccttggtactactaaagactctccgaagcttgggcttctcatggtgcttttgtccatcatttttatgaacgggaatcggtccagcgaggccgtgatctgggaggtgcttaggaaattaggcttgaggcctggaatccaccacagcctgttcggtgatgtgaagaaactgattactgatgagttcgtgaaacagaaataccttgactatgctcgcgttccgaattcaaatccccctgagtacgagttcttctggggactcagatcctactatgaaactagcaagatgaaggtcctcaaatttgcctgcaaggtccagaaaaaggaccccaaagagtgggcagctcagtaccgcgaagctatggaggctgatctgaaagcggccgctgaggcagccgcagaggctaaagcaagggccgagatccgagcgcgcatgggaatcggactgggcagtgaaaatgcagccggtccttgcaattgggatgaggcagacatagggccatgggccaaagcccgtatccaagccggcgctgaggcaaaggccaaagcccaggaatctggttcagcaagcaccggtgcctcaacttcaacaaacaactcagccagtgcatctgcatctacaagcggcggcttctccgcgggcgccagtttaaccgctacactgacatttggccttttcgccggacttggaggcgctggcgcctctacaagtgggtctagcggcgcatgcgggttctcttacaaatag

SEQ ID NO: 180963 - DNA, 1767 bp, Artificial Sequence
  derived and/or modified sequence
atgtctgatacctccgagtctggggctgggctcacccgctttcaggctgaagcatcagagaaggattcctcctcaatgatgcagacactcctcaccgtcacccagaacgttgaagttcctgaaactcccaaagcaagtaaagcgactgaggtatccaagacacctgaagcacgcgaggcccctgccacacaggcaagtagtaccactcagctcaccgacactcaggtgcttgcagccgagaataagtctcttgctgcagacaccaaaaagcagaacgcagaccctcaggctgtaaccatgcccgcaactgaaacaaaaaaagtcagccacgtggcggatactaaggttaacaccaaagctcaagagaccgaggcggcaccctcccaagccccagcagatgagcctgaaccggaatccgctgccgctcagtctcaggaaaaccaggatactcggccaaaagtcaaagctaaaaaagcccgtaaggtaaagcacctagacggggaggaggacgggtccagtgaccagtcccaggcttccggcacgactggtggtagacgcgtctcaaaagcactgatggcatccatggcgagacgtgcctcacgaggtccaatcgctttttgggcacgacgagcatctcgcaccaggttggccgcttgggcgagaagggctttactttccctcaggtcccctaaagctcgaagaggcaaggccagaagaagagcggctaaactgcagtcatctcaggaaccggaagcccctcccccaagagacgttgcactcctgcaagggcgagctaacgatctagttaaatacctgctggcaaaggatcaaacaaaaatccctattaagcgttctgacatgctgaaggacatcattaaagagtacacagatgtgtaccctgagatcatcgagcgtgctggctactcactggagaaggtgttcggcatccagcttaaggagatagacaaaaacgatcatctgtacattctgctctctaccttggagcccaccgatgccggaattctaggaacaaccaaagacagccctaaactgggcctgctgatggtgctactgtctataattttcatgaatggaaatcggagcagtgaggctgtgatttgggaggtgctccgaaagctagggttaagacccggtatccaccactctctgtttggggacgtcaaaaagcttattacagatgagttcgtgaagcagaaatatctcgattacgcaagagtccctaacagcaatccccctgagtacgagtttttttgggggcttcggtcatactatgagacctctaaaatgaaggtcttgaagttcgcatgtaaggtccagaagaaggaccctaaagagtgggccgctcagtatagggaagccatggaggctgatttaaaagccgcagctgaggcagctgcggaggctaaggctcgcgctgaaatccgcgctcgcatggggatcggtctcggatctgaaaacgcggctggcccttgcaactgggatgaggctgacattggcccttgggctaaagctcgtatccaggctggcgcagaagccaaagccaaggctcaggagagtggatcagcatccaccggagcaagtactagtactaataattcggcttccgccagcgctagcacatctggcggattttcagccggagccagtctaactgccactctcaccttcgggctgttcgccggtctgggcggtgccggtgcaagcacgtctggatcctctggcgcttgtggcttcagttataagtag

SEQ ID NO: 180964 - DNA, 1653 bp, Artificial Sequence
  derived and/or modified sequence
atgtggcgcagccagaggcaccgacggccacaacgggtctccaaaacaccagaagccagagaagctccggcaacccaggctagtagtacaacacagctgacggatacccaagtgttagcagcagagaacaaaagtctcgcagctgacacaaagaagcagaacgccgatccacaggctgtcaccatgcctgccactgagactaagaaagtgtctcatgtggctgataccaaggttaataccaaggcccaggaaactgaggcagccccttctcaggccccagcagacgagcctgagccagaaagcgctgcagcacagagccaggagaatcaagatactcggcctaaagtcaaggctaaaaaagctaggaaagtgaagcacctagacggggaagaggatgggtcctcagatcagtctcaagcctctggcactacagggggtagaagggtctccaaggccctgatggcatctatggcacgtcgcgcaagcagagggccaatcgccttttgggcacgtcgggctagtcgaaccagactcgctgcctgggctaggcgagcactactgtccctccggtctcccaaagctcgacgaggaaaggcccgacgaagagcggcaaagcttcagtcttctcaggaacccgaggccccaccaccacgtgatgtggcgctcctgcagggaagagctaatgatctagtgaagtatttgctggcaaaggatcagactaaaatacccataaagagaagtgatatgctgaaggatattattaaggagtacactgacgtatatccagaaatcattgaaagagccggttactctctggaaaaggtgttcggtatacagctgaaagagatcgacaagaatgaccacctatacattctgctgtctaccctggaacccaccgatgctggtattctcggcaccaccaaggatagtccaaaactgggtttattaatggttttgctcagcatcatattcatgaatggtaatcggtcttctgaggcagtgatctgggaagtgctgcgtaagctggggctgcgcccagggatccaccattcacttttcggtgacgtcaagaaattaatcactgatgagtttgtcaaacaaaaatacctggattacgccagagtgccgaattcaaaccccccagaatatgaattcttttggggtttaaggagttattatgaaactagtaagatgaaagttttgaagttcgcatgtaaggtgcagaagaaggaccccaaggaatgggccgctcagtacagggaagccatggaagccgacctgaaggcggcagccgaagcggcagctgaagcgaaagccagggccgagattagggctaggatgggtatcgggctgggatccgagaacgctgctgggccatgtaattgggatgaggccgatatagggccttgggcaaaagcacggattcaagccggagccgaggctaaggcaaaagcccaagagagtggctcagcctcaaccggcgcaagcacatctacgaacaattccgcatccgcctccgcatccacatcgggcggtttctccgctggagcaagtctgacagccacacttaccttcggcctgttcgctgggctaggaggagctggagcctccaccagcggcagcagtggggcttgcgggtttagctataaatag

SEQ ID NO: 180965 - DNA, 1821 bp, Artificial Sequence
  derived and/or modified sequence
atgtcggatactagcgagtcaggagccggtctcacccgatttcaagccgaggcaagtgaaaaagactccagctcaatgatgcaaacactcctcaccgtaacccagaacgtcgaggtaccagaaacccccaaggcgtccaaggccctggaggtgtctgaggatgtgaaggtcagcaaggcaagcggtgttagcaaggccaccgaggtgtctaaaactccagaagctagggaagcccctgctacgcaggctagctcaaccacacaactgactgatacccaggtgttggcagccgagaacaagtcactcgccgctgacacgaagaaacaaaacgccgatcctcaagcggtaaccatgccagccactgaaaccaagaaagtctcccatgttgccgatacaaaggtcaacaccaaagcacaggagaccgaggccgctccatctcaggctcctgccgatgaacctgagcccgagtcagctgccgctcaaagccaggagaatcaggacacacgtcctaaggtgaaggccaagaaagctcgcaaggtcaaacacctggacggtgaagaagacggctcttcggatcagagccaagccagtggtaccaccggtggccgacgagtgtccaaggctctgatggcctcgatggcacgtcgtgcttcccgagggcctatcgcattttgggctcggagagctagccgcaccaggctcgccgcatgggctcggagggccctcctgtctttgcggtctcctaaggcacggaggggaaaagctcgaaggagagcagccaaattacagagttcccaggagccagaagctccccctccccgagatgtggccctgctgcaaggcagagcaaacgacctcgtcaagtaccttttggccaaggaccagaccaagatccccatcaaacggagtgacatgctgaaagatatcataaaggaatacactgacgtttatcctgagataatagagcgggctgggtatagcctggagaaggttttcggtattcagctcaaagagatcgataaaaacgaccacctttacatcctgctgtccaccctggaaccgacggacgccggtatcttaggaaccacaaaagacagtcccaagttggggttgcttatggtgcttctgagtattatcttcatgaatggcaataggtcaagcgaggcggtcatttgggaggtgttgcggaagctggggctgcggccaggaatccaccacagtctgttcggagacgtaaaaaaattgattacagacgagtttgtgaagcagaaatacctggattacgcaagggtaccaaactcaaatccccctgagtatgagtttttctggggcctcagaagctactacgagacgtcaaaaatgaaagtcttgaagttcgcttgtaaggtgcagaaaaaggacccaaaggagtgggctgcacagtaccgggaggcaatggaggcagatttaaaagccgctgcagaggctgctgctgaagccaaagccagagcagagatacgcgcacgcatgggaatcgggttgggcagtgaaaatgccgctggaccctgcaattgggacgaggcagacatcgggccatgggccaaggcccgtatacaagccggtgcagaagcgaaggccaaagcccaagagagtggcagtgctagcacaggcgcaagtacctccaccaataatagtgcatctgctagcgcgtccacgagcggcggattcagtgccggtgcttccctaacagccacactgacctttggcctcttcgctggattgggaggagccggtgcatctacgtcaggcagctcaggcgcttgtggattcagttacaagtag

SEQ ID NO: 180966 - DNA, 1821 bp, Artificial Sequence
  derived and/or modified sequence
atgtctgatacttcagaatctggcgcaggtctgactaggtttcaggccgaagcctcagaaaaagattctagctccatgatgcaaacccttctcacggtgacccaaaatgtggaagtgcctgagacaccaaaggcatccaaggccctggaagtgtcagaggatgttaaagtgagcaaggccagtggggtcagcaaggctacagaggtgtctaaaactccagaggctagagaagccccagcaacccaggcgagctctacgactcaacttacagacacgcaggtgctcgcggcagaaaataaatctttggcagccgacactaagaaacagaatgccgacccacaggcagtgaccatgcccgctaccgagacaaagaaggtgtcccatgtggcggacacaaaggtgaacaccaaagctcaggagacagaggccgcaccgtctcaagcaccagccgatgaacccgagcctgaatcggccgcagcccagtcccaggagaaccaggacacacggccaaaggtcaaggctaagaaggccagaaaggtgaagcaccttgatggggaggaggacggtagttctgaccagagccaggcaagcggtacaacggggggtcggagagtgagcaaagctcttatggcgtcaatggctagacgcgcttctcgcggtccaattgcgttctgggcacgcagagcatcccgcactcgcttggctgcttgggcgaggagggcactcctgagcctccgatccccaaaggccaggcgcggaaaagcgaggcgtcgagcggcaaagttacaatcgtctcaggagcctgaggcgcctccacctcgcgatgttgcactcctgcaggggagggccaacgacctggtcaaatatctcttggcaaaagatcagaccaagattccaattaaaaggtcagacatgttgaaagacataataaaggagtacacagacgtgtatcccgaaattatcgaacgagcgggatacagtctcgaaaaggtgtttgggatacagctgaaggaaatcgacaagaatgatcacctgtatatcctgctttcgaccctggaacctactgacgcgggaattctggggactacaaaggattcaccaaaactggggttacttatggtattactgagcattatttttatgaacggaaacagatcctctgaagctgttatatgggaggtgctgcgcaaactcggcttacgtcctggaatacaccacagtcttttcggcgacgtgaaaaaactgatcacagacgagttcgtgaagcagaaataccttgattacgccagagtccctaatagtaaccccccagaatatgaatttttctggggcctgcgaagctactatgagactagcaagatgaaggtactcaagtttgcctgcaaggtgcaaaagaaggaccctaaggaatgggccgcacagtacagggaggcgatggaggcggaccttaaggccgctgccgaagcagccgctgaggctaaggccagggccgagatccgcgctcgtatggggatcgggttggggtccgagaacgccgcaggaccttgtaattgggacgaggctgacattggcccttgggccaaagctagaatccaggccggagccgaggccaaggctaaagcgcaggagtccggctctgcctctacgggggcatccacaagcacgaacaacagcgcaagcgcctccgcctctacaagtggcggattttctgctggcgcatctctaacagcaacgctgaccttcggtctcttcgctgggctcggtggggctggagctagcacctctggatcctctggagcatgcgggttttcctacaaatag

SEQ ID NO: 180967 - DNA, 1566 bp, Artificial Sequence
  derived and/or modified sequence
atgtctgatacctccgagtcaggagcaggcctaacccggtttcaagcagaggcgtccgaaaaggactcttcgtctatgatgcaaacgctgctcaccgtgactcagaatgtcgaggtcccagagacccctaaggcttcatccactactcagctaactgacacacaggtgctggcagccgagaataagagcctggccgctgatacaaaaaaacagaatgccgacccacaggcagtgactatgcccgctaccgaaacgaagaaggtgtctcacgtagccgacaccaaagtcaacactaaggctcaggaaaccgaagccgcacctagtcaggctccagctgacgagcctgagcccgaatccgctgctgctcagagtcaagaaaaccaagatactcgacccaaggtaaaagccaaaaaggctaggaaggtgaagcacctggacggcgaggaagatggcagtagcgaccaatcccaggcctcaggaacgaccgggggtagaagggtgagtaaggccagacggagggctgcgaaactgcaatccagccaggagcccgaggcaccacctcctcgagatgtcgctcttctgcaggggagagcaaacgatctggtaaaatatttgctcgctaaagatcagacaaaaataccaataaagcgctctgacatgttaaaggatattattaaggaatatactgatgtgtacccagagattatcgaacgcgcagggtactccctggagaaggtttttggcatacagctaaaagagatcgacaagaatgatcacctctatatcctcttgagcacactggaacctaccgatgccggaatcctaggaacaacaaaggacagtcctaaacttggtttactcatggtgctgctgtctatcatttttatgaacggcaaccgcagttccgaggccgtaatatgggaagtgctgaggaagctgggactccggccaggaatccatcattcactgtttggagatgtaaagaaactcattactgatgaatttgtgaagcagaaatacctggattacgcacgggtcccgaatagtaatccaccagagtacgagtttttctggggactgagaagttactacgaaacatctaagatgaaagtcctgaagttcgcctgcaaagtgcagaaaaaagatccaaaagagtgggcggcacaatatagggaggcgatggaggccgatctgaaagccgctgccgaggctgctgctgaggccaaggccagggccgagattagagcccgtatgggtatcggactcggcagtgaaaacgcagctggcccatgtaattgggatgaggccgacattggcccatgggccaaggcaaggatacaggctggtgccgaagccaaagctaaggcgcaggagagcggtagcgcaagcacgggcgcatctacaagtacgaataattctgcttccgctagcgcgagtaccagcggagggttctcagcaggcgcaagtttgaccgccacactgacattcggcctcttcgctggtcttggaggagccggagcctcaacaagcggcagctctggcgcatgtggatttagttacaagtag

SEQ ID NO: 180968 - DNA, 1566 bp, Artificial Sequence
  derived and/or modified sequence
atgagcgataccagtgaatccggcgctggtcttactagattccaggccgaggctagtgagaaggattcatcgagcatgatgcaaacattgcttacagtaacccagaacgtggaggtcccagagacgcctaaggccagctcaacaacacagctaacagatactcaggttttggccgctgagaacaaatcactcgcggctgacacaaaaaaacagaacgctgaccctcaagcagtgactatgccagcgacggagacaaagaaagtgtcacacgtggccgatacaaaggttaacacaaaagcccaggagaccgaagcagctcctagccaggcaccagctgatgagcccgagcccgagagtgccgctgcacaaagccaggaaaaccaggatacccgacctaaagtgaaggctaagaaggcaaggaaagtcaagcatctggacggggaggaggatggctctagcgaccaaagtcaggctagtgggacaactggcggacggcgtgtctccaaagctagacgacgcgctgccaagttacagtcctctcaggagcccgaggcacccccaccgagagatgtggctcttctccaggggagggccaacgatttggtgaaatacctcttggctaaggaccagacgaagatcccaataaaaaggtccgacatgctaaaggacatcataaaagaatacaccgatgtttaccccgaaattatcgagagagccggatacagcctcgaaaaagttttcggaatccagctgaaagaaatcgataaaaacgatcacctgtacatcctgctctctacgttagaacctacggacgccggaattctggggacgacaaaagattctcccaagctgggactcctcatggttttgctgtccataatctttatgaatgggaatagaagcagcgaggcagtgatctgggaagttctgaggaagctcggcctcagacccggtattcatcactccctctttggagacgtgaaaaaattaataacggacgaattcgtcaaacagaaatatctggattatgcaagagttcctaattcaaacccccctgagtacgagtttttttgggggctccgctcctattacgagactagcaaaatgaaggtgcttaaatttgcttgtaaggtgcagaagaaagatcctaaggaatgggctgctcaataccgcgaggctatggaggccgaccttaaagcggctgccgaggccgcagccgaggctaaagccagagcggaaattcgcgctcggatgggcatcggtctgggctctgaaaacgccgctgggccttgtaattgggacgaggctgatatcggtccttgggcaaaggccaggatccaggctggcgctgaggccaaggcaaaagcacaggagagcggctcagcatcaaccggggctagtacgtctaccaacaactctgcctctgcgtcggcctccacatcaggaggcttttctgccggagcgtctcttaccgctactctcacctttggcctgtttgcagggctcggtggagcaggagccagtacaagcggaagtagtggagcctgtggtttctcctacaagtag

SEQ ID NO: 180969 - DNA, 1821 bp, Artificial Sequence
  derived and/or modified sequence
atgtctgacacctccgaatctggggctggactgacgaggtttcaggcggaagcttccgagaaggacagcagcagtatgatgcaaacacttcttacagtgacccagaacgtggaggttcctgagacacccaaagcttcaaaggctctagaagtaagtgaggacgtcaaagtaagcaaggcctctggagtgagtaaggctacagaggtgagtaagacccccgaggcaagagaagcgcctgcaacacaggcctccagcacaactcaactcacggacacacaggtgctagctgcggagaataagtctcttgctgctgacactaagaagcagaacgctgatccgcaggccgtgacaatgccagcaacagagaccaagaaagtcagtcatgttgctgatactaaagtgaataccaaggcccaggaaactgaagctgcaccctcccaggctcctgccgacgagcctgagcccgaatccgccgctgctcaaagccaggaaaaccaggacacacggcctaaagtaaaagcgaagaaagctcgcaaggtaaaacacctggacggggaggaggatgggagttctgatcagtctcaggcctctggcacgacgggcggtcggcgagtttctaaggcactcatggctagcatggctcgtcgagcttcgcgcggtccgatagccttttgggcgagaagagcctctagaaccaggctcgccgcatgggctagaagagcactgctaagcctccggtccccgaaggccagacgcggtaaagccagaaggcgggctgccaaacttcagagctctcaagaacccgaagcccctccccctagagatgtcgcgctcttgcaggggcgtgctaatgatctggtgaagtatttattggccaaagaccaaaccaagatccccataaagcgttctgatatgctcaaggacataataaaggagtacacagacgtgtacccggagatcatcgagagggccggatattccttagagaaagttttcggaatacagctgaaggagatagataagaatgatcatctgtacattctgttgtctacactggaaccgactgacgcaggaattttgggaaccaccaaagattccccaaaactgggcctgctcatggttctcctgtctatcatattcatgaacggaaacagaagttccgaggccgtgatctgggaggtactgcgcaagctcggcctacgtcctggaatccaccatagcctgtttggtgacgttaagaagcttataacagacgagttcgtgaagcagaaatatctggactatgcacgtgttcccaactctaatccccctgagtatgagtttttttgggggctgcgatcttactatgaaacttctaagatgaaagttctcaaatttgcatgcaaggtgcagaagaaagatcctaaagagtgggctgctcagtatcgcgaggccatggaggccgacttgaaggcggctgccgaagcagctgccgaggccaaagctcgcgctgaaatacgagctaggatgggtattggcctcggtagtgagaacgcagcagggccttgtaattgggatgaggccgatataggaccttgggctaaagctagaatccaggcaggagctgaggcgaaggcaaaggcgcaggagtccgggtcagcatcgactggcgcaagcacctccacgaacaatagcgctagcgcatctgcaagtacatccggcggattcagcgccggagcgtcgttgactgctaccctcactttcgggctatttgccggtctaggaggggcaggggcttccacatctggctcctcaggtgcatgcggattctcctacaagtag

SEQ ID NO: 180970 - DNA, 1821 bp, Artificial Sequence
  derived and/or modified sequence
atgagcgatacttcagaatccggagcaggcctcacccgctttcaggcggaagcgagcgaaaaggactcatctagtatgatgcagacattgctgacagtaactcagaacgtggaggtgcccgaaacgcctaaagcgtccaaggccctggaagtttccgaagacgtcaaggtctccaaagccagcggagtttccaaagcaactgaggtgagtaagacacctgaggccagagaagccccagccacccaggcctcgtcaacaacccagcttacagacacacaggtcctggctgccgaaaataagtccctcgctgctgatacaaagaaacagaacgctgatccacaggctgtaactatgccagccacagaaacaaaaaaggtgagtcatgtggcagacactaaagtcaataccaaggctcaggagacggaggccgcaccaagccaggccccagccgatgaacccgagcccgagagtgcggcagctcagagccaggagaaccaggacactcgacccaaagtgaaggctaaaaaagctagaaaggttaagcacctggacggggaggaagacggaagctcagatcagtcacaggcatcaggtacgacggggggtagacgggtgagtaaggccctcatggcctcaatggccaggcgagcatccagagggccaatagcattttgggctcgacgggcttctcgcactcgactcgccgcatgggcgaggcgtgccctactgtccctgagaagcccaaaagccaggaggggaaaggccaggagacgcgcagctaagctccagtcgtcacaagagccagaggcaccacctccaagggacgtagcactgttgcagggtcgcgcaaatgacctcgttaagtacctgctcgccaaggaccagacgaagatccccattaaacgcagcgatatgctcaaggacataattaaggagtacacagacgtgtatcccgagattatcgaacgtgccggatattctcttgaaaaggttttcggcatccagctcaaagaaatcgataagaacgatcatctatacatcctgctgagtactctggaacctactgatgccggaatattggggaccacaaaggacagcccgaagctgggactgttaatggtgctgctgagtattatttttatgaacggtaatcgaagctctgaagcagttatctgggaagtgctccgcaaactgggtctacgccctggtattcaccacagtctgttcggcgatgtcaagaagctgataactgacgaatttgtgaagcagaagtatctggactacgcacgagtgccaaatagcaatccgccagagtacgaatttttctgggggctgagatcgtattacgagacgtccaagatgaaggtgctgaaatttgcttgcaaggttcagaagaaagaccctaaggaatgggctgctcagtatcgtgaagcaatggaagctgatctgaaagcagccgctgaggctgcagccgaagccaaggcccgagccgaaatcagggccaggatggggattggacttgggagcgagaacgccgcaggcccatgtaactgggatgaagctgatatcggcccttgggcaaaagccaggatccaggccggagcggaggcgaaagccaaagcacaggaatccggaagcgcctctaccggcgcttcaacatcaacgaataactccgctagcgcttccgcctctacgagtggcggttttagtgccggagcaagcttaacggccaccctgacctttggtctattcgctggacttggaggggctggcgctagtactagcggctcttccggcgcttgcggattctcgtacaagtag

SEQ ID NO: 180971 - DNA, 1767 bp, Artificial Sequence
  derived and/or modified sequence
atgagcgacaccagcgagagcggcgccggcctgaccagattccaggccgaggccagcgagaaggacagcagcagcatgatgcagaccctgctgaccgtgacccagaacgtggaggtgcccgagacccccaaggccagcaaggccaccgaggtgagcaagacccccgaggccagagaggcccccgccacccaggccagcagcaccacccagctgaccgacacccaggtgctggccgccgagaacaagagcctggccgccgacaccaagaagcagaacgccgacccccaggccgtgaccatgcccgccaccgagaccaagaaggtgagccacgtggccgacaccaaggtgaacaccaaggcccaggagaccgaggccgcccccagccaggcccccgccgacgagcccgagcccgagagcgccgccgcccagagccaggagaaccaggacaccagacccaaggtgaaggccaagaaggccagaaaggtgaagcacctggacggcgaggaggacggcagcagcgaccagagccaggccagcggcaccaccggcggcagaagagtgagcaaggccctgatggccagcatggccagaagagccagcagaggccccatcgccttctgggccagaagagccagcagaaccagactggccgcctgggccagaagagccctgctgagcctgagaagccccaaggccagaagaggcaaggccagaagaagagccgccaagctgcagagcagccaggagcccgaggcccccccccccagagacgtggccctgctgcagggcagagccaacgacctggtgaagtacctgctggccaaggaccagaccaagatccccatcaagagaagcgacatgctgaaggacatcatcaaggagtacaccgacgtgtaccccgagatcatcgagagagccggctacagcctggagaaggtgttcggcatccagctgaaggagatcgacaagaacgaccacctgtacatcctgctgagcaccctggagcccaccgacgccggcatcctgggcaccaccaaggacagccccaagctgggcctgctgatggtgctgctgagcatcatcttcatgaacggcaacagaagcagcgaggccgtgatctgggaggtgctgagaaagctgggcctgagacccggcatccaccacagcctgttcggcgacgtgaagaagctgatcaccgacgagttcgtgaagcagaagtacctggactacgccagagtgcccaacagcaacccccccgagtacgagttcttctggggcctgagaagctactacgagaccagcaagatgaaggtgctgaagttcgcctgcaaggtgcagaagaaggaccccaaggagtgggccgcccagtacagagaggccatggaggccgacctgaaggccgccgccgaggccgccgccgaggccaaggccagagccgagatcagagccagaatgggcatcggcctgggcagcgagaacgccgccggcccctgcaactgggacgaggccgacatcggcccctgggccaaggccagaatccaggccggcgccgaggccaaggccaaggcccaggagagcggcagcgccagcaccggcgccagcaccagcaccaacaacagcgccagcgccagcgccagcaccagcggcggcttcagcgccggcgccagcctgaccgccaccctgaccttcggcctgttcgccggcctgggcggcgccggcgccagcaccagcggcagcagcggcgcctgcggcttcagctacaagtag

SEQ ID NO: 180972 - DNA, 1653 bp, Artificial Sequence
  derived and/or modified sequence
atgtggagaagccagagacacagaagaccccagagagtgagcaagacccccgaggccagagaggcccccgccacccaggccagcagcaccacccagctgaccgacacccaggtgctggccgccgagaacaagagcctggccgccgacaccaagaagcagaacgccgacccccaggccgtgaccatgcccgccaccgagaccaagaaggtgagccacgtggccgacaccaaggtgaacaccaaggcccaggagaccgaggccgcccccagccaggcccccgccgacgagcccgagcccgagagcgccgccgcccagagccaggagaaccaggacaccagacccaaggtgaaggccaagaaggccagaaaggtgaagcacctggacggcgaggaggacggcagcagcgaccagagccaggccagcggcaccaccggcggcagaagagtgagcaaggccctgatggccagcatggccagaagagccagcagaggccccatcgccttctgggccagaagagccagcagaaccagactggccgcctgggccagaagagccctgctgagcctgagaagccccaaggccagaagaggcaaggccagaagaagagccgccaagctgcagagcagccaggagcccgaggcccccccccccagagacgtggccctgctgcagggcagagccaacgacctggtgaagtacctgctggccaaggaccagaccaagatccccatcaagagaagcgacatgctgaaggacatcatcaaggagtacaccgacgtgtaccccgagatcatcgagagagccggctacagcctggagaaggtgttcggcatccagctgaaggagatcgacaagaacgaccacctgtacatcctgctgagcaccctggagcccaccgacgccggcatcctgggcaccaccaaggacagccccaagctgggcctgctgatggtgctgctgagcatcatcttcatgaacggcaacagaagcagcgaggccgtgatctgggaggtgctgagaaagctgggcctgagacccggcatccaccacagcctgttcggcgacgtgaagaagctgatcaccgacgagttcgtgaagcagaagtacctggactacgccagagtgcccaacagcaacccccccgagtacgagttcttctggggcctgagaagctactacgagaccagcaagatgaaggtgctgaagttcgcctgcaaggtgcagaagaaggaccccaaggagtgggccgcccagtacagagaggccatggaggccgacctgaaggccgccgccgaggccgccgccgaggccaaggccagagccgagatcagagccagaatgggcatcggcctgggcagcgagaacgccgccggcccctgcaactgggacgaggccgacatcggcccctgggccaaggccagaatccaggccggcgccgaggccaaggccaaggcccaggagagcggcagcgccagcaccggcgccagcaccagcaccaacaacagcgccagcgccagcgccagcaccagcggcggcttcagcgccggcgccagcctgaccgccaccctgaccttcggcctgttcgccggcctgggcggcgccggcgccagcaccagcggcagcagcggcgcctgcggcttcagctacaagtag

SEQ ID NO: 180973 - DNA, 1566 bp, Artificial Sequence
  derived and/or modified sequence
atgagcgacaccagcgagagcggcgccggcctgaccagattccaggccgaggccagcgagaaggacagcagcagcatgatgcagaccctgctgaccgtgacccagaacgtggaggtgcccgagacccccaaggccagcagcaccacccagctgaccgacacccaggtgctggccgccgagaacaagagcctggccgccgacaccaagaagcagaacgccgacccccaggccgtgaccatgcccgccaccgagaccaagaaggtgagccacgtggccgacaccaaggtgaacaccaaggcccaggagaccgaggccgcccccagccaggcccccgccgacgagcccgagcccgagagcgccgccgcccagagccaggagaaccaggacaccagacccaaggtgaaggccaagaaggccagaaaggtgaagcacctggacggcgaggaggacggcagcagcgaccagagccaggccagcggcaccaccggcggcagaagagtgagcaaggccagaagaagagccgccaagctgcagagcagccaggagcccgaggcccccccccccagagacgtggccctgctgcagggcagagccaacgacctggtgaagtacctgctggccaaggaccagaccaagatccccatcaagagaagcgacatgctgaaggacatcatcaaggagtacaccgacgtgtaccccgagatcatcgagagagccggctacagcctggagaaggtgttcggcatccagctgaaggagatcgacaagaacgaccacctgtacatcctgctgagcaccctggagcccaccgacgccggcatcctgggcaccaccaaggacagccccaagctgggcctgctgatggtgctgctgagcatcatcttcatgaacggcaacagaagcagcgaggccgtgatctgggaggtgctgagaaagctgggcctgagacccggcatccaccacagcctgttcggcgacgtgaagaagctgatcaccgacgagttcgtgaagcagaagtacctggactacgccagagtgcccaacagcaacccccccgagtacgagttcttctggggcctgagaagctactacgagaccagcaagatgaaggtgctgaagttcgcctgcaaggtgcagaagaaggaccccaaggagtgggccgcccagtacagagaggccatggaggccgacctgaaggccgccgccgaggccgccgccgaggccaaggccagagccgagatcagagccagaatgggcatcggcctgggcagcgagaacgccgccggcccctgcaactgggacgaggccgacatcggcccctgggccaaggccagaatccaggccggcgccgaggccaaggccaaggcccaggagagcggcagcgccagcaccggcgccagcaccagcaccaacaacagcgccagcgccagcgccagcaccagcggcggcttcagcgccggcgccagcctgaccgccaccctgaccttcggcctgttcgccggcctgggcggcgccggcgccagcaccagcggcagcagcggcgcctgcggcttcagctacaagtag

SEQ ID NO: 180974 - protein, 535 aa, Artificial Sequence
  derived and/or modified sequence
MFSWLGTDDRRRKDPEVFQTVSEGLKKLYKSKLLPLEEHYRFHEFHSPALEDADFDNKPMVLLVGQYSTGKTTFIRYLLEQDFPGMRIGPEPTTDSFIAVMQGDMEGIIPGNALVVDPKKPFRKLNAFGNAFLNRFVCAQLPNPVLESISVIDTPGILSGEKQRISRGYDFAAVLEWFAERVDRIILLFDAHKLDISDEFSEVIKALKNHEDKMRVVLNKADQIETQQLMRVYGALMWSLGKIVNTPEVIRVYIGSFWSHPLLIPDNRKLFEAEEQDLFRDIQSLPRNAALRKLNDLIKRARLAKVHAYIISSLKKEMPSVFGKDNKKKELVNNLAEIYGRIEREHQISPGDFPNLKRMQDQLQAQDFSKFQPLKSKLLEVVDDMLAHDIAQLMVLVRQEESQRPIQMVKGGAFEGTLHGPFGHGYGEGAGEGIDDAEWVVARDKPMYDEIFYTLSPVDGKITGANAKKEMVRSKLPNSVLGKIWKLADIDKDGMLDDDEFALANHLIKVKLEGHELPNELPAHLLPPSKRKVAE

SEQ ID NO: 180975 - protein, 175 aa, Artificial Sequence
  derived and/or modified sequence
MFSWLGTDDRRRKDPEVFQTVSEGLKKLYKSKLLPLEEHYRFHEFHSPALEDADFDNKPMVLLVGQYSTGKTTFIRYLLEQDFPGMRIGPEPTTDSFIAVMQGDMEGIIPGNALVVDPKKPFRKLNAFGNAFLNRFVCAQLPNPVLESISVIDTPGILSGEKQRISRGPAAGPGL

SEQ ID NO: 180976 - DNA, 1608 bp, Artificial Sequence
  derived and/or modified sequence
atgttctcctggttaggtactgacgatcggcgcaggaaagacccagaggtatttcagactgttagtgaagggctcaaaaaattatataagtccaaactgttaccactggaggaacactataggttccacgagtttcacagccccgctttagaagacgccgattttgacaataagccaatggtcttgctggttggccaatactctacaggcaaaacgacctttatcaggtacctgctggagcaagacttccccggcatgagaatcggccccgagcccaccacggatagctttattgctgtaatgcagggcgatatggagggcataataccgggtaacgctctagtggtcgacccgaagaagcccttcagaaaacttaatgcctttgggaacgcctttttaaaccgattcgtgtgcgcccaattgcctaacccagtactggagtctatcagcgtgattgacactcctgggatcctgtctggggagaaacagcgaatttcacgcggctatgattttgcagccgtgctcgagtggtttgctgaacgcgtagacagaattatcctgctcttcgatgcccataagctcgacatctcagatgaattcagtgaagtgataaaggcccttaagaaccacgaggataaaatgagagttgtgctaaacaaagccgatcagatcgaaacccaacagctgatgcgcgtgtacggggcacttatgtggagcctcggcaagattgttaacactccagaggtgattcgcgtgtacataggaagtttctggtcacacccactgctgattccagacaacaggaagctcttcgaggcagaagagcaggacctattcagggacatacagtccctacctcggaatgccgccttgcggaagcttaatgaccttatcaagcgtgctcggctggccaaagttcatgcgtacattatcagttccctgaagaaggaaatgccttctgtctttgggaaggataataagaaaaaggagttggttaacaatttggccgaaatctatggccgcatcgagcgggaacatcagataagcccaggcgatttccctaacctgaaacgcatgcaagatcagctgcaagcgcaggactttagcaagttccagcccttgaaaagcaaactgctcgaggtcgtggatgacatgttggcacacgatatcgctcagcttatggtgctcgtcagacaagaagaatctcagagaccaatccaaatggtgaagggcggggcattcgaaggcaccctacacgggccttttggacacggttatggcgaaggagcaggtgaagggatcgatgatgccgagtgggttgttgctcgggacaaaccaatgtacgacgagattttctatacccttagcccggtggacggaaagatcacaggggccaacgccaagaaagaaatggtccgctcaaagctgccaaacagcgtcctggggaagatttggaaactggccgatattgacaaggacgggatgttggacgatgacgaatttgctcttgccaaccatctcattaaggttaagttggagggccatgaacttcctaacgagctgccagcccatttacttcccccatccaagcggaaagtcgccgagtag

SEQ ID NO: 180977 - DNA, 528 bp, Artificial Sequence
  derived and/or modified sequence
atgttcagttggctcgggactgacgaccgccgcagaaaagaccccgaggtatttcagaccgtttctgagggattaaaaaaattgtataagagcaaattgctgccgctcgaagaacattaccgcttccacgaatttcattctcccgccttagaggacgcagactttgacaataagcctatggttctgttggtgggacagtactccacgggcaagacaacattcatccgctacctgctcgaacaagattttcccggtatgcgcatcggaccagaacctaccactgattcgtttatcgcagttatgcagggggatatggagggtataatccctgggaatgctctggttgttgaccccaaaaaaccatttaggaagctgaacgcgtttggtaacgcattcctcaatcggtttgtctgtgctcagttgccaaatcccgttctagaatcgatatccgttatcgacacccccggaatcctaagtggtgagaagcagcggatctcaagaggccctgctgccgggccgggtctgtag

SEQ ID NO: 180978 - DNA, 1608 bp, Artificial Sequence
  derived and/or modified sequence
atgttctcctggctgggcacagatgacagaagaaggaaggaccctgaggtgttccagacagtgtctgagggcctgaagaagctgtacaagagcaagctgctgcccctggaggagcactaccgcttccacgagttccacagccctgccctggaggatgctgactttgacaacaagcccatggtgctgctggtgggccagtacagcacaggcaagaccaccttcatccgctacctgctggagcaggacttccctggcatgagaattggccctgagcccaccacagacagcttcatcgctgtgatgcagggcgacatggagggcatcatccctggaaatgccctggtggtggaccccaagaagcccttcaggaagctgaatgcctttggaaatgccttcctgaacagatttgtgtgtgcccagctgcccaaccctgtgctggagagcatcagcgtcatcgacaccccaggcatcctgtctggagagaagcagaggatcagccggggctatgactttgctgctgtgctggagtggtttgctgagcgggtggaccgcatcatcctgctgtttgatgcccacaagctggacatcagtgatgagttcagcgaggtgatcaaggccctgaagaaccacgaggacaagatgagggtggtgctgaacaaggctgaccagatcgagacccagcagctgatgagggtgtatggagccctgatgtggagcctgggcaagatcgtgaacaccccagaggtgatccgggtgtacatcggcagcttctggagccaccccctgctgatcccagacaacaggaagctgtttgaagctgaggagcaggacctcttccgggacatccagagcctgcccagaaatgctgccctgaggaagctgaatgacctgatcaagagggcccggctggccaaggtgcacgcctacatcatcagcagcctgaagaaggagatgcccagcgtgtttgggaaggacaacaagaagaaggagctggtgaacaacctggccgagatctacggccgcatcgagcgggagcaccagatcagccctggggacttccccaacctgaagaggatgcaggaccagctgcaggcccaggacttcagcaagttccagcccctgaagagcaagctgctggaggtggtggatgacatgctggcccatgacatcgcccagctgatggtgctggtgcggcaggaggagagccagaggcccatccagatggtgaagggcggggcctttgagggcaccctgcacggccccttcggccacggctacggggagggcgctggggagggcattgatgatgctgagtgggtggtggcccgggacaagcccatgtatgatgagatcttctacaccctgagccctgtggatggcaagatcactggagccaatgccaagaaggagatggtgcgcagcaagctgcccaacagcgtgctgggcaagatctggaagctggccgacatcgacaaggatggcatgctggatgatgatgaatttgccctggccaaccacctgatcaaggtgaagctggagggccacgagctgcccaatgagctgcctgcccacctgctgccccccagcaagaggaaggtggccgagtag

SEQ ID NO: 180979 - DNA, 528 bp, Artificial Sequence
  derived and/or modified sequence
atgttctcctggctgggcacagatgacagaagaaggaaggaccctgaggtgttccagacagtgtctgagggcctgaagaagctgtacaagagcaagctgctgcccctggaggagcactaccgcttccacgagttccacagccctgccctggaggatgctgactttgacaacaagcccatggtgctgctggtgggccagtacagcacaggcaagaccaccttcatccgctacctgctggagcaggacttccctggcatgagaattggccctgagcccaccacagacagcttcatcgctgtgatgcagggcgacatggagggcatcatccctggaaatgccctggtggtggaccccaagaagcccttcaggaagctgaatgcctttggaaatgccttcctgaacagatttgtgtgtgcccagctgcccaaccctgtgctggagagcatcagcgtcatcgacaccccaggcatcctgtctggagagaagcagaggatcagccggggccctgctgctggccctggcctgtag

SEQ ID NO: 180980 - DNA, 1608 bp, Artificial Sequence
  derived and/or modified sequence
atgttcagctggctgggcaccgacgaccggcggcggaaggaccccgaagttttccagacggtgtcagagggcttgaagaaactctacaagtcgaagttgctgcccctggaggagcactacaggtttcatgagttccatagccctgccttagaagacgcagacttcgataataagccaatggtattgttagtcggccagtacagtaccgggaaaactactttcatccggtatttgttagaacaggattttcccggcatgcgaattggacctgaaccaacaacggacagtttcatcgctgtaatgcagggagatatggaggggattattccaggcaacgctctggtggtggacccaaagaaaccttttcggaagttgaacgcctttgggaatgctttcctcaatcgatttgtatgcgcacagctccctaaccctgtgctcgagagcatctcagtgattgacaccccaggtattcttagtggcgagaagcagcggatttctcgcggttacgatttcgcagccgtgctggagtggtttgctgagcgcgttgaccgcatcattctactcttcgacgcccataaactggatattagtgatgagtttagcgaggtcattaaagcacttaagaatcacgaggacaagatgcgcgtggttttgaataaggcagaccaaattgagacccagcaactgatgagagtttacggagctttaatgtggagcctgggaaaaatcgtgaacacacctgaggttatccgggtctatatcggatccttttggagccatccactgttgatccccgacaaccgaaagctgtttgaggctgaagagcaagatctctttcgggacatccagagtctgcccagaaacgcagcactgaggaagcttaatgacctgataaaaagggctaggctggccaaggtgcatgcatatattatcagctccctaaaaaaagaaatgccttccgtattcggtaaagacaacaagaaaaaagaactggttaacaatctcgcagagatctacgggaggatagagagagagcaccaaatatcccctggtgattttcccaacttgaagagaatgcaggatcaacttcaggcccaggatttttcaaagttccagcctcttaagagtaagctgttggaggtcgttgacgatatgcttgctcatgacatcgctcaattaatggtccttgtgagacaagaggaatcccagagaccaatacagatggtgaaaggaggagcgttcgaggggactctgcacggaccttttggacacggatatggcgaaggagctggagagggcatagatgatgcagagtgggtggtggcccgcgataaaccgatgtacgatgagatcttttacaccttgtcccccgtagatggcaagatcaccggggcaaacgctaagaaggagatggttaggtccaaactgccgaattctgtgctgggaaagatctggaagttggctgacattgataaagatggcatgttagatgacgacgaatttgcattagccaatcatctgattaaggtgaaactggagggacacgaactaccaaacgagctgcccgcgcatctgctccccccctcgaagaggaaggttgctgaatag

SEQ ID NO: 180981 - DNA, 528 bp, Artificial Sequence
  derived and/or modified sequence
atgttcagctggctgggcaccgacgaccggcggcggaaggaccccgaggtgtttcagaccgtgtctgagggcctgaaaaagctgtacaagagcaaacttcttccccttgaagaacactatcggttccacgaatttcattctcctgccctggaggacgcagacttcgataacaagcccatggtgttgctggtagggcaatacagcacaggtaagaccactttcattcggtacttgctggaacaggacttcccaggcatgcgcatcggccccgagcccactaccgattccttcatcgctgttatgcagggggacatggagggtataattccaggcaacgcactagtggtagaccctaaaaagccatttagaaagcttaatgcttttgggaatgcgttcttgaatcgctttgtgtgcgcccagttaccaaatccagtgttggaatctattagcgttattgacacacctggaattctgtccggggagaagcagaggatttcccggggcccggcagccggaccaggtttatag

SEQ ID NO: 180982 - DNA, 1608 bp, Artificial Sequence
  derived and/or modified sequence
atgttctcttggcttgggactgatgatagaagacggaaggatcctgaggtgttccagacagtcagtgaaggattgaagaagctctacaagtcgaagctacttcctctcgaagagcactaccgtttccatgagtttcacagcccagccctcgaagatgctgatttcgacaataagcctatggtgcttctcgtggggcaatattccactgggaaaacaacctttattcgctatctgctcgagcaagactttcctggaatgcggattggccctgaacctaccacggactccttcatcgcagtgatgcagggagacatggaggggatcatccccggtaatgctcttgttgtggaccccaaaaagccatttcggaagctcaacgccttcgggaacgcatttctaaaccgcttcgtgtgtgcacagctgcccaacccagttctcgagagcattagcgtgatcgacacccccggtatcctgagcggagagaaacaaaggatcagtcgcggttacgacttcgcagctgtgctagagtggtttgcagagagagtggatcggataattctgctgttcgacgcccataaactcgacatcagtgatgagttctctgaggtcatcaaggctctcaagaatcatgaggacaaaatgcgggtggtgttgaacaaagctgatcagatcgaaacccagcaattgatgcgcgtgtacggagcactgatgtggagtctaggtaagatagtgaacaccccagaagttatccgggtatatattggttccttctggtctcaccctctgttaatcccagataaccggaaattgttcgaggctgaagagcaggacctcttccgggacattcaaagtctaccacggaatgccgctctgaggaaactaaatgatctaattaagcgtgccaggctggccaaggttcatgcctatattatctcatctcttaaaaaagaaatgcctagcgtctttggaaaagacaataagaaaaaagaactggtcaataatttagcagaaatttacgggcgaattgagcgcgagcatcaaattagtcccggtgattttcctaacttaaagagaatgcaagaccagttgcaagcgcaggacttttccaaattccaacccctgaaatctaaactcttggaagtggtcgatgacatgttggcacatgacatcgctcaactaatggtgctcgtgaggcaagaagaaagtcaaagacctatccagatggtcaaggggggagccttcgagggcacattgcacggacccttcggacacggatacggcgagggcgctggggagggcatcgacgatgcggaatgggtggtcgcccgagacaagccgatgtacgatgaaatcttttacacgttatcccccgttgatgggaagataaccggagccaacgccaagaaagagatggtgcgaagcaagctgccaaacagcgtgctcggcaaaatctggaagctggcggacatcgacaaggatggcatgctcgacgatgacgagtttgccctggcaaatcatttgatcaaagtgaaattggagggccatgagctgcccaacgagctcccagctcatttactgccgccatctaagcggaaagtggcggagtag

SEQ ID NO: 180983 - DNA, 528 bp, Artificial Sequence
  derived and/or modified sequence
atgttttcttggttagggaccgatgaccggcgaagaaaggatcccgaggtgttccagacagtgtctgaagggctcaagaagctgtacaaatcaaagctcctcccattagaagagcactatcggttccacgagttccactctcctgcattagaagatgcagatttcgataataagccaatggtgttgctcgtgggacagtactccaccggtaagactacttttattaggtatttgctggagcaggactttccgggtatgcgaatcggcccagaacctacaacggactctttcattgctgtaatgcagggggacatggagggaatcatccctggcaacgcgctcgtggtggatcccaaaaaaccattcagaaagctgaatgcttttggcaatgcctttctgaaccgattcgtttgtgcgcagcttcctaatcctgtgttggaatctatcagtgtcatcgacactccgggtatcctctccggcgagaagcagcgaatctcccggggtcctgcagccggtccagggttgtag

SEQ ID NO: 180984 - DNA, 1608 bp, Artificial Sequence
  derived and/or modified sequence
atgttcagctggctgggcaccgacgacagaagaagaaaggaccccgaggtgttccagaccgtgagcgagggcctgaagaagctgtacaagagcaagctgctgcccctggaggagcactacagattccacgagttccacagccccgccctggaggacgccgacttcgacaacaagcccatggtgctgctggtgggccagtacagcaccggcaagaccaccttcatcagatacctgctggagcaggacttccccggcatgagaatcggccccgagcccaccaccgacagcttcatcgccgtgatgcagggcgacatggagggcatcatccccggcaacgccctggtggtggaccccaagaagcccttcagaaagctgaacgccttcggcaacgccttcctgaacagattcgtgtgcgcccagctgcccaaccccgtgctggagagcatcagcgtgatcgacacccccggcatcctgagcggcgagaagcagagaatcagcagaggctacgacttcgccgccgtgctggagtggttcgccgagagagtggacagaatcatcctgctgttcgacgcccacaagctggacatcagcgacgagttcagcgaggtgatcaaggccctgaagaaccacgaggacaagatgagagtggtgctgaacaaggccgaccagatcgagacccagcagctgatgagagtgtacggcgccctgatgtggagcctgggcaagatcgtgaacacccccgaggtgatcagagtgtacatcggcagcttctggagccaccccctgctgatccccgacaacagaaagctgttcgaggccgaggagcaggacctgttcagagacatccagagcctgcccagaaacgccgccctgagaaagctgaacgacctgatcaagagagccagactggccaaggtgcacgcctacatcatcagcagcctgaagaaggagatgcccagcgtgttcggcaaggacaacaagaagaaggagctggtgaacaacctggccgagatctacggcagaatcgagagagagcaccagatcagccccggcgacttccccaacctgaagagaatgcaggaccagctgcaggcccaggacttcagcaagttccagcccctgaagagcaagctgctggaggtggtggacgacatgctggcccacgacatcgcccagctgatggtgctggtgagacaggaggagagccagagacccatccagatggtgaagggcggcgccttcgagggcaccctgcacggccccttcggccacggctacggcgagggcgccggcgagggcatcgacgacgccgagtgggtggtggccagagacaagcccatgtacgacgagatcttctacaccctgagccccgtggacggcaagatcaccggcgccaacgccaagaaggagatggtgagaagcaagctgcccaacagcgtgctgggcaagatctggaagctggccgacatcgacaaggacggcatgctggacgacgacgagttcgccctggccaaccacctgatcaaggtgaagctggagggccacgagctgcccaacgagctgcccgcccacctgctgccccccagcaagagaaaggtggccgagtag

SEQ ID NO: 180985 - DNA, 528 bp, Artificial Sequence
  derived and/or modified sequence
atgttcagctggctgggcaccgacgacagaagaagaaaggaccccgaggtgttccagaccgtgagcgagggcctgaagaagctgtacaagagcaagctgctgcccctggaggagcactacagattccacgagttccacagccccgccctggaggacgccgacttcgacaacaagcccatggtgctgctggtgggccagtacagcaccggcaagaccaccttcatcagatacctgctggagcaggacttccccggcatgagaatcggccccgagcccaccaccgacagcttcatcgccgtgatgcagggcgacatggagggcatcatccccggcaacgccctggtggtggaccccaagaagcccttcagaaagctgaacgccttcggcaacgccttcctgaacagattcgtgtgcgcccagctgcccaaccccgtgctggagagcatcagcgtgatcgacacccccggcatcctgagcggcgagaagcagagaatcagcagaggccccgccgccggccccggcctgtag

SEQ ID NO: 180986 - DNA, 4636 bp, Artificial Sequence
  derived and/or modified sequence
aactttaattgccaagatttcacccctcctcctcaagcccagattatttatcctccctccggcctgggctgctggatgcagcagcggctgggcttggtcccaggagcagggagagtgcgctcccggccctcctagccgcgtgcccgggccatggtgcggctgagccccgcgcttgggtgaggcggcggcgcggctcggagcccggcggaccggtcctacgggacatcttcccctgaggaggagtcttcccctggggctgcgtgccgggggcgagcggcggccgcgatgttcagctggctgggtacggacgaccgccggaggaaggaccccgaggttttccagacggtgagtgaggggctcaagaaactctacaagagcaagctgctgcccttggaagagcattaccgcttccacgagttccactcgcccgccctggaggatgccgacttcgacaacaagcccatggttctgctggtgggccagtactccactgggaagaccaccttcatcaggtacctgctggaacaggacttcccaggcatgaggattgggcctgagcccaccacagactccttcattgcggtgatgcagggagacatggaggggatcatccctgggaacgccctggtggtggatcccaagaaacccttcaggaaactcaacgcctttggcaacgccttcttgaacaggttcgtgtgtgcccagctacctaaccctgtgctggagagcatcagcgtcatcgacacaccagggatcctctctggggagaagcagaggatcagccgggggtatgactttgcagctgtccttgagtggtttgccgagcgggttgaccgcatcattctgctcttcgatgcccacaaactggacatctctgatgagttctcagaagtcatcaaagccctcaagaaccacgaggacaagatgcgagtggtgctgaacaaagctgaccagatcgagacgcagcagctgatgcgggtgtacggggccctcatgtggtccttggggaagatcgtgaacaccccagaggtgatccgggtctacatcggctccttctggtcccaccccctcctcatccctgacaaccggaagctctttgaggctgaggaacaggacctattcagggacatccagagtctgccccgaaatgctgccctgcgcaagctcaacgacctcatcaaaagggccaggctggccaaggtccacgcctacatcatcagctctctgaagaaggagatgccctcggtgttcgggaaggacaacaagaagaaggagctggtcaacaacctggccgagatctatggccggatcgagcgggagcaccagatctcacctggggacttccccaatctgaagaggatgcaggaccagctgcaggcccaggactttagcaagttccagccgctgaagagcaagctgctggaggtagtggacgacatgctggcccatgacattgcccagctcatggtgctagtgcgccaggaggagtcacagcggcccatccagatggtgaagggcggagcgttcgagggcaccctgcacggcccctttgggcatggctatggggagggggctggagaaggtatcgatgatgctgagtgggtggtggccagggacaagcccatgtacgacgagatcttctacaccctgtcaccggtggatggcaagatcacaggcgctaatgccaagaaggagatggtgcgctccaagctgcccaacagtgtgctgggcaagatctggaagctggccgacattgacaaggatggcatgctggacgacgacgagtttgcactggccaaccacctcatcaaagtcaagctggaggggcacgagctgcccaacgagctgcctgcccacctcctgcccccgtccaagaggaaagttgccgagtgatggggtggggggacattcagacgggcagtgttagaggaggagatgggagcggtgactacacacacacacacacacacacacacacacacaaacatgcacacacacatatgcatatcttgacattgctctgtaggtgagagaggaccatgacgcccatgtttgcagctgatacttgtttgggcacacctccaagttctcgggattagaaggacaagagcactcccaggccccagagtctaagcctaagtctctatcgctcttcccctctcctcggccactccccagataccagacctgaggcaattcacttgccagcacagatggccaacccacctccagattccccagtgcttccacacccgggctctgagcaaatggaaaagacttttcatttagtagacaattcacttctttttctgtgcttcccctatctgctttggcttcctaataagaaatccattcaagagctaggagatctgagggcaggcgggcagctgcagggaggagaggtgagaaaggaagcgtcttctagagacattggcccaggagctctgttctttcctaatctaagcctctgtcttcttcggcaaaccttgctttgaactctgccagtatttcattttaaagaatcccagagcgggagagagaagagaaaaaaattgataagagtgaggaaattgtcctgtagtctattgaaaaccagtcaaggtggttttagttcatagattttgttagatgttctttccacctggcctatgatgtttagatgttcatacttgactcacatttacccagcccctcctgcgtaccaggagctgtgttaggcactttatatacattattctatgtggccctcactgatgccccagggaagtatgcattagccttcccattttgcagttgaggaggctgagtagcctcagaagggtttaggcgaccttctgaaactcacagaagtcacgtgatggagagaggattcaaagccagggcctcagaccctcacacacttgtctgtgctatgatgtatgcaggatcccagcattgatacccaatgacaaactatggagaacaagcaaagtatgcaggccccctgcagcctcccaggacaggctggcaagggaggagggccggccagcatttggtggcccatcagtctggccatctgtcacgtcacagaagcaaaccgtgccttctggctctgcgccccatattcccagcatcatagacatccaacagcaccagcaggagagtgggctagcctgctggatgctgttcgtgcctgtccctgctctgcctcccacccagttgcctgaatcatcccagctcagatgcagccactgtctcttgtcaagtgggacctcatactattctcagaaggctaacttgagaggtttggggccttgttccccagagggtccccagggactctgcagtgtccttggcaaatccccactgtactcaatgccctacattctcttctgtggtctctcccctggcttgcttcatggccactgaaccaatcactttgtatgctatgctcctactgtgatggaaaacaaaatgagtataacttattttatatccatattcagactatatagagaatattctatgcatctatgacgtgcttactactgcagtgcatttgtcattagtcttcatgttaatacagtacatttattctttggtacctgcctggccacagagcatcattcaatggaggctgagggagaagggctgggttcttacttggagttcctggtgaaatctttggctggaaagggctcactggggccacccaatggccagcatccacaaccagcttcccagtgggctggagtttgtctaggctcagtgaccaacccaggcacagctggtggagccaccgctccctgctcctctggagtgaagatgttccctaagcccctgggcttccttctgcaaatacacatttctctttcacatgaaatgaagggcagacaaaggccaggcaaagaggtctcacctgctctggagaaaacccttgagtgccgagtgcaggttagggaccatttctcaactccacacctttcttcaagctgaaggagaaatgggaaggaaatagcagaggtaggtgaagttcctgtctttttattttataggaaagggagatgtctgttatcccctttcttcactgccactggacacacatgccactttcctgcccttctacatatgctgcctctcttccctctctccatcttgaagtctccacccaggagagacctgtgaggtgtgggaattccatgtttgcacagctcccatctccctggaaagaggaactgatgtttgaggggacagatgtgggtcactttccctggcagtgccctctagccttgctgccttggctttctgaccccttccaggcttcaggggcctgggagatctcatgcctcagcccaggaaacatttaatagggaaagcagagacatgtcatgtcagccccacagacaagaatttctagagcacttgtcctgttgttccttgccccgacattactcagtctgggccatggaatccatccaataaacacagcaacaccctatgctactgaccaagcaaagcttgcccctggtaccaaagagctaaatcatgaccaaagtgtgacatgaatgtaactgaaatgcgggttagttgctcaatgtatgcaaagtcccacggacaagagtaaagtctgataccaataaagtgaatgtattccaaa

SEQ ID NO: 180987 - protein, 543 aa, Artificial Sequence
  derived and/or modified sequence
MFSWLKRGGARGQQPEAIRTVTSALKELYRTKLLPLEEHYRFGAFHSPALEDADFDGKPMVLVAGQYSTGKTSFIQYLLEQEVPGSRVGPEPTTDCFVAVMHGDTEGTVPGNALVVDPDKPFRKLNPFGNTFLNRFMCAQLPNQVLESISIIDTPGILSGAKQRVSRGYDFPAVLRWFAERVDLIILLFDAHKLEISDEFSEAIGALRGHEDKIRVVLNKADMVETQQLMRVYGALMWALGKVVGTPEVLRVYIGSFWSQPLLVPDNRRLFELEEQDLFRDIQGLPRHAALRKLNDLVKRARLVRVHAYIISYLKKEMPSVFGKENKKKQLILKLPVIFAKIQLEHHISPGDFPDCQKMQELLMAHDFTKFHSLKPKLLEALDEMLTHDIAKLMPLLRQEELESTEVGVQGGAFEGTHMGPFVERGPDEAMEDGEEGSDDEAEWVVTKDKSKYDEIFYNLAPADGKLSGSKAKTWMVGTKLPNSVLGRIWKLSDVDRDGMLDDEEFALASHLIEAKLEGHGLPANLPRRLVPPSKRRHKGSAE

SEQ ID NO: 180988 - protein, 171 aa, Artificial Sequence
  derived and/or modified sequence
MPSVFGKENKKKQLILKLPVIFAKIQLEHHISPGDFPDCQKMQELLMAHDFTKFHSLKPKLLEALDEMLTHDIAKLMPLLRQEELESTEVGVQGGAFEGTHMGPFVERGPDEAMEDQGQVQIRRDLLQPGACRRQAERLQGQDLDGGDQAPQLSAGAHLEAQRCGPRRHAG

SEQ ID NO: 180989 - protein, 407 aa, Artificial Sequence
  derived and/or modified sequence
MCAQLPNQVLESISIIDTPGILSGAKQRVSRGYDFPAVLRWFAERVDLIILLFDAHKLEISDEFSEAIGALRGHEDKIRVVLNKADMVETQQLMRVYGALMWALGKVVGTPEVLRVYIGSFWSQPLLVPDNRRLFELEEQDLFRDIQGLPRHAALRKLNDLVKRARLVRVHAYIISYLKKEMPSVFGKENKKKQLILKLPVIFAKIQLEHHISPGDFPDCQKMQELLMAHDFTKFHSLKPKLLEALDEMLTHDIAKLMPLLRQEELESTEVGVQGGAFEGTHMGPFVERGPDEAMEDGEEGSDDEAEWVVTKDKSKYDEIFYNLAPADGKLSGSKAKTWMVGTKLPNSVLGRIWKLSDVDRDGMLDDEEFALASHLIEAKLEGHGLPANLPRRLVPPSKRRHKGSAE

SEQ ID NO: 180990 - protein, 413 aa, Artificial Sequence
  derived and/or modified sequence
MFSWLKRGGARGQQPEAIRTVTSALKELYRTKLLPLEEHYRFGAFHSPALEDADFDGKPMVLVAGQYSTGKTSFIQYLLEQEVPGSRVGPEPTTDCFVAVMHGDTEGTVPGNALVVDPDKPFRKLNPFGNTFLNRFMCAQLPNQVLESISIIDTPGILSGAKQRVSRGYDFPAVLRWFAERVDLIILLFDAHKLEISDEFSEAIGALRGHEDKIRVVLNKADMVETQQLMRVYGALMWALGKVVGTPEVLRVYIGSFWSQPLLVPDNRRLFELEEQDLFRDIQGLPRHAALRKLNDLVKRARLVRVHAYIISYLKKEMPSVFGKENKKKQLILKLPVIFAKIQLEHHISPGDFPDCQKMQELLMAHDFTKFHSLKPKLLEALDEMLTHDIAKLMPLLRQEELESSPVAEMTSR

SEQ ID NO: 180991 - protein, 533 aa, Artificial Sequence
  derived and/or modified sequence
MFSWLKRGGARGQQPEAIRTVTSALKELYRTKLLPLEEHYRFGAFHSPALEDADFDGKPMVLVAGQYSTGKTSFIQYLLEQEVPGSRVAVMHGDTEGTVPGNALVVDPDKPFRKLNPFGNTFLNRFMCAQLPNQVLESISIIDTPGILSGAKQRVSRGYDFPAVLRWFAERVDLIILLFDAHKLEISDEFSEAIGALRGHEDKIRVVLNKADMVETQQLMRVYGALMWALGKVVGTPEVLRVYIGSFWSQPLLVPDNRRLFELEEQDLFRDIQGLPRHAALRKLNDLVKRARLVRVHAYIISYLKKEMPSVFGKENKKKQLILKLPVIFAKIQLEHHISPGDFPDCQKMQELLMAHDFTKFHSLKPKLLEALDEMLTHDIAKLMPLLRQEELESTEVGVQGGAFEGTHMGPFVERGPDEAMEDGEEGSDDEAEWVVTKDKSKYDEIFYNLAPADGKLSGSKAKTWMVGTKLPNSVLGRIWKLSDVDRDGMLDDEEFALASHLIEAKLEGHGLPANLPRRLVPPSKRRHKGSAE

SEQ ID NO: 180992 - protein, 226 aa, Artificial Sequence
  derived and/or modified sequence
MPSVFGKENKKKQLILKLPVIFAKIQLEHHISPGDFPDCQKMQELLMAHDFTKFHSLKPKLLEALDEMLTHDIAKLMPLLRQEELESTEVGVQGGAFEGTHMGPFVERGPDEAMEDGEEGSDDEAEWVVTKDKSKYDEIFYNLAPADGKLSGSKAKTWMVGTKLPNSVLGRIWKLSDVDRDGMLDDEEFALASHLIEAKLEGHGLPANLPRRLVPPSKRRHKGSAE

SEQ ID NO: 180993 - DNA, 1632 bp, Artificial Sequence
  derived and/or modified sequence
atgttctcatggctgaaacggggcggagctcgtggccagcaacccgaggccattcgcacggtgaccagcgcactgaaggagctctacagaaccaaactgctgccgctcgaagagcactacaggttcggggcctttcactcccccgcgctggaagatgcggactttgatggcaaacctatggtccttgttgcgggacaatacagcaccgggaaaaccagttttattcaatacttgcttgagcaagaggtccctgggtcgcgtgtggggccggagcctaccactgactgtttcgttgccgtgatgcatggagacaccgagggcactgtgcctggcaacgctcttgtggttgatccagacaagccttttcggaagttgaacccattcggaaacaccttcctgaatcgcttcatgtgcgcacagctccccaaccaagtgctagaatctatctctatcattgacactccaggtatcctttccggggccaagcagcgcgtgagcagaggctacgactttccagcagtcctacgttggttcgctgagcgcgttgatctgattatcctgctctttgacgcccataaattggagatttctgatgaattcagcgaagctattggcgctctgagaggccacgaagataagattagagtcgtgctaaataaggccgatatggtggaaactcaacagctgatgagagtgtatggcgctttgatgtgggccctcggaaaggttgtggggacacctgaggtgctcagagtgtacatcggatccttttggagccaacctctcctcgttcccgacaatcgcagattgttcgagttggaggagcaagatcttttcagggacatccagggcctcccccggcatgcagcactgagaaagctcaacgatttagtcaagagagcccggctagtccgggtgcacgcttatatcatttcttacctgaagaaagagatgccgtccgtttttggaaaggagaataagaagaagcaattgatcctcaagttgcctgtgatatttgcaaagattcagctcgaacatcatatctcgccaggcgacttcccagactgtcagaaaatgcaagaactgctgatggcccacgactttaccaagtttcacagtctcaagccaaaacttctcgaggctcttgacgaaatgctaacgcacgacatcgccaaactgatgccgctcctgaggcaggaggaactggagtccaccgaagtgggggtccaggggggtgctttcgagggcactcatatggggcccttcgtcgagagaggaccagatgaagcaatggaggacggagaggagggaagtgacgatgaagccgagtgggtggtcacaaaggataagtccaaatatgacgaaatcttctataacctggcccccgccgatggtaaactgagcgggagcaaggcaaaaacttggatggtgggaacgaagctccccaattccgttctggggaggatctggaaacttagcgatgttgatcgtgatggtatgctcgacgacgaagagttcgcactggccagtcacctcatcgaagcaaaactggagggtcacgggctgccggccaacctgccacgacgcctcgttccgccaagtaaaagaagacacaaaggaagcgcagagtag

SEQ ID NO: 180994 - DNA, 516 bp, Artificial Sequence
  derived and/or modified sequence
atgccttcggtctttggcaaagagaataagaagaagcaactcattctcaagctccctgtcatcttcgccaagattcaacttgagcatcacatttctcctggcgatttcccagactgtcagaaaatgcaggaactgctcatggcccacgattttaccaagttccactctctgaagcccaaacttctcgaagccctagatgagatgctgactcatgatatcgccaaactgatgcccttactgcggcaggaggaactcgaatccaccgaggtcggcgtgcaaggaggggcctttgaaggcacacatatgggcccttttgtcgagcggggaccagatgaggccatggaagaccagggccaggtgcagatccgtcgcgacctgttacagccaggtgcatgcagacgccaggcggaaaggctgcaagggcaggacttggatggaggggaccaggctccccagttatccgccggtgctcacttggaggcccagcgctgcggcccaaggcgtcatgcagggtag

SEQ ID NO: 180995 - DNA, 1224 bp, Artificial Sequence
  derived and/or modified sequence
atgtgcgctcaactgccgaaccaggtgctggagtctattagtatcattgatacacccggcatcctgtctggagccaagcagcgcgtcagccggggatatgattttcctgcggttctcagatggttcgccgaacgtgttgacctcatcatcctcctgtttgacgcccataaactcgaaatcagcgatgaatttagcgaagccattggcgccttgagggggcacgaggacaaaatccgggttgttctaaacaaagccgacatggtggaaactcagcaactcatgagagtgtatggcgccttgatgtgggccctgggaaaagtagtcggaacgcccgaggtgctgcgggtatatatcggctccttttggagtcagccgttactcgtcccagacaacagacggctgttcgagttggaagagcaggacctctttagagatattcaggggctcccacgacacgctgccctgaggaagctgaatgaccttgtaaaaagagcccggctggtgagagtacacgcttacattatttcgtatttgaaaaaagagatgccctcggtgtttggtaaggagaacaaaaaaaagcagcttatcctgaaactgcccgtgattttcgccaaaatccaattagagcatcatataagccctggcgacttccccgactgccagaaaatgcaggagctgctgatggcccacgacttcactaagtttcatagccttaaaccaaagctgctggaggccctcgacgaaatgcttacgcacgacatcgccaagttaatgccactacttagacaggaagagttggagtccacagaggttggcgtgcaaggtggtgcttttgaggggacacacatgggcccttttgtagaaagggggcccgacgaggctatggaggacggggaagaggggagcgatgacgaggccgaatgggtcgtgaccaaggataaaagcaagtatgacgagattttttataacctggctcctgccgacgggaagctttccggttctaaggcaaaaacatggatggtcggcacgaagctgccgaattccgttcttgggcgcatttggaagctgagcgacgtcgatagagatggtatgttagacgatgaagaatttgctctggcttcgcaccttatcgaggctaaactggagggacatggtttgcctgctaacctgcccagaagactcgtgcccccatccaaacggagacacaagggatcagccgagtag

SEQ ID NO: 180996 - DNA, 1242 bp, Artificial Sequence
  derived and/or modified sequence
atgttcagttggctgaaacgcgggggcgctcggggtcagcagccagaggcaattcgaacagtcacaagcgccctaaaggagctttaccgcactaagctgctgcccctagaggagcactaccgattcggcgcgtttcattctccagcactggaggacgccgactttgatggaaaaccaatggtcctggtggccggtcagtactctacagggaagacctcattcatccaatacttactggaacaagaggtaccgggaagcagagtgggacctgaaccaactaccgactgctttgtggctgtgatgcacggcgacaccgaaggtaccgttccaggcaacgctttggtcgtagatcccgacaagcctttccgcaagctgaacccctttggtaataccttcctcaaccgattcatgtgcgcccagctgcctaaccaagtattagaaagcatcagcattattgatactccaggtattctgtctggggccaagcagagagtgagccgtggatacgacttcccagccgtcctgaggtggtttgcggagcgtgtggacctgattatactgctgtttgacgctcataagttggagatctcggacgagttctccgaagcaatcggggcattgagaggtcatgaggataagatcagggtcgtgctaaataaagcagacatggtggaaactcaacaactgatgagagtctacggtgcactgatgtgggctctgggcaaggttgtggggacacctgaagttctgagagtttatattggcagtttctggagccaaccactgctagtgcccgacaatagaaggttattcgaactggaagaacaggatctgttcagagatatccagggcctgccccggcatgcagcgctgagaaaactgaacgatctggtgaaacgcgccagactggttagggtgcatgcttatataatttcatacctgaagaaggagatgccttccgtgtttggaaaggaaaacaagaagaagcagctaatcctcaagctacctgtgattttcgccaaaattcagcttgagcaccatatttctcccggggacttccctgactgtcagaagatgcaggaactgttaatggcccacgacttcactaaatttcacagcctcaaacctaaactcttagaagcgttagacgaaatgttaacacacgatatcgccaagttaatgccattactacggcaagaagaactggaaagcagcccagtcgccgagatgacatcccgttag

SEQ ID NO: 180997 - DNA, 1602 bp, Artificial Sequence
  derived and/or modified sequence
atgttctcttggcttaagagaggcggcgctcgcggacaacagccagaggcaatccggacagttacctcagccctcaaggagctgtatagaaccaaacttctgcctctggaggaacactacagattcggagcttttcatagccctgcactggaggacgccgattttgacggtaaacccatggtactagtggcagggcagtacagcactggtaaaacctcttttattcagtacctgttggaacaggaagttccggggagcagagtcgccgttatgcacggagataccgaggggactgttcctggtaacgctctggtggtggaccctgataaaccatttaggaaattaaacccctttggtaacactttccttaaccgcttcatgtgcgctcagctgcctaatcaggtactagaatctatctccatcatcgacaccccgggaattctatccggcgcgaaacagagggtttctcgtggctacgattttcccgctgtgctgaggtggtttgccgaacgcgtggacctgattatacttcttttcgacgctcacaaactagaaatttcagacgagttttcagaggccattggcgcactgcgcgggcatgaagataaaatccgcgtagttctgaataaagcagatatggttgagacccagcagctgatgcgggtgtatggagctctcatgtgggctctcgggaaggtcgtggggacgccagaagtgctgagagtgtacatcggatctttctggtctcagcctctcctcgtgccagataaccgccggctgttcgagctagaggaacaggatctattcagggacattcaaggccttccacggcatgccgcgcttagaaaactgaacgatcttgtcaagagagcccgcctggtgagagtccatgcctacatcatcagctatctgaagaaggagatgccatcggtctttggaaaagagaacaagaaaaaacagttgattctgaagctccccgttatctttgccaaaattcagttggagcatcatattagtcccggtgacttcccagattgtcaaaaaatgcaggaactgctcatggctcatgacttcactaagtttcacagcttaaaacctaaacttctggaagctcttgacgaaatgttgacccatgacatagcaaagctgatgccacttctacgccaagaggagctcgagtcaaccgaggtaggggtgcaggggggcgcgtttgagggcacccatatggggccttttgttgaaaggggacccgatgaggctatggaggacggcgaggaggggagcgacgacgaggccgaatgggtcgtgaccaaggacaagagtaagtacgacgagattttttataatctggccccggccgacggaaagctcagcgggagtaaggcaaaaacctggatggtaggaacaaaactgccaaatagcgtgcttggtcggatttggaaacttagtgacgtggaccgggacgggatgctggatgatgaggagtttgcgctcgcctcacacctgatagaagcaaagctggagggccacggcctgcccgccaatttgccgcgaaggctggtccccccatcaaagcggcgacataagggttccgctgaatag

SEQ ID NO: 180998 - DNA, 681 bp, Artificial Sequence
  derived and/or modified sequence
atgccaagcgtctttgggaaggaaaataagaaaaagcagctcatcctgaagctacctgtgatatttgccaaaattcaactggaacatcacatctctcctggtgatttccccgactgtcagaaaatgcaggaattgctgatggctcatgatttcaccaaatttcacagcctgaagcccaagttgttggaagcactcgacgaaatgctgacccatgacatcgcgaaactgatgccgttgctgcgccaggaggaattagagtcgacagaagtcggagtgcaggggggtgcctttgagggcacacacatgggaccttttgtagaaagaggaccagatgaggccatggaggatggggaggaggggtcagacgatgaagctgaatgggtggtaacgaaagacaaatctaaatacgatgagatcttttacaaccttgcaccagctgacggaaagctgagcggatcgaaggccaagacttggatggtggggacaaagctgccaaattcagtcctaggccgaatatggaaattgagcgacgtcgacagggacggcatgctagatgatgaagagtttgcccttgcatcacatttgattgaagctaagcttgaaggccacggcctacctgctaatctgccgagacgcctcgtacctccatctaaacgccgacacaaaggcagtgcagaatag

SEQ ID NO: 180999 - DNA, 1632 bp, Artificial Sequence
  derived and/or modified sequence
atgttctcctggctgaagaggggcggggcccggggccagcagcctgaggccatcagaacagtgaccagcgccctgaaggagctgtaccgcaccaagctgctgcccctggaggagcactacagatttggagccttccacagccctgccctggaggatgctgactttgatggcaagcccatggtgctggtggccggccagtacagcacaggcaagaccagcttcatccagtacctgctggagcaggaggtgcccggcagccgggtgggccctgagcccaccacagactgctttgtggccgtgatgcacggggacacagagggcaccgtgcctggaaatgccctggtggtggaccctgacaagcccttcaggaagctgaaccccttcggcaacaccttcctgaaccgcttcatgtgtgcccagctgcccaaccaggtgctggagagcatcagcatcatcgacaccccaggcatcctgagcggggccaagcagagggtgtcccggggctatgacttccctgctgtgctgcgctggtttgctgagcgggtggacctgatcatcctgctgtttgatgcccacaagctggagatcagtgatgagttcagcgaggccatcggggccctgcggggccacgaggacaagatccgggtggtgctgaacaaggctgacatggtggagacccagcagctgatgagggtgtatggagccctgatgtgggccctgggcaaggtggtgggcaccccagaggtgctgcgggtgtacatcggcagcttctggagccagcccctgctggtgcctgacaacagaaggctgtttgagctggaggagcaggacctcttccgggacatccagggcctgcccaggcatgctgccctgaggaagctgaatgacctggtgaagagggcccggctggtgcgggtgcacgcctacatcatctcctacctgaagaaggagatgcccagcgtgtttgggaaggagaacaagaagaagcagctgatcctgaagctgcccgtcatctttgccaagatccagctggagcaccacatcagccctggggacttcccagactgccagaagatgcaggagctgctgatggcccatgacttcaccaagttccacagcctgaagcccaagctgctggaggccctggatgagatgctgacccatgacatcgccaagctgatgcccctgctgcggcaggaggagctggagagcacagaggtgggcgtgcagggcggggcctttgagggcacccacatgggcccctttgtggagcggggcccagatgaggccatggaggatggagaggagggcagtgatgatgaggccgagtgggtggtgaccaaggacaagagcaaatatgatgagatcttctacaacctggccccagcagatggcaagctgagcggcagcaaggccaagacctggatggtgggcaccaagctgcccaacagcgtgctgggccgcatctggaagctgagtgatgtggacagagatggcatgctggatgatgaggagtttgccctggccagccacctgattgaggccaagctggagggccacggcctgcctgccaacctgccccggcggctggtgccccccagcaagaggaggcacaagggcagcgctgagtag

SEQ ID NO: 181000 - DNA, 516 bp, Artificial Sequence
  derived and/or modified sequence
atgcccagcgtgtttgggaaggagaacaagaagaagcagctgatcctgaagctgcctgtgatctttgccaagatccagctggagcaccacatcagccctggggacttcccagactgccagaagatgcaggagctgctgatggcccatgacttcaccaagttccacagcctgaagcccaagctgctggaggccctggatgagatgctgacccatgacatcgccaagctgatgcccctgctgcggcaggaggagctggagagcacagaggtgggcgtgcagggcggggcctttgagggcacccacatgggcccctttgtggagcggggcccagatgaggccatggaggaccagggccaggtgcagatcagaagagacctgctgcagcccggggcctgccggcggcaggccgagcggctgcagggccaggacctggatggaggagaccaggccccccagctgtctgctggggcccacctggaggcccagagatgtggccccaggagacatgctggatag

SEQ ID NO: 181001 - DNA, 1224 bp, Artificial Sequence
  derived and/or modified sequence
atgtgtgcccagctgcccaaccaggtgctggagagcatcagcatcatcgacaccccaggcatcctgagcggggccaagcagagggtgtcccggggctatgacttccctgctgtgctgcgctggtttgctgagcgggtggacctgatcatcctgctgtttgatgcccacaagctggagatcagtgatgagttcagcgaggccatcggggccctgcggggccacgaggacaagatccgggtggtgctgaacaaggctgacatggtggagacccagcagctgatgagggtgtatggagccctgatgtgggccctgggcaaggtggtgggcaccccagaggtgctgcgggtgtacatcggcagcttctggagccagcccctgctggtgcctgacaacagaaggctgtttgagctggaggagcaggacctcttccgggacatccagggcctgcccaggcatgctgccctgaggaagctgaatgacctggtgaagagggcccggctggtgcgggtgcacgcctacatcatctcctacctgaagaaggagatgcccagcgtgtttgggaaggagaacaagaagaagcagctgatcctgaagctgcccgtcatctttgccaagatccagctggagcaccacatcagccctggggacttcccagactgccagaagatgcaggagctgctgatggcccatgacttcaccaagttccacagcctgaagcccaagctgctggaggccctggatgagatgctgacccatgacatcgccaagctgatgcccctgctgcggcaggaggagctggagagcacagaggtgggcgtgcagggcggggcctttgagggcacccacatgggcccctttgtggagcggggcccagatgaggccatggaggatggagaggagggcagtgatgatgaggccgagtgggtggtgaccaaggacaagagcaaatatgatgagatcttctacaacctggccccagcagatggcaagctgagcggcagcaaggccaagacctggatggtgggcaccaagctgcccaacagcgtgctgggccgcatctggaagctgagtgatgtggacagagatggcatgctggatgatgaggagtttgccctggccagccacctgattgaggccaagctggagggccacggcctgcctgccaacctgccccggcggctggtgccccccagcaagaggaggcacaagggcagcgctgagtag

SEQ ID NO: 181002 - DNA, 1242 bp, Artificial Sequence
  derived and/or modified sequence
atgttctcctggctgaagaggggcggggcccggggccagcagcctgaggccatcagaacagtgaccagcgccctgaaggagctgtaccgcaccaagctgctgcccctggaggagcactacagatttggagccttccacagccctgccctggaggatgctgactttgatggcaagcccatggtgctggtggccggccagtacagcacaggcaagaccagcttcatccagtacctgctggagcaggaggtgcccggcagccgggtgggccctgagcccaccacagactgctttgtggccgtgatgcacggggacacagagggcaccgtgcctggaaatgccctggtggtggaccctgacaagcccttcaggaagctgaaccccttcggcaacaccttcctgaaccgcttcatgtgtgcccagctgcccaaccaggtgctggagagcatcagcatcatcgacaccccaggcatcctgagcggggccaagcagagggtgtcccggggctatgacttccctgctgtgctgcgctggtttgctgagcgggtggacctgatcatcctgctgtttgatgcccacaagctggagatcagtgatgagttcagcgaggccatcggggccctgcggggccacgaggacaagatccgggtggtgctgaacaaggctgacatggtggagacccagcagctgatgagggtgtatggagccctgatgtgggccctgggcaaggtggtgggcaccccagaggtgctgcgggtgtacatcggcagcttctggagccagcccctgctggtgcctgacaacagaaggctgtttgagctggaggagcaggacctcttccgggacatccagggcctgcccaggcatgctgccctgaggaagctgaatgacctggtgaagagggcccggctggtgcgggtgcacgcctacatcatctcctacctgaagaaggagatgcccagcgtgtttgggaaggagaacaagaagaagcagctgatcctgaagctgcccgtcatctttgccaagatccagctggagcaccacatcagccctggggacttcccagactgccagaagatgcaggagctgctgatggcccatgacttcaccaagttccacagcctgaagcccaagctgctggaggccctggatgagatgctgacccatgacatcgccaagctgatgcccctgctgcggcaggaggagctggagagcagccctgtggccgagatgaccagcaggtag

SEQ ID NO: 181003 - DNA, 1602 bp, Artificial Sequence
  derived and/or modified sequence
atgttctcctggctgaagaggggcggggcccggggccagcagcctgaggccatcagaacagtgaccagcgccctgaaggagctgtaccgcaccaagctgctgcccctggaggagcactacagatttggagccttccacagccctgccctggaggatgctgactttgatggcaagcccatggtgctggtggccggccagtacagcacaggcaagaccagcttcatccagtacctgctggagcaggaggtgcccggcagccgggtggccgtgatgcacggggacacagagggcaccgtgcctggaaatgccctggtggtggaccctgacaagcccttcaggaagctgaaccccttcggcaacaccttcctgaaccgcttcatgtgtgcccagctgcccaaccaggtgctggagagcatcagcatcatcgacaccccaggcatcctgagcggggccaagcagagggtgtcccggggctatgacttccctgctgtgctgcgctggtttgctgagcgggtggacctgatcatcctgctgtttgatgcccacaagctggagatcagtgatgagttcagcgaggccatcggggccctgcggggccacgaggacaagatccgggtggtgctgaacaaggctgacatggtggagacccagcagctgatgagggtgtatggagccctgatgtgggccctgggcaaggtggtgggcaccccagaggtgctgcgggtgtacatcggcagcttctggagccagcccctgctggtgcctgacaacagaaggctgtttgagctggaggagcaggacctcttccgggacatccagggcctgcccaggcatgctgccctgaggaagctgaatgacctggtgaagagggcccggctggtgcgggtgcacgcctacatcatctcctacctgaagaaggagatgcccagcgtgtttgggaaggagaacaagaagaagcagctgatcctgaagctgcccgtcatctttgccaagatccagctggagcaccacatcagccctggggacttcccagactgccagaagatgcaggagctgctgatggcccatgacttcaccaagttccacagcctgaagcccaagctgctggaggccctggatgagatgctgacccatgacatcgccaagctgatgcccctgctgcggcaggaggagctggagagcacagaggtgggcgtgcagggcggggcctttgagggcacccacatgggcccctttgtggagcggggcccagatgaggccatggaggatggagaggagggcagtgatgatgaggccgagtgggtggtgaccaaggacaagagcaaatatgatgagatcttctacaacctggccccagcagatggcaagctgagcggcagcaaggccaagacctggatggtgggcaccaagctgcccaacagcgtgctgggccgcatctggaagctgagtgatgtggacagagatggcatgctggatgatgaggagtttgccctggccagccacctgattgaggccaagctggagggccacggcctgcctgccaacctgccccggcggctggtgccccccagcaagaggaggcacaagggcagcgctgagtag

SEQ ID NO: 181004 - DNA, 681 bp, Artificial Sequence
  derived and/or modified sequence
atgcccagcgtgtttgggaaggagaacaagaagaagcagctgatcctgaagctgcctgtgatctttgccaagatccagctggagcaccacatcagccctggggacttcccagactgccagaagatgcaggagctgctgatggcccatgacttcaccaagttccacagcctgaagcccaagctgctggaggccctggatgagatgctgacccatgacatcgccaagctgatgcccctgctgcggcaggaggagctggagagcacagaggtgggcgtgcagggcggggcctttgagggcacccacatgggcccctttgtggagcggggcccagatgaggccatggaggatggagaggagggcagtgatgatgaagctgagtgggtggtgaccaaggacaagagcaaatatgatgagatcttctacaacctggccccagcagatggcaagctgagcggcagcaaggccaagacctggatggtgggcaccaagctgcccaacagcgtgctgggccgcatctggaagctgagtgatgtggacagagatggcatgctggatgatgaggagtttgccctggccagccacctgattgaggccaagctggagggccacggcctgcctgccaacctgccccggcggctggtgccccccagcaagagaagacacaagggcagcgctgagtag

SEQ ID NO: 181005 - DNA, 1632 bp, Artificial Sequence
  derived and/or modified sequence
atgttcagctggctgaagcggggcggcgcccggggccagcagcccgaagcaattcggaccgtaaccagtgccctgaaggaactgtatagaactaagctgttgcctttagaggaacattaccgctttggcgcgttccatagtcccgcactggaagatgctgactttgatggcaagcccatggtacttgtcgcagggcagtattccacaggaaagaccagctttatccaatacctcctggagcaggaagtccctgggagtagggtaggccccgagcccacaacagattgcttcgtcgcagtgatgcatggagacacggagggcacggtgcccggtaacgcattggttgtggacccagacaagccttttcgcaaactgaacccattcgggaacacctttctgaaccgctttatgtgcgcccagctgccaaatcaggtgctggaatccatctcaatcatcgatacaccaggaatcctgtcaggcgcaaaacaaagggtatcgagaggatatgacttccccgctgttcttcgctggtttgctgaacgcgttgacctgataatcttgctttttgacgcccacaagttggagattagcgatgagtttagtgaagctattggggcactccgaggacacgaggataagatccgcgttgttttgaataaggctgacatggtcgaaactcagcagctcatgcgagtgtatggggcactgatgtgggctcttggcaaagtggtgggaactcccgaggtacttagagtctacatcgggtctttttggtcacagccactactcgtgcccgacaatcgacgactttttgagctggaagagcaggacctgtttagagatatacagggcctgccacggcacgccgcgcttcggaagctgaacgatctggtcaagagagcgagactcgtccgggtccatgcttacataatcagttacctgaaaaaagagatgcccagcgtatttggcaaggaaaataaaaaaaagcagctgatactcaaactccctgtcatctttgccaaaatccagctcgaacatcatattagccctggggacttccccgactgccagaaaatgcaggaactgttgatggcccacgactttaccaagtttcactccctgaagcctaagttacttgaggcattggatgagatgctgacacacgatattgccaaactcatgccccttctgagacaggaggaattggagtccactgaagtcggagttcagggcggcgcttttgaaggcacccacatgggcccttttgtggaacgggggcccgacgaggccatggaagacggcgaggagggctccgatgacgaggctgagtgggttgtcacaaaagacaaatcaaagtatgatgagatcttttataaccttgcacccgccgatgggaagctcagcggatctaaagcgaaaacctggatggttggcactaaactgcccaactctgttctgggacggatatggaagttaagcgacgtcgatagggacggaatgctagacgatgaggagttcgcattggcttcccatctcatagaagctaagctggaaggtcacggcctacccgctaacttaccaagacggttagtacccccttctaaacggcggcataagggaagtgcagagtag

SEQ ID NO: 181006 - DNA, 516 bp, Artificial Sequence
  derived and/or modified sequence
atgcccagcgtgttcggcaaggagaacaagaagaagcagctgatcctgaagctcccggtgatcttcgctaagatccagctggagcaccacatcagccctggagatttccccgattgccagaaaatgcaggagctgcttatggcgcatgatttcacgaagtttcactctcttaagccaaagctcctcgaagcgttggatgaaatgttgacccatgacattgcgaaactgatgcctctgctgagacaggaggaactggagtcaaccgaagtaggagtgcagggaggggcctttgagggcacacatatgggcccgtttgtcgagcgtggaccagacgaggcgatggaagaccaagggcaggttcaaattcggcgcgatctgcttcagcccggggcttgtcgcaggcaggcggagagacttcagggacaggacttggatggcggcgatcaggcccctcagctgtccgccggcgcacacctggaagcgcagaggtgtggcccacgaaggcacgccggatag

SEQ ID NO: 181007 - DNA, 1224 bp, Artificial Sequence
  derived and/or modified sequence
atgtgcgcccagctgcccaaccaggtgctggagagcatcagcatcatcgacactccaggaatcttgtccggggccaaacagcgcgtgtcaagaggctatgactttccagcggttctgagatggtttgccgagagggtcgatcttattattctcttattcgacgctcataaactcgaaatcagtgacgaatttagcgaggccattggcgcactgcggggtcatgaggacaagattagggtggtgctcaacaaagcggatatggtggagacacagcagctgatgcgagtgtatggcgctctgatgtgggccctggggaaagtggttgggacacccgaggttcttcgggtgtatataggatcgttctggagccagccactgctggttcctgataaccggagattgttcgagttggaggagcaggacctcttcagagacatacagggattgcctcgtcacgctgcccttcgtaaactgaatgacttagtcaaaagggccaggctagtgagagtccatgcttatataattagctacttgaagaaagagatgccatccgtctttggcaaagaaaacaagaaaaagcagctgattttaaagctgcctgtcatatttgcaaaaatccagctggagcatcacatctcgcccggcgattttccggactgccagaagatgcaggaactactaatggcgcacgatttcacaaaatttcacagcctgaagccaaagcttctggaggccctcgacgagatgttgacacacgacatcgcaaagcttatgccactgctgagacaggaagagctcgagtccacagaggtgggagtgcaagggggagcgtttgagggcacccacatgggcccattcgtggaacgcggccccgacgaagcaatggaggatggggaggagggaagcgacgacgaggctgaatgggttgtcaccaaggacaaatcaaaatacgacgagatcttttataacctggcacctgctgacggaaaattgagcggctccaaggccaagacatggatggtcgggactaagttgcccaattccgtactgggacggatctggaagctctctgacgttgacagagatggtatgctggacgatgaggaatttgccttggccagtcatttgatcgaggccaagctggagggccatggactgcccgcaaacctccctcgacgcctggtccctccatccaagagaaggcataagggctcggccgaatag

SEQ ID NO: 181008 - DNA, 1242 bp, Artificial Sequence
  derived and/or modified sequence
atgttcagctggctgaagcggggcggcgcccggggccagcagcccgaagctattagaacagtcacctctgcattgaaggaactgtacaggacgaaactgctacctctggaggagcattaccggttcggggctttccactctcctgcattagaagacgcagattttgatggcaagcctatggtgctagtggctggccagtactcaacaggaaaaacatccttcatccaatacctgttggagcaggaagttcccggcagccgggtcggtccagaaccaacaacggattgcttcgtggccgtgatgcacggtgacaccgaaggcactgttcctggcaacgccctagttgtcgaccccgataaaccatttagaaagctgaaccccttcggcaataccttcctgaacagattcatgtgcgcccaattgccaaatcaggtcctcgagtcaatttcaataatcgatactcccggcattcttagtggggctaaacagcgtgtgtcaagagggtacgatttcccagccgtcttacggtggtttgctgaacgggtggatctcattattctcttgttcgatgcgcataagctggaaatcagcgacgagttctcagaggctatcggggcattgcgcggtcatgaagataagattcgcgtcgtcttaaacaaggccgatatggtggagactcagcaacttatgagagtctacggtgctctgatgtgggcccttggaaaggtagtagggacacccgaggtcctgcgggtgtatatcggcagcttttggagccagccattactggtgccggacaatcggcggctctttgagttggaagagcaagacctattccgagatattcaaggactgcctcgacatgcagccttacgtaagctgaatgacttggtcaaacgggcaagactggtgcgggtgcacgcatacatcatttcctacctgaagaaagaaatgccttccgtcttcggcaaggaaaacaaaaagaagcagctcattttgaagctcccggtcatcttcgcaaagatacaactcgaacatcatataagtcctggcgattttccagactgtcagaaaatgcaggaacttcttatggcccacgacttcacaaagttccactcccttaagcctaaactgcttgaagctctggacgaaatgctgacccacgatattgccaagttgatgccattgcttcgccaggaggaactggagagcagtccggtagccgaaatgacaagtcgctag

SEQ ID NO: 181009 - DNA, 1602 bp, Artificial Sequence
  derived and/or modified sequence
atgttcagctggctgaagcggggcggcgcccggggccagcagcccgaggccattaggacggtgacgtctgccctgaaggagttgtatagaaccaagttacttcctctggaggagcactatcgctttggtgcttttcattctccagcactggaggacgccgattttgatggcaaaccgatggtgctcgtggcgggacagtattctacaggtaagacctctttcattcaatatcttttggagcaggaggtgcctggatcgcgcgtcgcggttatgcacggagacaccgaagggacagtgcccggcaacgcacttgttgtcgatccggacaaacctttcagaaagctgaatccctttggtaatacttttctgaataggttcatgtgtgcccaactgcccaaccaggtgttagagtcaatcagcataatcgacacccccggcatactgtccggcgcaaagcagcgggtgtctagggggtacgatttcccagcagttctgagatggttcgcggagcgagtcgacctcattattcttctgttcgacgcgcacaagctcgagatttctgacgaatttagcgaggcgatcggggcacttcgcggccacgaggataaaatcagagttgttctgaacaaagccgatatggtggaaacacagcagctcatgagagtgtatggcgccttgatgtgggcactgggaaaggtcgtgggcacccctgaagtgctcagggtgtacattggcagcttctggtctcaaccattgctggtccccgacaatcgtaggctgttcgaactggaggagcaggatctgttccgggatatccagggactccctcggcacgcggcgctgagaaagctaaatgatcttgtgaagagggctcggttggtcagggtccacgcttatattatcagctaccttaaaaaagagatgccgagtgttttcggcaaggaaaacaagaagaagcagctcatcctgaagctgccggtgatctttgccaagatccagcttgaacaccacatctcgccaggcgattttcccgattgccaaaaaatgcaggaactattaatggcccacgactttactaagttccactccctcaaacctaaattactggaggccctggacgagatgctgactcatgacatcgcaaagctgatgcctctactacgccaggaggagctggaatctaccgaggtgggcgtgcaaggcggcgctttcgaaggaacccacatggggccttttgtcgaacgaggcccagatgaagccatggaagacggggaagagggcagcgacgacgaagcagagtgggtggtgacaaaggacaagagtaagtacgatgagattttttataacttagcgcccgccgacgggaagctgtcggggagcaaggccaaaacctggatggtcggcacgaaactgcccaactccgtgctgggacgcatctggaaactaagtgacgtagacagggacggcatgctggatgacgaggaatttgctctagcgtcacacctgatcgaagccaagctcgaagggcacggccttcccgccaatttgccccgtagactcgtgccaccatcaaagcgaagacacaaggggtctgccgagtag

SEQ ID NO: 181010 - DNA, 681 bp, Artificial Sequence
  derived and/or modified sequence
atgcccagcgtgttcggcaaggagaacaagaagaagcagctgatcttgaagctccctgtgatttttgcgaagatccagcttgagcatcatatctctccaggcgacttccctgattgccagaaaatgcaggaactgctgatggcccatgacttcactaagtttcactcactcaagcctaagctgttagaggcccttgacgagatgttgacccacgatatagcaaagctcatgccattgttaagacaggaggaattggaatcgacagaggtaggggtgcagggcggtgccttcgagggtactcatatgggaccttttgtggaacgcggcccggatgaggccatggaggatggtgaggaaggtagcgacgacgaagccgagtgggtcgtgaccaaagataagtctaagtacgatgagatcttctacaacttagccccagcagatggaaagctgagcggcagcaaggccaaaacatggatggtgggaactaaattgcctaactccgtcctcggccgaatatggaagctgtctgacgtcgacagggacggaatgctggatgatgaggaatttgcgctggcctcccatctcatcgaggccaagctggagggccatggcctaccggccaacctgccgcggcgcctagttccaccatccaaacgcaggcacaaaggctccgcagagtag

SEQ ID NO: 181011 - DNA, 1632 bp, Artificial Sequence
  derived and/or modified sequence
atgttctcctggctaaaacgcggaggggcacgagggcagcagcccgaagcgattcggactgtgaccagcgcccttaaggaactgtaccggacgaagctgctccctttagaagagcattacaggttcggggcattccattcccccgcattagaagatgccgactttgacggcaaacctatggtgttagttgcaggccagtattcgactggcaagaccagctttatacagtacctgcttgagcaggaggttcccggatcgagggtaggccctgaacctacaacagactgctttgtggctgtgatgcacggggacacggaggggacagtacccggaaacgccctcgtggtggatccggacaagccctttcggaagctgaatccattcggaaacacttttttgaatcgcttcatgtgtgctcagctacccaaccaggtgctcgaaagcatctccatcatagacacacctgggatcctaagtggagctaagcagcgagtaagcaggggatatgatttcccggcagtgctacggtggttcgccgagagagtcgatctcatcattcttttgttcgacgcccacaagctggaaatttcagacgaattctccgaagcaattggtgcactacggggtcacgaagacaaaattagagtcgtgcttaacaaagcagacatggtagagacacagcagctaatgcgggtctatggggcattaatgtgggctctggggaaggtcgttggcactcccgaagtacttagggtttatatcggatcattctggtcccagccccttctcgtcccagacaaccgcagactgtttgagcttgaggagcaagacttgtttcgggacatccaaggattgccacgtcatgccgcactgcgcaagctcaatgacttggttaagcgggcaaggctggtgagagtccatgcatacatcataagctacctgaaaaaggaaatgcctagtgtttttggaaaggaaaacaaaaaaaaacagcttattttgaagttacctgtgattttcgccaagattcaactcgagcatcacatctccccaggcgattttcctgattgccaaaagatgcaagagttgctcatggcgcatgattttacaaagtttcatagcctgaagccgaagttgctggaagcactggacgagatgctaacacatgatattgcgaagttgatgcccctgctgcgccaagaagagctggagtctaccgaagttggtgtccaaggtggcgcttttgaaggaacacacatggggccatttgtcgaacgcggaccagatgaagcaatggaagacggggaagagggttccgatgatgaagcagagtgggtcgtgaccaaggataagagtaagtatgacgagatattctataacctggcaccggctgacggaaaactttccggtagcaaagccaagacatggatggtcggaaccaagctgcccaactccgtgctgggaaggatctggaaactttccgatgtggaccgcgatggaatgctcgacgacgaagaattcgctcttgcaagccatctcatcgaggccaagctggagggacacggtctgcctgcaaacttaccgaggagattggtgcctccatccaaacgtcggcataagggctccgccgagtag

SEQ ID NO: 181012 - DNA, 516 bp, Artificial Sequence
  derived and/or modified sequence
atgcctagtgttttcggaaaggaaaacaaaaaaaagcagctgatcttgaagctacctgtcatcttcgcgaaaattcagctggagcaccacatttcacccggagacttcccggattgtcagaaaatgcaggagctgttgatggcccacgactttactaagtttcacagtctgaaacccaaactccttgaggcgttggatgagatgctgacacacgatatcgccaagcttatgcctcttctgcggcaggaggaactagaaagcactgaggtaggcgtgcagggaggcgctttcgaggggacccatatgggcccatttgttgaacggggacctgacgaggctatggaagaccaggggcaggttcagatccggagagacctcttacagcccggagcttgcaggcgacaagccgagcgcctgcagggtcaggatctggatggaggtgaccaggctccacagctgtctgcaggagcccatctcgaggcacaacggtgcggtcctcgcaggcatgcaggatag

SEQ ID NO: 181013 - DNA, 1224 bp, Artificial Sequence
  derived and/or modified sequence
atgtgtgcccagctgccgaatcaggttcttgagtctatctctatcatcgacacccctggtattcttagcggagctaagcagcgagtgagcagaggatatgacttccccgcagttctgcggtggttcgccgaaagagtcgatctgataatcctcttgttcgacgcccataaactggagatctctgatgaattctcagaggccatcggagccctaagggggcacgaggacaagatcagggtggtactcaataaagcagacatggtcgagacccagcagttgatgagagtgtatggggcattaatgtgggcattaggaaaggtggtaggcacccctgaggtcctgcgtgtgtatatcggatctttctggtcccagcctctgcttgtgcccgataaccgcagactgtttgaactcgaagagcaggatctttttcgcgatatccagggcttaccccgacacgcagcgctgcgaaaactgaatgacctggtgaagagggcccgacttgttcgagtgcacgcttatattatctcataccttaagaaggaaatgccttccgtttttgggaaagagaataagaaaaagcagctgatcctcaagctacctgtgatcttcgctaagatacagttggaacaccatatctcacccggtgactttcctgactgtcagaaaatgcaagagctacttatggcccatgacttcactaaatttcactctctcaagcctaagttgctcgaagccttagatgaaatgcttacacacgatattgcaaaattaatgcccctgctgagacaggaagaactcgaaagtacggaggttggagtgcagggtggagcattcgaaggcactcacatgggaccattcgtagagcggggtcccgacgaggccatggaggacggcgaagagggcagtgatgacgaggccgaatgggtggtcaccaaagataaatcaaagtacgatgagatcttttataatctcgctcccgcagatggaaagttgtcaggctctaaggcaaagacgtggatggtgggtacgaaactaccaaactctgtactgggaagaatttggaagctgtctgacgtcgacagggatgggatgctcgacgatgaagagtttgcgttagcctcccacttgatagaggcaaaattggaaggccacggtctcccggctaatctgcctcgccgtttggtgcctccttcgaagcgtcgacataagggcagcgctgaatag

SEQ ID NO: 181014 - DNA, 1242 bp, Artificial Sequence
  derived and/or modified sequence
atgttcagctggcttaaacggggaggcgcacgcggtcagcagccagaagcaatccggaccgtaacttccgcattaaaggagctttacagaaccaagcttctgccactcgaagagcactatcggttcggtgctttccactctcccgcactcgaagatgcagatttcgacgggaaaccaatggtgctggtggctggtcagtacagtacaggcaagacatcgtttatacagtacttattggagcaggaagtgcccggatcccgcgtcggaccggagcccacaaccgactgcttcgtcgccgtcatgcacggtgacacagagggtaccgtgcccggaaacgctctggttgtggacccagataaaccctttcggaagctcaatccttttgggaacacctttctcaaccgcttcatgtgcgcgcagctaccaaaccaagtgcttgaatcaattagtataattgacacccctggaatactctcaggagctaagcagagggtcagtcgcggatacgacttccctgctgtgcttcggtggtttgcagaacgggttgatctcataattctgctcttcgatgcccacaagctggaaatctcagatgagttctccgaagccatcggcgcactccggggtcacgaggacaagattagagtggtgcttaataaagccgatatggtcgagacccagcagttaatgcgtgtgtacggggctctaatgtgggcacttggtaaggtggtaggtacccccgaggtcctgcgcgtgtacattggtagcttttggtcacaaccacttttggtgcctgacaaccggaggcttttcgagctcgaggaacaggatctgttcagagatatccagggcctccccaggcacgctgccctgcgtaagctgaatgatttagtcaaacgggcaagattggtgagagttcacgcgtacatcatcagctacctcaaaaaggagatgccctccgtgttcggtaaagaaaacaagaagaagcagcttattttgaaattgccggtgatctttgcaaagattcagcttgagcatcatatctccccgggagacttccctgattgccagaaaatgcaggagttacttatggctcatgactttacaaaattccactctctcaaaccgaaactgttagaggctttggatgaaatgctgacacacgatatcgctaaactcatgccactcctgcgacaggaggaattggaatcctcccccgtggctgagatgacttcacgctag

SEQ ID NO: 181015 - DNA, 1602 bp, Artificial Sequence
  derived and/or modified sequence
atgttttcctggcttaaaagagggggagcacgcggtcagcagcctgaggcaattcggacagtgacttctgctctgaaggagctgtaccggacaaaactactgcccctcgaagaacattaccgctttggagcctttcatagccccgcattagaagacgccgactttgacggaaaacccatggtgctagtggccggtcagtactcaacaggcaaaacatcttttattcagtacctcttggagcaggaagttcccggttcacgggttgcagttatgcacggggacactgagggaactgtgccaggtaatgctctcgtcgtggatcctgataaaccctttcgcaagctgaatccttttggcaacaccttcctgaacagattcatgtgcgcgcaattacctaatcaggtattagagagtatttctatcattgatacccctggtatcctaagtggcgcaaagcagcgagtgagtaggggctacgattttccagctgtactgcgttggttcgctgagcgcgtggacctgatcatactactattcgacgctcacaaattggagatctcagatgagtttagcgaggccattggtgctcttagggggcacgaggacaagatccgagtagtgctcaacaaggccgatatggttgagacgcagcagctcatgcgggtttacggtgctctgatgtgggcattgggcaaggtggtcggaacgcctgaggtattgagagtttacatcggatcattttggtcgcaacctttgctggtgcctgataaccgtaggttattcgaacttgaggaacaggaccttttccgtgacatccagggtctgcctagacatgccgctctccgcaagctgaatgaccttgtgaagagggcaaggctggtcagagtgcacgcatacataatctcttatctgaagaaggagatgccttctgttttcggtaaggagaataaaaagaaacagctgattctgaagctgccagtcatctttgccaagattcagctcgaacaccacatcagcccaggcgatttcccagactgccagaaaatgcaagagttgttgatggcccacgatttcactaaatttcacagtctcaagcccaaactcctggaagcactggacgagatgctcacccacgacatcgccaagttaatgcctctgctgaggcaggaggagctggagtctacagaggtgggcgtgcaggggggtgcttttgagggaacgcacatggggccttttgtggaacgaggacccgacgaggcaatggaagatggggaggagggctctgacgatgaggccgagtgggtggttacgaaagacaagagcaaatatgacgagattttctacaacctggcccctgccgatgggaaactatcaggcagcaaagcaaaaacctggatggtcggcaccaaactgcccaattccgttctagggcgtatctggaagctgtccgacgttgatcgggatggaatgctggacgatgaggaattcgcccttgcgtcgcacctgatcgaagccaagctggagggtcacggtctcccagcaaacctgcctcggaggcttgttccaccttctaagagacgacataaggggtctgccgagtag

SEQ ID NO: 181016 - DNA, 681 bp, Artificial Sequence
  derived and/or modified sequence
atgccaagcgtgttcggtaaagagaacaagaaaaaacaactcatccttaaactgcctgtgatctttgccaaaattcagttggagcatcatatctcacctggcgattttccggactgtcaaaagatgcaggagctcctgatggcgcacgattttactaaatttcactccctgaagccgaagctgctggaagcactggacgaaatgttgacacatgacatcgccaagttgatgccactcctccggcaggaggagctggagtctaccgaggtgggtgttcagggtggggcattcgaaggaactcacatgggacccttcgtagagaggggacccgacgaagccatggaggatggagaggagggcagcgatgacgaagcagagtgggtggttactaaggataaatctaaatatgacgaaattttctacaacctggccccagctgatggcaaactgtctgggtctaaagccaagacatggatggtcgggaccaagttgccaaactccgtgttggggagaatttggaagctcagtgacgtggacagggacggaatgcttgacgacgaggagttcgcattggcatcccaccttattgaggcaaagcttgaaggccatgggctgcccgcaaacctccccagaaggttagtgcccccatctaagcggcgacacaagggttcagccgaatag

SEQ ID NO: 181017 - DNA, 1632 bp, Artificial Sequence
  derived and/or modified sequence
atgttcagctggctgaagagaggcggcgccagaggccagcagcccgaggccatcagaaccgtgaccagcgccctgaaggagctgtacagaaccaagctgctgcccctggaggagcactacagattcggcgccttccacagccccgccctggaggacgccgacttcgacggcaagcccatggtgctggtggccggccagtacagcaccggcaagaccagcttcatccagtacctgctggagcaggaggtgcccggcagcagagtgggccccgagcccaccaccgactgcttcgtggccgtgatgcacggcgacaccgagggcaccgtgcccggcaacgccctggtggtggaccccgacaagcccttcagaaagctgaaccccttcggcaacaccttcctgaacagattcatgtgcgcccagctgcccaaccaggtgctggagagcatcagcatcatcgacacccccggcatcctgagcggcgccaagcagagagtgagcagaggctacgacttccccgccgtgctgagatggttcgccgagagagtggacctgatcatcctgctgttcgacgcccacaagctggagatcagcgacgagttcagcgaggccatcggcgccctgagaggccacgaggacaagatcagagtggtgctgaacaaggccgacatggtggagacccagcagctgatgagagtgtacggcgccctgatgtgggccctgggcaaggtggtgggcacccccgaggtgctgagagtgtacatcggcagcttctggagccagcccctgctggtgcccgacaacagaagactgttcgagctggaggagcaggacctgttcagagacatccagggcctgcccagacacgccgccctgagaaagctgaacgacctggtgaagagagccagactggtgagagtgcacgcctacatcatcagctacctgaagaaggagatgcccagcgtgttcggcaaggagaacaagaagaagcagctgatcctgaagctgcccgtgatcttcgccaagatccagctggagcaccacatcagccccggcgacttccccgactgccagaagatgcaggagctgctgatggcccacgacttcaccaagttccacagcctgaagcccaagctgctggaggccctggacgagatgctgacccacgacatcgccaagctgatgcccctgctgagacaggaggagctggagagcaccgaggtgggcgtgcagggcggcgccttcgagggcacccacatgggccccttcgtggagagaggccccgacgaggccatggaggacggcgaggagggcagcgacgacgaggccgagtgggtggtgaccaaggacaagagcaagtacgacgagatcttctacaacctggcccccgccgacggcaagctgagcggcagcaaggccaagacctggatggtgggcaccaagctgcccaacagcgtgctgggcagaatctggaagctgagcgacgtggacagagacggcatgctggacgacgaggagttcgccctggccagccacctgatcgaggccaagctggagggccacggcctgcccgccaacctgcccagaagactggtgccccccagcaagagaagacacaagggcagcgccgagtag

SEQ ID NO: 181018 - DNA, 516 bp, Artificial Sequence
  derived and/or modified sequence
atgcccagcgtgttcggcaaggagaacaagaagaagcagctgatcctgaagctgcccgtgatcttcgccaagatccagctggagcaccacatcagccccggcgacttccccgactgccagaagatgcaggagctgctgatggcccacgacttcaccaagttccacagcctgaagcccaagctgctggaggccctggacgagatgctgacccacgacatcgccaagctgatgcccctgctgagacaggaggagctggagagcaccgaggtgggcgtgcagggcggcgccttcgagggcacccacatgggccccttcgtggagagaggccccgacgaggccatggaggaccagggccaggtgcagatcagaagagacctgctgcagcccggcgcctgcagaagacaggccgagagactgcagggccaggacctggacggcggcgaccaggccccccagctgagcgccggcgcccacctggaggcccagagatgcggccccagaagacacgccggctag

SEQ ID NO: 181019 - DNA, 1224 bp, Artificial Sequence
  derived and/or modified sequence
atgtgcgcccagctgcccaaccaggtgctggagagcatcagcatcatcgacacccccggcatcctgagcggcgccaagcagagagtgagcagaggctacgacttccccgccgtgctgagatggttcgccgagagagtggacctgatcatcctgctgttcgacgcccacaagctggagatcagcgacgagttcagcgaggccatcggcgccctgagaggccacgaggacaagatcagagtggtgctgaacaaggccgacatggtggagacccagcagctgatgagagtgtacggcgccctgatgtgggccctgggcaaggtggtgggcacccccgaggtgctgagagtgtacatcggcagcttctggagccagcccctgctggtgcccgacaacagaagactgttcgagctggaggagcaggacctgttcagagacatccagggcctgcccagacacgccgccctgagaaagctgaacgacctggtgaagagagccagactggtgagagtgcacgcctacatcatcagctacctgaagaaggagatgcccagcgtgttcggcaaggagaacaagaagaagcagctgatcctgaagctgcccgtgatcttcgccaagatccagctggagcaccacatcagccccggcgacttccccgactgccagaagatgcaggagctgctgatggcccacgacttcaccaagttccacagcctgaagcccaagctgctggaggccctggacgagatgctgacccacgacatcgccaagctgatgcccctgctgagacaggaggagctggagagcaccgaggtgggcgtgcagggcggcgccttcgagggcacccacatgggccccttcgtggagagaggccccgacgaggccatggaggacggcgaggagggcagcgacgacgaggccgagtgggtggtgaccaaggacaagagcaagtacgacgagatcttctacaacctggcccccgccgacggcaagctgagcggcagcaaggccaagacctggatggtgggcaccaagctgcccaacagcgtgctgggcagaatctggaagctgagcgacgtggacagagacggcatgctggacgacgaggagttcgccctggccagccacctgatcgaggccaagctggagggccacggcctgcccgccaacctgcccagaagactggtgccccccagcaagagaagacacaagggcagcgccgagtag

SEQ ID NO: 181020 - DNA, 1242 bp, Artificial Sequence
  derived and/or modified sequence
atgttcagctggctgaagagaggcggcgccagaggccagcagcccgaggccatcagaaccgtgaccagcgccctgaaggagctgtacagaaccaagctgctgcccctggaggagcactacagattcggcgccttccacagccccgccctggaggacgccgacttcgacggcaagcccatggtgctggtggccggccagtacagcaccggcaagaccagcttcatccagtacctgctggagcaggaggtgcccggcagcagagtgggccccgagcccaccaccgactgcttcgtggccgtgatgcacggcgacaccgagggcaccgtgcccggcaacgccctggtggtggaccccgacaagcccttcagaaagctgaaccccttcggcaacaccttcctgaacagattcatgtgcgcccagctgcccaaccaggtgctggagagcatcagcatcatcgacacccccggcatcctgagcggcgccaagcagagagtgagcagaggctacgacttccccgccgtgctgagatggttcgccgagagagtggacctgatcatcctgctgttcgacgcccacaagctggagatcagcgacgagttcagcgaggccatcggcgccctgagaggccacgaggacaagatcagagtggtgctgaacaaggccgacatggtggagacccagcagctgatgagagtgtacggcgccctgatgtgggccctgggcaaggtggtgggcacccccgaggtgctgagagtgtacatcggcagcttctggagccagcccctgctggtgcccgacaacagaagactgttcgagctggaggagcaggacctgttcagagacatccagggcctgcccagacacgccgccctgagaaagctgaacgacctggtgaagagagccagactggtgagagtgcacgcctacatcatcagctacctgaagaaggagatgcccagcgtgttcggcaaggagaacaagaagaagcagctgatcctgaagctgcccgtgatcttcgccaagatccagctggagcaccacatcagccccggcgacttccccgactgccagaagatgcaggagctgctgatggcccacgacttcaccaagttccacagcctgaagcccaagctgctggaggccctggacgagatgctgacccacgacatcgccaagctgatgcccctgctgagacaggaggagctggagagcagccccgtggccgagatgaccagcagatag

SEQ ID NO: 181021 - DNA, 1602 bp, Artificial Sequence
  derived and/or modified sequence
atgttcagctggctgaagagaggcggcgccagaggccagcagcccgaggccatcagaaccgtgaccagcgccctgaaggagctgtacagaaccaagctgctgcccctggaggagcactacagattcggcgccttccacagccccgccctggaggacgccgacttcgacggcaagcccatggtgctggtggccggccagtacagcaccggcaagaccagcttcatccagtacctgctggagcaggaggtgcccggcagcagagtggccgtgatgcacggcgacaccgagggcaccgtgcccggcaacgccctggtggtggaccccgacaagcccttcagaaagctgaaccccttcggcaacaccttcctgaacagattcatgtgcgcccagctgcccaaccaggtgctggagagcatcagcatcatcgacacccccggcatcctgagcggcgccaagcagagagtgagcagaggctacgacttccccgccgtgctgagatggttcgccgagagagtggacctgatcatcctgctgttcgacgcccacaagctggagatcagcgacgagttcagcgaggccatcggcgccctgagaggccacgaggacaagatcagagtggtgctgaacaaggccgacatggtggagacccagcagctgatgagagtgtacggcgccctgatgtgggccctgggcaaggtggtgggcacccccgaggtgctgagagtgtacatcggcagcttctggagccagcccctgctggtgcccgacaacagaagactgttcgagctggaggagcaggacctgttcagagacatccagggcctgcccagacacgccgccctgagaaagctgaacgacctggtgaagagagccagactggtgagagtgcacgcctacatcatcagctacctgaagaaggagatgcccagcgtgttcggcaaggagaacaagaagaagcagctgatcctgaagctgcccgtgatcttcgccaagatccagctggagcaccacatcagccccggcgacttccccgactgccagaagatgcaggagctgctgatggcccacgacttcaccaagttccacagcctgaagcccaagctgctggaggccctggacgagatgctgacccacgacatcgccaagctgatgcccctgctgagacaggaggagctggagagcaccgaggtgggcgtgcagggcggcgccttcgagggcacccacatgggccccttcgtggagagaggccccgacgaggccatggaggacggcgaggagggcagcgacgacgaggccgagtgggtggtgaccaaggacaagagcaagtacgacgagatcttctacaacctggcccccgccgacggcaagctgagcggcagcaaggccaagacctggatggtgggcaccaagctgcccaacagcgtgctgggcagaatctggaagctgagcgacgtggacagagacggcatgctggacgacgaggagttcgccctggccagccacctgatcgaggccaagctggagggccacggcctgcccgccaacctgcccagaagactggtgccccccagcaagagaagacacaagggcagcgccgagtag

SEQ ID NO: 181022 - DNA, 681 bp, Artificial Sequence
  derived and/or modified sequence
atgcccagcgtgttcggcaaggagaacaagaagaagcagctgatcctgaagctgcccgtgatcttcgccaagatccagctggagcaccacatcagccccggcgacttccccgactgccagaagatgcaggagctgctgatggcccacgacttcaccaagttccacagcctgaagcccaagctgctggaggccctggacgagatgctgacccacgacatcgccaagctgatgcccctgctgagacaggaggagctggagagcaccgaggtgggcgtgcagggcggcgccttcgagggcacccacatgggccccttcgtggagagaggccccgacgaggccatggaggacggcgaggagggcagcgacgacgaggccgagtgggtggtgaccaaggacaagagcaagtacgacgagatcttctacaacctggcccccgccgacggcaagctgagcggcagcaaggccaagacctggatggtgggcaccaagctgcccaacagcgtgctgggcagaatctggaagctgagcgacgtggacagagacggcatgctggacgacgaggagttcgccctggccagccacctgatcgaggccaagctggagggccacggcctgcccgccaacctgcccagaagactggtgccccccagcaagagaagacacaagggcagcgccgagtag

SEQ ID NO: 181023 - DNA, 3583 bp, Artificial Sequence
  derived and/or modified sequence
ttttgaggggggcgcctcgtcccgcccctccctcctgtcctccctcccgtcctccccgctccgggccccacccggctcagacggctccggacgggaccgcgagcacaggccgctccgcgggcgcttcggatcctcgcgggaccccaccctctcccagcctgcccagcccgctgcagccgccagcgcgccccgtcggcagctctccatctgcacgtctctccgtgaaccccgtgagcggtgtgcagccaccatgttcagctggctgaagcggggcggggcacggggccagcagcccgaggccatccgcacggtgacctcggccctcaaggagctgtaccgcacgaagctgctgccgctggaggagcactaccgctttggggccttccactcgccggccctggaggacgcagacttcgacggcaagcccatggtgctggtggccggccagtacagcacgggcaagaccagcttcatccagtacctgctggagcaggaggtgcccggctcccgcgtggggcctgagcccaccaccgactgctttgtggccgtcatgcacggggacactgagggcaccgtgcccggcaacgccctcgtcgtggacccggacaagcccttccgcaaactcaaccctttcggaaacaccttcctcaacaggttcatgtgtgcccagctccctaatcaggtcctggagagcatcagcatcatcgacaccccgggtatcctgtcgggtgccaagcagagagtgagccgcggctacgacttcccggccgtgctgcgctggttcgcggagcgcgtggacctcatcatcctgctctttgatgcgcacaagctggagatctcggacgagttctcagaggccatcggcgcgttgcggggccatgaggacaagatccgcgtggtgctcaacaaggccgacatggtggagacgcagcagctgatgcgcgtctacggcgcgctcatgtgggcgctgggcaaggtggtgggcacgcccgaggtgctgcgcgtctacatcggctccttctggtcccagcccctcctcgtgcccgacaaccggcgcctcttcgagctggaggagcaggacctcttccgcgacatccagggcctgccccggcacgcagccttgcgcaagctcaacgacctggtgaagagggcccggctggtgcgagttcacgcttacatcatcagctacctgaagaaggagatgccctctgtgtttgggaaggagaacaagaagaagcagctgatcctcaaactgcccgtcatctttgcgaagattcagctggaacatcacatctcccctggggactttcctgattgccagaaaatgcaggagctgctgatggcgcacgacttcaccaagtttcactcgctgaagccgaagctgctagaggcactggacgagatgctgacgcacgacatcgccaagctcatgcccctgctgcggcaggaggagctggagagcaccgaggtgggcgtgcaggggggcgcttttgagggcacccacatgggcccgtttgtggagcggggacctgacgaggccatggaggacggcgaggagggctcggacgacgaggccgagtgggtggtgaccaaggacaagtccaaatacgacgagatcttctacaacctggcgcctgccgacggcaagctgagcggctccaaggccaagacctggatggtggggaccaagctccccaactcagtgctggggcgcatctggaagctcagcgatgtggaccgcgacggcatgctggatgatgaggagttcgcgctggccagccacctcatcgaggccaagctggaaggccacgggctgcccgccaacctgccccgtcgcctggtgccaccctccaagcgacgccacaagggctccgccgagtgagccggcccccctcccatggccctgctgtggctccccagctccagtcggctgcacgcacacccctgctccggctcacacacgccctgcctgccctccctgcccagctgtaaggaccgggggtctccctcctcactaccgccagacaccccggtggaagcatttagaggggaccacgggagggacaaggcttctctgtccgcccttcacacctccagcctcacgttcacttaggcacatcacacacacactggcacacgcaggcatccatccatccgtcattcattcaaatatttattgagcacctactatgtgcccagccctgttctaggcactgggcattaccatagagaacaaaatagacaaatacatctgccctcatggaaggtgacgttcccaggagagggcacctacacagtcacgcaaacacacactaattcctggcagggcccccagcccctcccctggctgagcagccctgtggctgaaatgactagcagataaacagacccccttctgctccgcttcctcctgcccagccaggcaacaccctcaaccggctccatcacatcctcaggtctcgggaccatggggggctcagaggggagacacacctactgcttcctcagatgggcccctccgcagccccttcccttgctcggggaaagcccccaattctgcccacacccatttatttccttccttccttccttcttttctttccttccttccttcttttttgtttttgcccccaattctgcccatacccatttctttctttccttccttccttcttttttgtttttgcccccagttctgtccacaccccttccctttcctgtcctgtcctttctttcttttttgatagaatcttgctctgtcgcccaggctggagtgcagtggtgagatctcagctcactgcaacctccacctcctgggttgaagtgattctcgtgcctcagcctcctgagtagctgggactgcaggcacgcgccaccacgcccagctaatttttgtatttgagtagagacggggtttcaccatgttggccaggctggtctcgaactccgcatctcaggtgatctgctcgccttggcctcccaaagtgatgggattacaggcatgagccaccgtgcccggcttcacacccatttctttaaaaaggatcccgtagcaggcagaaaagccccttccatcctgctcctctgatactgtgcccccttggagatatttccgtcctccacccacgtgtctgtggctggaactgcccagcctgctcctggccccctggaagcctccccacagctggtaatctggacttaaggattgctgggccaccgcctctctgcctaccaccattccatatttaagtggagcccctacgtagaaaggccccggggctttattttagtctccttttcagggatgtcgtgggcgggggagggggttcttggtgctacagccctctccccacccctaaagggacgccgacgctgtttgctgccttcaccacatattagtgcttgaccctggcaggggaccccatggaaaagatggggaagagcaaaatacatggagacgacgcaccctccaggatgctcgctgggattcccacgcccaccactgtcccccaccccatggctgggaggggcctctgaacggaacagtgtccccacagagcgaataaagccaaggcttcttccc

SEQ ID NO: 181024 - DNA, 1639 bp, Artificial Sequence
  derived and/or modified sequence
agacggctccggacgggaccgcgagcacaggccgctccgcgggcgcttcggatcctcgcgggaccccaccctctcccagcctgcccagcccgctgcagccgccagcgcgccccgtcggcagctctccatctgcacgtctctccgtgaaccccgtgagcggtgtgcagccaccatgttcagctggctgaagcggggcggggcacggggccagcagcccgaggccatccgcacggtgacctcggccctcaaggagctgtaccgcacgaagctgctgccgctggaggagcactaccgctttggggccttccactcgccggccctggaggacgcagacttcgacggcaagcccatggtgctggtggccggccagtacagcacgggcaagaccagcttcatccagtacctgctggagcaggaggtgcccggctcccgcgtggggcctgagcccaccaccgactgctttgtggccgtcatgcacggggacactgagggcaccgtgcccggcaacgccctcgtcgtggacccggacaagcccttccgcaaactcaaccctttcggaaacaccttcctcaacaggttcatgtgtgcccagctccctaatcaggtcctggagagcatcagcatcatcgacaccccgggtatcctgtcgggtgccaagcagagagtgagccgcggctacgacttcccggccgtgctgcgctggttcgcggagcgcgtggacctcatcatcctgctctttgatgcgcacaagctggagatctcggacgagttctcagaggccatcggcgcgttgcggggccatgaggacaagatccgcgtggtgctcaacaaggccgacatggtggagacgcagcagctgatgcgcgtctacggcgcgctcatgtgggcgctgggcaaggtggtgggcacgcccgaggtgctgcgcgtctacatcggctccttctggtcccagcccctcctcgtgcccgacaaccggcgcctcttcgagctggaggagcaggacctcttccgcgacatccagggcctgccccggcacgcagccttgcgcaagctcaacgacctggtgaagagggcccggctggtgcgagttcacgcttacatcatcagctacctgaagaaggagatgccctctgtgtttgggaaggagaacaagaagaagcagctgatcctcaaactgcccgtcatctttgcgaagattcagctggaacatcacatctcccctggggactttcctgattgccagaaaatgcaggagctgctgatggcgcacgacttcaccaagtttcactcgctgaagccgaagctgctagaggcactggacgagatgctgacgcacgacatcgccaagctcatgcccctgctgcggcaggaggagctggagagcaccgaggtgggcgtgcaggggggcgcttttgagggcacccacatgggcccgtttgtggagcggggacctgacgaggccatggaggaccaaggacaagtccaaatacgacgagatcttctacaacctggcgcctgccgacggcaagctgagcggctccaaggccaagacctggatggtggggaccaagctccccaactcagtgctggggcgcatctggaagctcagcgatgtggaccgcgacggcatgctggatga

SEQ ID NO: 181025 - DNA, 1766 bp, Artificial Sequence
  derived and/or modified sequence
agacggctccggacgggaccgcgagcacaggccgctccgcgggcgcttcggatcctcgcgggaccccaccctctcccagcctgcccagcccgctgcagccgccagcgcgccccgtcggttcatgtgtgcccagctccctaatcaggtcctggagagcatcagcatcatcgacaccccgggtatcctgtcgggtgccaagcagagagtgagccgcggctacgacttcccggccgtgctgcgctggttcgcggagcgcgtggacctcatcatcctgctctttgatgcgcacaagctggagatctcggacgagttctcagaggccatcggcgcgttgcggggccatgaggacaagatccgcgtggtgctcaacaaggccgacatggtggagacgcagcagctgatgcgcgtctacggcgcgctcatgtgggcgctgggcaaggtggtgggcacgcccgaggtgctgcgcgtctacatcggctccttctggtcccagcccctcctcgtgcccgacaaccggcgcctcttcgagctggaggagcaggacctcttccgcgacatccagggcctgccccggcacgcagccttgcgcaagctcaacgacctggtgaagagggcccggctggtgcgagttcacgcttacatcatcagctacctgaagaaggagatgccctctgtgtttgggaaggagaacaagaagaagcagctgatcctcaaactgcccgtcatctttgcgaagattcagctggaacatcacatctcccctggggactttcctgattgccagaaaatgcaggagctgctgatggcgcacgacttcaccaagtttcactcgctgaagccgaagctgctagaggcactggacgagatgctgacgcacgacatcgccaagctcatgcccctgctgcggcaggaggagctggagagcaccgaggtgggcgtgcaggggggcgcttttgagggcacccacatgggcccgtttgtggagcggggacctgacgaggccatggaggacggcgaggagggctcggacgacgaggccgagtgggtggtgaccaaggacaagtccaaatacgacgagatcttctacaacctggcgcctgccgacggcaagctgagcggctccaaggccaagacctggatggtggggaccaagctccccaactcagtgctggggcgcatctggaagctcagcgatgtggaccgcgacggcatgctggatgatgaggagttcgcgctggccagccacctcatcgaggccaagctggaaggccacgggctgcccgccaacctgccccgtcgcctggtgccaccctccaagcgacgccacaagggctccgccgagtgagccggcccccctcccatggccctgctgtggctccccagctccagtcggctgcacgcacacccctgctccggctcacacacgccctgcctgccctccctgcccagctgtaaggaccgggggtctccctcctcactaccgccagacaccccggtggaagcatttagaggggaccacgggagggacaaggcttctctgtccgcccttcacacctccagcctcacgttcacttaggcacatcacacacacactggcacacgcaggcatccatccatccgtcattcattcaaatatttattgagcacctactatgtgcccagccctgttctaggcactgggcattaccatagagaacaaaatagacaaatacatctgccctcatggaaggtgacgttcccaggagagggcacctacacagtcacgc

SEQ ID NO: 181026 - DNA, 2614 bp, Artificial Sequence
  derived and/or modified sequence
agacggctccggacgggaccgcgagcacaggccgctccgcgggcgcttcggatcctcgcgggaccccaccctctcccagcctgcccagcccgctgcagccgccagcgcgccccgtcggcagctctccatctgcacgtctctccgtgaaccccgtgagcggtgtgcagccaccatgttcagctggctgaagcggggcggggcacggggccagcagcccgaggccatccgcacggtgacctcggccctcaaggagctgtaccgcacgaagctgctgccgctggaggagcactaccgctttggggccttccactcgccggccctggaggacgcagacttcgacggcaagcccatggtgctggtggccggccagtacagcacgggcaagaccagcttcatccagtacctgctggagcaggaggtgcccggctcccgcgtggggcctgagcccaccaccgactgctttgtggccgtcatgcacggggacactgagggcaccgtgcccggcaacgccctcgtcgtggacccggacaagcccttccgcaaactcaaccctttcggaaacaccttcctcaacaggttcatgtgtgcccagctccctaatcaggtcctggagagcatcagcatcatcgacaccccgggtatcctgtcgggtgccaagcagagagtgagccgcggctacgacttcccggccgtgctgcgctggttcgcggagcgcgtggacctcatcatcctgctctttgatgcgcacaagctggagatctcggacgagttctcagaggccatcggcgcgttgcggggccatgaggacaagatccgcgtggtgctcaacaaggccgacatggtggagacgcagcagctgatgcgcgtctacggcgcgctcatgtgggcgctgggcaaggtggtgggcacgcccgaggtgctgcgcgtctacatcggctccttctggtcccagcccctcctcgtgcccgacaaccggcgcctcttcgagctggaggagcaggacctcttccgcgacatccagggcctgccccggcacgcagccttgcgcaagctcaacgacctggtgaagagggcccggctggtgcgagttcacgcttacatcatcagctacctgaagaaggagatgccctctgtgtttgggaaggagaacaagaagaagcagctgatcctcaaactgcccgtcatctttgcgaagattcagctggaacatcacatctcccctggggactttcctgattgccagaaaatgcaggagctgctgatggcgcacgacttcaccaagtttcactcgctgaagccgaagctgctagaggcactggacgagatgctgacgcacgacatcgccaagctcatgcccctgctgcggcaggaggagctggagagcagccctgtggctgaaatgactagcagataaacagacccccttctgctccgcttcctcctgcccagccaggcaacaccctcaaccggctccatcacatcctcaggtctcgggaccatggggggctcagaggggagacacacctactgcttcctcagatgggcccctccgcagccccttcccttgctcggggaaagcccccaattctgcccacacccatttatttccttccttccttccttcttttctttccttccttccttcttttttgtttttgcccccaattctgcccatacccatttctttctttccttccttccttcttttttgtttttgcccccagttctgtccacaccccttccctttcctgtcctgtcctttctttcttttttgatagaatcttgctctgtcgcccaggctggagtgcagtggtgagatctcagctcactgcaacctccacctcctgggttgaagtgattctcgtgcctcagcctcctgagtagctgggactgcaggcacgcgccaccacgcccagctaatttttgtatttgagtagagacggggtttcaccatgttggccaggctggtctcgaactccgcatctcaggtgatctgctcgccttggcctcccaaagtgatgggattacaggcatgagccaccgtgcccggcttcacacccatttctttaaaaaggatcccgtagcaggcagaaaagccccttccatcctgctcctctgatactgtgcccccttggagatatttccgtcctccacccacgtgtctgtggctggaactgcccagcctgctcctggccccctggaagcctccccacagctggtaatctggacttaaggattgctgggccaccgcctctctgcctaccaccattccatatttaagtggagcccctacgtagaaaggccccggggctttattttagtctccttttcagggatgtcgtgggcgggggagggggttcttggtgctacagccctctccccacccctaaagggacgccgacgctgtttgctgccttcaccacatattagtgcttgaccctggcaggggaccccatggaaaagatggggaagagcaaaatacatggagacgacgcaccctccaggatgctcgctgggattcccacgcccaccactgtcccccaccccatggctgggaggggcctctgaacggaacagtgtccccacagagcgaataaagccaaggcttcttccc

SEQ ID NO: 181027 - DNA, 1919 bp, Artificial Sequence
  derived and/or modified sequence
agacggctccggacgggaccgcgagcacaggccgctccgcgggcgcttcggatcctcgcgggaccccaccctctcccagcctgcccagcccgctgcagccgccagcgcgccccgtcggcagctctccatctgcacgtctctccgtgaaccccgtgagcggtgtgcagccaccatgttcagctggctgaagcggggcggggcacggggccagcagcccgaggccatccgcacggtgacctcggccctcaaggagctgtaccgcacgaagctgctgccgctggaggagcactaccgctttggggccttccactcgccggccctggaggacgcagacttcgacggcaagcccatggtgctggtggccggccagtacagcacgggcaagaccagcttcatccagtacctgctggagcaggaggtgcccggctcccgcgtggccgtcatgcacggggacactgagggcaccgtgcccggcaacgccctcgtcgtggacccggacaagcccttccgcaaactcaaccctttcggaaacaccttcctcaacaggttcatgtgtgcccagctccctaatcaggtcctggagagcatcagcatcatcgacaccccgggtatcctgtcgggtgccaagcagagagtgagccgcggctacgacttcccggccgtgctgcgctggttcgcggagcgcgtggacctcatcatcctgctctttgatgcgcacaagctggagatctcggacgagttctcagaggccatcggcgcgttgcggggccatgaggacaagatccgcgtggtgctcaacaaggccgacatggtggagacgcagcagctgatgcgcgtctacggcgcgctcatgtgggcgctgggcaaggtggtgggcacgcccgaggtgctgcgcgtctacatcggctccttctggtcccagcccctcctcgtgcccgacaaccggcgcctcttcgagctggaggagcaggacctcttccgcgacatccagggcctgccccggcacgcagccttgcgcaagctcaacgacctggtgaagagggcccggctggtgcgagttcacgcttacatcatcagctacctgaagaaggagatgccctctgtgtttgggaaggagaacaagaagaagcagctgatcctcaaactgcccgtcatctttgcgaagattcagctggaacatcacatctcccctggggactttcctgattgccagaaaatgcaggagctgctgatggcgcacgacttcaccaagtttcactcgctgaagccgaagctgctagaggcactggacgagatgctgacgcacgacatcgccaagctcatgcccctgctgcggcaggaggagctggagagcaccgaggtgggcgtgcaggggggcgcttttgagggcacccacatgggcccgtttgtggagcggggacctgacgaggccatggaggacggcgaggagggctcggacgacgaggccgagtgggtggtgaccaaggacaagtccaaatacgacgagatcttctacaacctggcgcctgccgacggcaagctgagcggctccaaggccaagacctggatggtggggaccaagctccccaactcagtgctggggcgcatctggaagctcagcgatgtggaccgcgacggcatgctggatgatgaggagttcgcgctggccagccacctcatcgaggccaagctggaaggccacgggctgcccgccaacctgccccgtcgcctggtgccaccctccaagcgacgccacaagggctccgccgagtgagccggcccccctcccatggccctgctgtggctccccagctccagtcggctgcacgcacacccctgctccggctcacacacgccctgcctgccctccctgcccagctgtaaggaccgggggtctccctcctcactaccgccagaca

SEQ ID NO: 181028 - DNA, 1215 bp, Artificial Sequence
  derived and/or modified sequence
gaggccaagaaggttctagggggtggaggagcctgaggtgttggtttaaggagcagcgagagtgggttcacgcttacatcatcagctacctgaagaaggagatgccctctgtgtttgggaaggagaacaagaagaagcagctgatcctcaaactgcccgtcatctttgcgaagattcagctggaacatcacatctcccctggggactttcctgattgccagaaaatgcaggagctgctgatggcgcacgacttcaccaagtttcactcgctgaagccgaagctgctagaggcactggacgagatgctgacgcacgacatcgccaagctcatgcccctgctgcggcaggaggagctggagagcaccgaggtgggcgtgcaggggggcgcttttgagggcacccacatgggcccgtttgtggagcggggacctgacgaggccatggaggacggcgaggagggctcggacgacgaggccgagtgggtggtgaccaaggacaagtccaaatacgacgagatcttctacaacctggcgcctgccgacggcaagctgagcggctccaaggccaagacctggatggtggggaccaagctccccaactcagtgctggggcgcatctggaagctcagcgatgtggaccgcgacggcatgctggatgatgaggagttcgcgctggccagccacctcatcgaggccaagctggaaggccacgggctgcccgccaacctgccccgtcgcctggtgccaccctccaagcgacgccacaagggctccgccgagtgagccggcccccctcccatggccctgctgtggctccccagctccagtcggctgcacgcacacccctgctccggctcacacacgccctgcctgccctccctgcccagctgtaaggaccgggggtctccctcctcactaccgccagacaccccggtggaagcatttagaggggaccacgggagggacaaggcttctctgtccgcccttcacacctccagcctcacgttcacttaggcacatcacacacacactggcacacgcaggcatccatccatccgtcattcattcaaatatttattgagcacctactatgtgcccagccctgttctaggcactgggcattaccatagagaacaaaatagacaaatacatctgccctcatggaaggtgacgttcccaggagagggcacctacacagtcacgcaaacacacacta

SEQ ID NO: 181029 - protein, 1358 aa, Artificial Sequence
  derived and/or modified sequence
MGNQLAGIAPSQILSVESYFSDIHDFEYDKSLGSTRFFKVARAKHREGLVVVKVFAIQDPTLPLTSYKQELEELKIRLNSAQNCLPFQKASEKASEKAAMLFRQYVRDNLYDRISTRPFLNNIEKRWIAFQILTAVDQAHKSGVRHGDIKTENVMVTSWNWVLLTDFASFKPTYLPEDNPADFNYFFDTSRRRTCYIAPERFVDGGMFATELEYMRDPSTPLVDLNSNQRTRGELKRAMDIFSAGCVIAELFTEGVPLFDLSQLLAYRNGHFFPEQVLNKIEDHSIRELVTQMIHREPDKRLEAEDYLKQQRGNAFPEIFYTFLQPYMAQFAKETFLSADERILVIRKDLGNIIHNLCGHDLPEKAEGEPKENGLVILVSVITSCLQTLKYCDSKLAALELILHLAPRLSVEILLDRITPYLLHFSNDSVPRVRAEALRTLTKVLALVKEVPRNDINIYPEYILPGIAHLAQDDATIVRLAYAENIALLAETALRFLELVQLKNLNMENDPNNEEIDEVTHPNGNYDTELQALHEMVQQKVVTLLSDPENIVKQTLMENGITRLCVFFGRQKANDVLLSHMITFLNDKNDWHLRGAFFDSIVGVAAYVGWQSSSILKPLLQQGLSDAEEFVIVKALYALTCMCQLGLLQKPHVYEFASDIAPFLCHPNLWIRYGAVGFITVVARQISTADVYCKLMPYLDPYITQPIIQIERKLVLLSVLKEPVSRSIFDYALRSKDITSLFRHLHMRQKKRNGSLPDCPPPEDPAIAQLLKKLLSQGMTEEEEDKLLALKDFMMKSNKAKANIVDQSHLHDSSQKGVIDLAALGITGRQVDLVKTKQEPDDKRARKHVKQDSNVNEEWKSMFGSLDPPNMPQALPKGSDQEVIQTGKPPRSESSAGICVPLSTSSQVPEVTTVQNKKPVIPVLSSTILPSTYQIRITTCKTELQQLIQQKREQCNAERIAKQMMENAEWESKPPPPGWRPKGLLVAHLHEHKSAVNRIRVSDEHSLFATCSNDGTVKIWNSQKMEGKTTTTRSILTYSRIGGRVKTLTFCQGSHYLAIASDNGAVQLLGIEASKLPKSPKIHPLQSRILDQKEDGCVVDMHHFNSGAQSVLAYATVNGSLVGWDLRSSSNAWTLKHDLKSGLITSFAVDIHQCWLCIGTSSGTMACWDMRFQLPISSHCHPSRARIRRLSMHPLYQSWVIAAVQGNNEVSMWDMETGDRRFTLWASSAPPLSELQPSPHSVHGIYCSPADGNPILLTAGSDMKIRFWDLAYPERSYVVAGSTSSPSVSYYRKIIEGTEVVQEIQNKQKVGPSDDTPRRGPESLPVGHHDIITDVATFQTTQGFIVTASRDGIVKVWK

SEQ ID NO: 181030 - DNA, 4077 bp, Artificial Sequence
  derived and/or modified sequence
atgggcaaccagctggccggcatcgcccccagccagatcctgagcgtggagagctacttcagcgacatccacgacttcgagtacgacaagagcctgggcagcaccagattcttcaaggtggccagagccaagcacagagagggcctggtggtggtgaaggtgttcgccatccaggaccccaccctgcccctgaccagctacaagcaggagctggaggagctgaagatcagactgaacagcgcccagaactgcctgcccttccagaaggccagcgagaaggccagcgagaaggccgccatgctgttcagacagtacgtgagagacaacctgtacgacagaatcagcaccagacccttcctgaacaacatcgagaagagatggatcgccttccagatcctgaccgccgtggaccaggcccacaagagcggcgtgagacacggcgacatcaagaccgagaacgtgatggtgaccagctggaactgggtgctgctgaccgacttcgccagcttcaagcccacctacctgcccgaggacaaccccgccgacttcaactacttcttcgacaccagcagaagaagaacctgctacatcgcccccgagagattcgtggacggcggcatgttcgccaccgagctggagtacatgagagaccccagcacccccctggtggacctgaacagcaaccagagaaccagaggcgagctgaagagagccatggacatcttcagcgccggctgcgtgatcgccgagctgttcaccgagggcgtgcccctgttcgacctgagccagctgctggcctacagaaacggccacttcttccccgagcaggtgctgaacaagatcgaggaccacagcatcagagagctggtgacccagatgatccacagagagcccgacaagagactggaggccgaggactacctgaagcagcagagaggcaacgccttccccgagatcttctacaccttcctgcagccctacatggcccagttcgccaaggagaccttcctgagcgccgacgagagaatcctggtgatcagaaaggacctgggcaacatcatccacaacctgtgcggccacgacctgcccgagaaggccgagggcgagcccaaggagaacggcctggtgatcctggtgagcgtgatcaccagctgcctgcagaccctgaagtactgcgacagcaagctggccgccctggagctgatcctgcacctggcccccagactgagcgtggagatcctgctggacagaatcaccccctacctgctgcacttcagcaacgacagcgtgcccagagtgagagccgaggccctgagaaccctgaccaaggtgctggccctggtgaaggaggtgcccagaaacgacatcaacatctaccccgagtacatcctgcccggcatcgcccacctggcccaggacgacgccaccatcgtgagactggcctacgccgagaacatcgccctgctggccgagaccgccctgagattcctggagctggtgcagctgaagaacctgaacatggagaacgaccccaacaacgaggagatcgacgaggtgacccaccccaacggcaactacgacaccgagctgcaggccctgcacgagatggtgcagcagaaggtggtgaccctgctgagcgaccccgagaacatcgtgaagcagaccctgatggagaacggcatcaccagactgtgcgtgttcttcggcagacagaaggccaacgacgtgctgctgagccacatgatcaccttcctgaacgacaagaacgactggcacctgagaggcgccttcttcgacagcatcgtgggcgtggccgcctacgtgggctggcagagcagcagcatcctgaagcccctgctgcagcagggcctgagcgacgccgaggagttcgtgatcgtgaaggccctgtacgccctgacctgcatgtgccagctgggcctgctgcagaagccccacgtgtacgagttcgccagcgacatcgcccccttcctgtgccaccccaacctgtggatcagatacggcgccgtgggcttcatcaccgtggtggccagacagatcagcaccgccgacgtgtactgcaagctgatgccctacctggacccctacatcacccagcccatcatccagatcgagagaaagctggtgctgctgagcgtgctgaaggagcccgtgagcagaagcatcttcgactacgccctgagaagcaaggacatcaccagcctgttcagacacctgcacatgagacagaagaagagaaacggcagcctgcccgactgccccccccccgaggaccccgccatcgcccagctgctgaagaagctgctgagccagggcatgaccgaggaggaggaggacaagctgctggccctgaaggacttcatgatgaagagcaacaaggccaaggccaacatcgtggaccagagccacctgcacgacagcagccagaagggcgtgatcgacctggccgccctgggcatcaccggcagacaggtggacctggtgaagaccaagcaggagcccgacgacaagagagccagaaagcacgtgaagcaggacagcaacgtgaacgaggagtggaagagcatgttcggcagcctggacccccccaacatgccccaggccctgcccaagggcagcgaccaggaggtgatccagaccggcaagccccccagaagcgagagcagcgccggcatctgcgtgcccctgagcaccagcagccaggtgcccgaggtgaccaccgtgcagaacaagaagcccgtgatccccgtgctgagcagcaccatcctgcccagcacctaccagatcagaatcaccacctgcaagaccgagctgcagcagctgatccagcagaagagagagcagtgcaacgccgagagaatcgccaagcagatgatggagaacgccgagtgggagagcaagccccccccccccggctggagacccaagggcctgctggtggcccacctgcacgagcacaagagcgccgtgaacagaatcagagtgagcgacgagcacagcctgttcgccacctgcagcaacgacggcaccgtgaagatctggaacagccagaagatggagggcaagaccaccaccaccagaagcatcctgacctacagcagaatcggcggcagagtgaagaccctgaccttctgccagggcagccactacctggccatcgccagcgacaacggcgccgtgcagctgctgggcatcgaggccagcaagctgcccaagagccccaagatccaccccctgcagagcagaatcctggaccagaaggaggacggctgcgtggtggacatgcaccacttcaacagcggcgcccagagcgtgctggcctacgccaccgtgaacggcagcctggtgggctgggacctgagaagcagcagcaacgcctggaccctgaagcacgacctgaagagcggcctgatcaccagcttcgccgtggacatccaccagtgctggctgtgcatcggcaccagcagcggcaccatggcctgctgggacatgagattccagctgcccatcagcagccactgccaccccagcagagccagaatcagaagactgagcatgcaccccctgtaccagagctgggtgatcgccgccgtgcagggcaacaacgaggtgagcatgtgggacatggagaccggcgacagaagattcaccctgtgggccagcagcgccccccccctgagcgagctgcagcccagcccccacagcgtgcacggcatctactgcagccccgccgacggcaaccccatcctgctgaccgccggcagcgacatgaagatcagattctgggacctggcctaccccgagagaagctacgtggtggccggcagcaccagcagccccagcgtgagctactacagaaagatcatcgagggcaccgaggtggtgcaggagatccagaacaagcagaaggtgggccccagcgacgacacccccagaagaggccccgagagcctgcccgtgggccaccacgacatcatcaccgacgtggccaccttccagaccacccagggcttcatcgtgaccgccagcagagacggcatcgtgaaggtgtggaagtag

SEQ ID NO: 181031 - DNA, 5015 bp, Artificial Sequence
  derived and/or modified sequence
gaggtcagaccggttgctttcccgggagttcggcgtttgctggggctgcagcagctgaagtgtagtgttttcttgggactggcggtctgcacttctctcccgggttccatctccccccgcccggtggtgaggccctcgaggagggctcggacgggtgtagcgatccgcgctagaggaagacgaggcccgggaacgcatgtcccccagggcaggttagggggctggaggggtcaaatcccggggtacttgtggagactctttagcgtggcttcttctctctgctgagaccccgagagctttcccagttctcctcccaggaccaccggggttcctgaagatcgggacttttctgcgcccctccaccaacagcccatctcctgtctatgaagaaagacccttcgtagaaacaacttccccgctgctgacgcgttttcccgtcccgtccccgaagtagtctactatgacctcgttgtgagcctctgaacgattttgacactttcccgaggcctagggtattatatcctaaccttactaaagaccacagaggtgcttgccattatgggaaatcagcttgctggcattgctccctcccagatcctttctgtagagagttatttttcagatattcatgactttgaatatgataaaagcctggggagtactcggttttttaaagttgctcgagccaagcaccgagaaggcctggtcgttgtgaaggtttttgcaattcaggatcccacattgcctttaaccagctataaacaagagctggaggaactgaaaatcaggcttaattctgcacagaattgtctacctttccagaaagcatcagaaaaagcatctgagaaagcagctatgctctttaggcagtatgtgcgagacaatctctatgatcgcatcagtacccgtccattcttgaataacattgagaagcgctggattgctttccagatcctgacagctgtggaccaagcacacaaatctggagttcgtcatggggacatcaagactgagaatgtgatggtcaccagttggaattgggttcttctaactgattttgccagttttaagcccacttatcttccagaagacaacccggcagatttcaattatttctttgacacatcacggaggagaacttgctatattgctcctgaacgttttgttgatggtgggatgtttgccactgagttagaatatatgagagatccttcaactccgcttgtagacttaaatagcaatcagagaacaagaggagagttgaagagagcaatggacatcttttcagcaggttgtgtgatagctgagctttttacagaaggtgtaccattatttgatctctctcaacttttggcttatagaaatggacattttttccctgaacaagtgctaaataaaattgaagatcacagtatcagagaattggtaactcagatgattcaccgtgagccagataaacgtttagaggcagaagattacttaaaacagcagcgtggcaatgcctttcctgaaatattttacacttttcttcagccctacatggcccagtttgccaaggaaacgtttctttctgcagatgagcgtattctggttatacggaaggatttgggcaacattattcacaatctctgtggacatgatctgccagaaaaagccgaaggagagcctaaggaaaatgggctggttatcttggtatctgttataacatcctgcctacagacccttaaatactgtgattccaaactagctgctttggaactgattcttcatttggctccaagattaagtgttgaaatccttttggatcgtattactccatatcttttgcatttcagcaatgactctgttcctagggtgagggctgaagccttgaggacgttgaccaaagttcttgctctcgtcaaagaggttcctcgtaatgatatcaatatttatccggaatacattctgccaggcatagcccacttagcccaagatgatgctactatcgttagactagcctatgctgaaaacatagctctgctggcagaaacagctctgagattcctggaattagtacagttaaaaaatcttaatatggaaaatgaccccaataatgaagaaatagatgaggttacacatccaaatggaaattatgacacagagctccaagccttacatgaaatggtccagcagaaagttgttactttgctaagtgaccctgaaaatattgtaaaacaaaccttgatggaaaatggaataacacggctgtgtgtattctttggacgtcagaaagccaacgatgttttgttgtcccacatgattactttcctaaatgataagaatgattggcatctacgtggagcattttttgatagtatagttggtgttgctgcctatgttggctggcaaagctcctcaattctcaagcctctgctgcaacaaggtcttagtgatgctgaggaatttgtcattgtgaaagctctttatgcccttacttgtatgtgccagttaggactgctacaaaaaccccatgtttacgaatttgccagtgatattgcccccttcctgtgtcatcccaatttatggatacgttatggtgccgtgggatttatcacagtggtagctcgtcaaataagtacagctgatgtctactgtaaactgatgccttatcttgacccatatattacccaaccaataatacagattgaaagaaaacttgttctgctcagtgttttaaaggaaccagtaagtcgttctatatttgattatgctttgaggtctaaagatattactagcttgttcagacatcttcacatgcgtcagaagaaacgaaatggttctcttcccgactgccctccgccagaggatcctgccatagcacagcttctgaagaagttgctctcacagggaatgacagaggaagaggaagacaaacttctggcactgaaagacttcatgatgaaatctaataaagcaaaggccaatatagtggaccagagccatcttcatgatagtagtcagaaaggtgtaattgacttggcagctttaggcataactgggagacaagttgatcttgttaaaaccaaacaagaaccagatgacaaacgggccagaaaacatgtaaaacaagactcaaatgtaaatgaagaatggaaaagcatgtttgggtcactggacccaccaaacatgccacaggccctacctaaagggagtgatcaggaggtgattcagactgggaaacctcctcgttccgagtcctctgctggcatttgtgtccctttgtcaacttcttcacaggttccagaagtgacaactgtccaaaataaaaaaccagtaataccggttttaagtagtacaatcttaccatccacctatcagattcgaattacaacttgtaaaactgaacttcagcaactcatccagcaaaagcgggagcagtgcaatgctgagagaatagctaagcagatgatggaaaatgctgaatgggagagtaaaccaccaccacctggatggcgtcctaaagggctgttagttgcccatcttcatgagcataaatctgctgtgaatcgaattagagtctctgatgaacactcactttttgcaacatgttcaaatgatggcacagtgaaaatctggaacagtcaaaagatggaggggaagaccaccactaccagatctattcttacatacagccgaattggaggacgagtcaagacgctcacattctgccaaggctcccactatttagccatagcatctgataatggtgctgtccagcttcttggaattgaggcttctaagctgcccaagtctcctaaaatccatcctctacaaagcagaattctagatcagaaggaggacggttgtgttgtggatatgcatcacttcaactctggagcacagtctgttcttgcctatgccactgtgaatggctctctggttggctgggaccttaggtcttcaagcaatgcgtggactttaaagcatgatttaaagtcgggcctcatcacttcctttgctgtggacatccaccaatgctggctctgcattggtacaagcagtggtaccatggcttgttgggacatgaggttccagttgccaatttcaagtcactgtcatccttccagggctcgaatcagacgcctctcaatgcaccctctgtatcagtcctgggtgattgcagctgttcagggcaacaacgaagtgtccatgtgggacatggagactggtgacagaagatttactctctgggccagcagtgcaccaccactttctgaattacagccttctcctcatagcgtccatggtatctactgtagtcctgcagatggaaatcctatcctactaacagctggctcagatatgaaaataaggttttgggacttggcttacccagaaaggtcctatgttgttgcaggaagtactagttccccatctgtgtcctactacaggaaaataattgaaggcactgaagttgtccaggaaattcagaataagcagaaagtaggaccaagtgatgacacccctcgaaggggcccagagtccctgcccgtgggacatcatgacatcatcactgatgtcgccacattccagaccacacagggcttcatcgtaactgcttctagagatgggattgtgaaggtgtggaaataaaacctactgatttgtataaattttaatagttataaatataatactataactcgagaaaaggcatttctagagaacagattcatttgcttaattttcaaaattatgtctccatattactgtttcatgactgactgactaaatgacacccaaaatggttaagatgtacttgactagtttacttatgcatctctttgcaagaatcagccagccaacaatgtctgggatttttattgtatatgttatagaggtgagaaatgtaaaatatgaaaatgaatatgtttattttgtattgaaaaagatggttgaaaagatggttgtaagctattatagtataaacacatttttgctattaaaaatgctattcaaagcagttaaactgt

SEQ ID NO: 181032 - DNA, 4077 bp, Artificial Sequence
  derived and/or modified sequence
atgggcaaccagctcgcgggaattgcaccctcccaaattctttccgtcgaatcctatttttccgacatccacgacttcgagtacgataaaagccttggcagtactaggttctttaaagtggcccgggctaagcatcgggaggggctcgtggtggtaaaggtgtttgccatccaagatccgaccctccccctgaccagctataaacaagagctggaggagctgaagatcagactgaattctgcccaaaattgcttgcccttccaaaaggcttctgagaaagcatccgaaaaagccgcaatgctatttcgccagtacgtgcgggacaacctgtatgaccgcataagcactcgcccatttctgaacaatattgaaaaacgctggattgccttccagattctgaccgccgtcgaccaggcccacaaatccggcgtccgtcacggggacatcaagactgaaaacgtgatggtcacatcatggaactgggttctattgaccgacttcgcctcttttaaacccacttacctgcccgaggacaaccctgccgactttaactatttcttcgatacttctcgcagacggacatgctacatcgcccctgagaggtttgttgatggcggcatgtttgctaccgagttggagtatatgagagaccctagcacaccactggtggacctgaacagtaaccagaggaccaggggggagctcaaacgcgctatggacattttttccgctggatgtgtcatagcggagctgttcacagagggggtacccttgtttgatctgtcgcagctcctggcctataggaacggccatttttttcctgagcaggttctgaataagattgaggaccacagcatccgcgaactcgttacccagatgatccaccgcgaaccagacaagagactggaggctgaagattacttgaaacaacagagagggaatgcctttcccgaaattttttatacattcctccagccatacatggcccagtttgcgaaagagacattcctctccgccgacgagagaatcttggtcatcaggaaggacttggggaacatcattcacaatctctgtggccatgacctacctgaaaaggccgagggcgaaccgaaggagaacggtctggttatcctcgtcagtgtgattacgagctgcctgcagacacttaagtactgtgatagtaagctggccgccctggagcttatactgcacctggctccgcgattgtccgtggagatccttctggaccggattacgccttaccttctccatttttcgaatgattcagtgccgcgggttcgcgccgaagctctgagaactctcactaaggtattagctctcgtcaaagaagtaccacgtaatgatatcaatatttacccggaatatatactgcccggcatcgcccacttagcacaggatgatgctaccattgtacgattagcatatgccgaaaatatcgccttgctggccgagaccgccctccgcttcctcgaactggtgcagttgaagaacttgaacatggaaaacgaccccaacaatgaagaaatcgatgaggttacccaccccaacggaaattacgatacagagctccaggccctgcacgagatggtccagcagaaggtcgtaacattattatcagacccggagaatatcgtcaagcaaaccctgatggaaaacggtatcactcgtttgtgtgtctttttcgggagacagaaagccaacgacgtgttgctatctcatatgattactttccttaacgataagaacgactggcatctcagaggagcattcttcgatagtattgtgggggtcgccgcgtacgtgggctggcagtcttccagtatcttgaagcccctcctgcagcaaggcttatccgacgccgaggagttcgtgatagtgaaagcgttgtacgctctgacgtgcatgtgtcagctggggctcttgcaaaagccacatgtgtacgaattcgctagcgacatcgccccctttctttgccacccaaatctctggataagatatggggctgtaggattcattacagtcgttgcccgacaaatcagcacagctgatgtttactgcaagctgatgccttacctcgatccctacataacacagcctatcatccagatcgaacgaaaactggtcttactgagcgttcttaaagagcctgtctcccggtcaatcttcgactacgcactgagatcaaaggatataaccagtctgtttcgtcacctccatatgaggcagaagaagcgtaacggctcgcttccagattgccccccaccagaagatcctgccattgcccagctcctcaaaaaacttctgtcccagggaatgacggaagaggaggaagacaagttgcttgcactcaaagattttatgatgaagagcaataaagcgaaggcgaatatcgtcgaccagtcccacctgcacgattcttcccagaagggggtgatcgacctcgctgctttgggcatcaccggccgccaggtggacctggtcaagactaagcaagaacccgacgacaagcgcgcccgcaagcatgtgaagcaagacagcaacgtcaatgaagaatggaagagtatgttcggttccttggaccccccaaacatgccccaggccctcccaaaagggagcgatcaggaagtgattcaaaccgggaaaccaccccgaagtgaaagttctgctggaatttgcgtgccacttagcacctcatcacaagtgcccgaagtgacgaccgttcagaataaaaagccagttatcccagttcttagttcaacgatccttccctcgacataccagattcgcatcacgacctgcaagactgagctacagcagctcattcagcagaaaagggagcagtgtaatgctgaacgaatagcgaaacagatgatggagaacgctgagtgggagagtaagccacccccgcccggctggagacctaaaggcctcttagtagctcacctgcatgagcacaagtccgcagtcaaccgcattcgcgtctctgacgagcatagcttatttgccacatgctcgaacgatggtacagttaagatttggaattctcagaagatggagggcaagactacaactaccagaagcatcctcacctactctcgcatcggaggccgagtgaaaactctaaccttctgtcagggcagtcattacctggccattgcatccgacaacggagctgtgcagttactgggcatcgaggcatctaagctgcccaagtcccctaagatccaccccctccagagccggattctcgaccaaaaggaggacggctgtgttgtggacatgcatcatttcaacagcggcgcccagtccgtgctggcatacgcaactgtcaatggctcactggtgggatgggatttgaggtcttcatccaatgcctggaccctgaagcacgacctgaaatcagggctgataacaagctttgcagtggatatccaccagtgttggctctgcatcggaacaagctctgggacaatggcctgctgggacatgagattccagctacctatatcctcccactgccatccaagcagggcgcgaattcggcgattgagtatgcacccactctaccagtcctgggttatcgccgccgtgcagggtaataacgaggtgtccatgtgggatatggaaactggtgatagacggtttacactgtgggcctcttcggcgccccccctgtccgagcttcagccctcaccccatagtgtgcatgggatctactgtagccccgcggatggcaatcccattcttctcacagctggatctgatatgaagatccgcttctgggacctcgcctaccctgaacggtcatacgtcgtcgctggaagcacctcgtccccgagcgtgtcatattacagaaagattattgaaggtacagaggtggtgcaggagatccagaataagcagaaggtcgggcccagcgacgatactccgaggaggggtcccgagtccctacccgtcggtcaccacgatatcatcacagatgtggccacatttcaaaccacgcagggctttatagtaactgcatctcgcgatgggattgtgaaggtatggaaatag

SEQ ID NO: 181033 - DNA, 4077 bp, Artificial Sequence
  derived and/or modified sequence
atgggcaaccagctggccggcatcgcccccagccagatcctgtctgtggagagctacttcagtgacatccatgactttgaatatgacaagagcctgggcagcacccgcttcttcaaggtggcccgggccaagcaccgggagggcctggtggtggtgaaggtgtttgccatccaggaccccaccctgcccctgaccagctacaagcaggagctggaggagctgaagatccggctgaacagcgcccagaactgcctgcccttccagaaggccagcgagaaggccagcgagaaggccgccatgctgttccggcagtatgtgcgggacaacctgtatgaccgcatcagcacccggcccttcctgaacaacatcgagaagcgctggatcgccttccagatcctgacagctgtggaccaggcccacaagagcggcgtgcgccacggggacatcaagacagaaaatgtgatggtgacctcctggaactgggtgctgctgacagactttgccagcttcaagcccacctacctgcctgaggacaacccagctgacttcaactacttctttgacaccagcagaagaaggacctgctacatcgcccctgagagatttgtggatggcggcatgtttgccacagagctggagtacatgagggaccccagcacccccctggtggacctgaacagcaaccagaggaccagaggagagctgaagagggccatggacatcttctctgctggctgtgtgattgctgagctgttcacagaaggagtgcccctgtttgacctgagccagctgctggcctacagaaatggccacttcttccctgagcaggtgctgaacaagattgaggaccacagcatccgggagctggtgacccagatgatccaccgggagccagacaagaggctggaggccgaggactacctgaagcagcagagaggaaatgccttccctgagatcttctacaccttcctgcagccctacatggcccagtttgccaaggagaccttcctgtctgcagatgagcgcatcctggtgatcaggaaggacctgggcaacatcatccacaacctgtgtggccatgacctgcctgagaaggccgagggggagcccaaggaaaatggcctggtgatcctggtgtctgtcatcaccagctgcctgcagaccctgaagtactgtgacagcaagctggccgccctggagctgatcctgcacctggccccccggctgtctgtggagatcctgctggaccgcatcaccccctacctgctgcacttcagcaatgattctgtgccccgggtgcgggcagaggccctgcggaccctgaccaaggtgctggccctggtgaaggaggtgcccagaaatgacatcaacatctacccagagtacatcctgcccggcatcgcccacctggcccaggatgatgccaccatcgtgcggctggcctatgcagagaacatcgccctgctggccgagacagccctgcgcttcctggagctggtgcagctgaagaacctgaacatggagaatgaccccaacaatgaggagattgatgaggtgacccaccccaatggaaattatgacacagagctgcaggccctgcacgagatggtgcagcagaaggtggtgaccctgctgagtgaccctgaaaatattgtgaagcagaccctgatggagaatggcatcacccggctgtgtgtgttcttcggccggcagaaggccaatgatgtgctgctgagccacatgatcaccttcctgaatgacaagaatgactggcacctgcggggggccttctttgacagcatcgtgggcgtggccgcctacgtgggctggcagagcagcagcatcctgaagcccctgctgcagcagggcctgagtgatgctgaggagtttgtgattgtgaaggccctgtatgccctgacctgcatgtgccagctgggcctgctgcagaagccccacgtgtatgaatttgccagtgacatcgcccccttcctgtgccaccccaacctgtggatccgctatggagctgtgggcttcatcaccgtggtggcccggcagatcagcacagcagatgtgtactgcaagctgatgccctacctggacccctacatcacccagcccatcatccagatcgagaggaagctggtgctgctgtctgtgctgaaggagcctgtgagccgcagcatctttgattatgccctgcggagcaaggacatcaccagcctcttccgccacctgcacatgaggcagaagaagagaaatggcagcctgcctgactgccccccaccagaagatcctgccatcgcccagctgctgaagaagctgctgagccagggcatgacagaggaggaggaggacaagctgctggccctgaaggacttcatgatgaagagcaacaaggccaaggccaacatcgtggaccagagccacctgcatgacagcagccagaagggcgtgattgacctggccgccctgggcatcaccggccggcaggtggacctggtgaagaccaagcaggagccagatgacaagagggccaggaagcacgtgaagcaggacagcaatgtgaatgaggagtggaagtccatgtttggcagcctggacccccccaacatgccccaggccctgcccaagggcagtgaccaggaggtgatccagacaggcaagcccccaagaagtgagagcagcgctggcatctgtgtgcccctgagcaccagcagccaggtgcctgaggtgaccaccgtgcagaacaagaagcctgtgattcctgtgctgagcagcaccatcctgcccagcacctaccagatccgcatcaccacctgcaagacagagctgcagcagctgatccagcagaagcgggagcagtgcaatgctgagcgcatcgccaagcagatgatggagaatgctgagtgggagagcaagcccccacctcctggctggaggcccaagggcctgctggtggcccacctgcacgagcacaagtctgctgtgaaccgcatccgggtgtctgatgagcacagcctgtttgccacctgcagcaatgatggcaccgtgaagatctggaacagccagaagatggagggcaagaccaccaccaccaggagcatcctgacctacagcagaattggaggccgggtgaagaccctgaccttctgccagggcagccactacctggccatcgccagtgacaatggagctgtgcagctgctgggcatcgaggccagcaagctgcccaagagccccaagatccaccccctgcagagccgcatcctggaccagaaggaggatggctgtgtggtggacatgcaccacttcaacagcggggcccagagcgtgctggcctatgccaccgtgaatggcagcctggtgggctgggacctgcggagcagcagcaatgcctggaccctgaagcatgacctgaagagcggcctcatcaccagctttgctgtggacatccaccagtgctggctgtgcatcggcaccagcagcggcaccatggcctgctgggacatgaggttccagctgcccatcagcagccactgccaccccagccgggcccgcatccggcggctgtccatgcaccccctgtaccagagctgggtgattgctgctgtgcagggcaacaatgaggtgtccatgtgggacatggagactggagaccggcgcttcaccctgtgggccagcagcgccccacccctgtctgagctgcagcccagcccccacagcgtgcacggcatctactgcagccctgcagatggcaaccccatcctgctgacagctggcagtgacatgaagatccgcttctgggacctggcctacccagagaggagctatgtggtggccggcagcaccagcagccccagcgtgtcctactacaggaagatcatcgagggcacagaggtggtgcaggagatccagaacaagcagaaggtgggccccagtgatgacaccccccggcggggccctgagagcctgcctgtgggccaccacgacatcatcacagatgtggccaccttccagaccacccagggcttcatcgtgacagccagcagagatggcatcgtgaaggtgtggaagtag

SEQ ID NO: 181034 - DNA, 4077 bp, Artificial Sequence
  derived and/or modified sequence
atgggcaaccagctggccggcatcgcccccagccagatcctgagcgtagagagctacttcagcgacattcacgactttgagtacgacaaatcccttggttctaccagattcttcaaagtcgcccgcgcaaaacatcgagagggcttggtcgtggtgaaagtctttgctatacaggaccctacattgcccttgacctcgtataaacaagaactcgaagagctgaagattcgcctcaactccgcccagaactgtctcccttttcagaaggcaagtgagaaagcttctgagaaagcggcaatgttgttccggcaatacgttcgagacaacctctatgataggatcagcactagacctttcttgaataatattgagaaacgttggatcgcgttccagatattgacagccgttgatcaagcacataaatctggcgtgcggcacggcgatatcaaaactgagaatgtgatggttacttcctggaactgggtgctcctcaccgacttcgccagtttcaagccgacttatctccccgaagacaaccctgctgactttaattactttttcgacacttcaagaaggcgcacatgttacattgccccagagaggttcgttgatggaggcatgttcgcgactgagctggaatatatgagggatccaagcacgccattggtggacctcaactctaatcaacggacaaggggggagcttaagagagccatggacatcttctctgcgggctgcgtgattgctgaattgttcaccgagggggtaccactctttgatctctcacagctgctggcgtatcgtaacggccatttcttccctgagcaggtcctcaacaagattgaggaccacagcataagagagctcgtaacacagatgattcatagagagcccgacaagagactggaggcagaagactacctgaaacagcaaagaggaaacgcctttcctgaaattttttacacttttctacaaccctatatggcacaatttgcaaaggaaacattcctgtctgctgatgagagaatcctcgtgatcaggaaagacctgggaaacattattcacaatctgtgtggacatgatcttcccgaaaaagcggaaggagagcccaaagagaacggcctagtgatactggtgagcgtcataactagctgcctccaaaccctgaaatattgcgattcaaagctggcagctctcgagctcatcctccatctagccccgagactatccgtggaaattcttctggatagaatcaccccttatctgcttcacttcagcaacgatagtgttcctcgtgtgcgggcagaggctttgcgaaccctgacaaaggtgctggccctggtgaaagaagtgccacgcaatgatatcaacatctatcctgagtacatccttcccggcatcgcacacctggcacaggacgacgctaccatagtacgcttagcctatgcggagaacattgctttgctagctgagaccgccctgcgctttctggaattggtccagcttaaaaatttaaacatggagaatgatcccaacaatgaggaaattgacgaagtgacccatccaaacggtaactacgataccgagctgcaagctctccatgaaatggtacagcagaaggtcgtgactctgctgagcgatccagaaaacatcgttaagcagacattgatggagaacggaatcacgagattgtgcgtgttttttggcagacaaaaggccaatgatgtgttattgagtcatatgatcaccttcctgaatgacaagaatgattggcacctgcggggagctttttttgatagtattgtgggggtcgcagcttacgtcggctggcagtcgagctcaatcctgaaaccattactgcagcaaggcctctccgatgctgaggaattcgtgatcgtgaaggccctttacgctttaacttgcatgtgtcagctcggactgcttcagaagccacacgtttatgaattcgcctcggacatcgccccgttcctttgccaccccaatttgtggattcgatatggagctgttggcttcattactgtagtcgcccggcaaattagcaccgcggatgtctattgtaagctcatgccttatcttgatccttatatcacgcagccaattatccagattgagcgaaagcttgtgctcttatcagtattaaaggagccggttagtcgctcaatattcgattatgcccttcggagcaaagatattacctctttgttccgacacctccacatgcgccagaaaaaacgaaatggaagtctgcctgattgcccccctccagaggaccccgctatcgctcagttgctcaaaaaactgttgagtcaaggcatgaccgaagaggaagaggataagctcctagccctgaaagacttcatgatgaagagcaacaaggccaaggccaatattgtggaccagtcccatttacatgactcgtcgcagaagggcgtcatcgacctggcagcacttgggattactgggcggcaggtggatctggtcaagaccaaacaagaacccgacgataaaagagcgaggaagcacgtaaaacaggattcgaacgtcaatgaggagtggaagagcatgttcgggagtctggatccacctaacatgccccaagcactgcctaaaggatcagaccaggaagtcattcagaccggaaagcccccaaggtctgaaagctccgcggggatttgtgtgcccctgagcacttctagtcaggtgcctgaggtgaccactgtacaaaataaaaaaccggtcattccagtcctgtcttctacaatcctcccttccacgtatcagatccgaattactacgtgcaagacagaactgcagcagctgatacaacagaagcgcgagcagtgtaacgcagaaagaatcgccaaacaaatgatggaaaatgccgaatgggagtctaaaccccccccaccaggttggaggccaaagggactccttgtggctcacttgcacgaacacaagtccgctgtgaatagaattcgagttagcgatgagcactcactgttcgcaacctgctccaatgacgggacagtgaaaatctggaactctcagaagatggagggcaagaccaccactactcgatcaatcctgacatacagtcgcatcgggggtagggtcaagacactgacattttgccaaggctcacactaccttgcaattgcctcagataacggagcagtgcaactcctcggcattgaagcaagtaagctaccaaagagcccaaagatccatccactgcaatcacgcatactagaccagaaggaagacggatgtgttgtcgatatgcaccatttcaattccggcgcccagagcgtgcttgcttatgcaactgtgaacggcagcctggttggatgggatttgcgctcctcctccaatgcctggacactcaagcatgatctcaaatccggtctgatcactagttttgccgtggacatccaccagtgttggctctgtatcggtacttcaagcggtacaatggcctgttgggacatgaggtttcagctgcccatatcatcacattgccacccgagcagagcccgaatacggaggctgagcatgcatcccctgtatcagagttgggttatagcagctgttcaggggaacaacgaggtgagcatgtgggacatggaaaccggtgaccgtcgttttaccctctgggcctcctcggccccccccttgtcggagctgcagccctcccctcactctgtgcatggtatttattgttcgccagctgatggcaatccaattctcctgacagcaggtagtgatatgaagattcgattttgggatcttgcatatcccgagcggagctatgtcgtcgccggctcgaccagctcgccatctgtgagttactaccggaagatcatcgaggggacggaggtggtgcaggaaattcaaaacaagcaaaaggtgggccccagcgacgacacaccgaggagggggcctgagtctctgcctgtggggcatcacgatatcattaccgacgtcgctacttttcaaactacccagggatttattgtgaccgcatctagagatgggatcgttaaagtctggaaatag

SEQ ID NO: 181035 - DNA, 4077 bp, Artificial Sequence
  derived and/or modified sequence
atgggcaaccagctggcaggtatcgctcctagccaaatcctcagcgttgagtcatatttcagtgatattcacgatttcgaatatgacaagtccctgggcagcacacggtttttcaaggtagccagagctaaacatcgagagggactggtcgtggtgaaggtttttgccatccaagatccaaccctgcctctgacatcttataagcaagagcttgaggaattaaagattagactaaattccgcccaaaattgcctgccatttcaaaaagcttctgaaaaggccagcgaaaaggcagcaatgctgttcagacagtacgtgcgggacaacctgtacgaccgcataagcacgcggccattcctgaacaatatagagaagcgatggatagctttccaaattctgaccgctgtcgaccaagctcataaatctggagtgcgccacggcgacattaaaaccgagaatgtgatggtgactagttggaattgggtcctgctgactgactttgcctcattcaagcccacttacctgccggaggataaccctgctgattttaactatttctttgacacctcgcgcagaagaacctgttacatagcccctgagcgctttgtggatggaggaatgtttgccacagagctcgagtacatgcgggatccttcaacaccgctagtcgatctgaatagcaaccagcgcactcgcggtgaactgaaacgggctatggatatcttctctgctggctgcgtgatcgccgaactgttcacggaaggggtgccactgttcgatttatcacaattacttgcttatagaaatgggcacttcttccccgagcaggtgttaaacaaaatcgaggaccacagcattagagagttggttacgcaaatgatccaccgggaacccgacaagagactcgaggccgaggattatcttaaacaacagagaggaaatgcctttccagagatattctacacctttctgcagccttacatggcccaattcgctaaggagaccttcttatctgccgacgaacgaatattggtgattcgcaaggacctggggaacatcattcacaacctatgtgggcacgacctgcctgaaaaagccgaaggtgaaccaaaagagaacggtttggttatattagtgtccgtgattacttcctgcctgcagacattgaagtactgcgattcaaagctcgccgcactggagctcattttacacctggccccacgcctaagtgtggagattctgttagacaggataacaccttacctgcttcatttcagtaatgactcagttccacgcgtgcgggctgaggcactgagaaccctgaccaaggtgttggccttagtgaaagaagttcctcgcaacgacattaacatatatcctgagtatatcttgcctgggattgcacatctggctcaggatgatgcaacaattgtccgcctggcctatgcagagaatatcgctctgctggccgagacggcgctcaggttcctggagcttgtccagctcaagaacctgaatatggaaaatgacccaaacaacgaggagatagatgaagtaacacatcccaatggaaattatgacaccgagcttcaggcccttcacgagatggtccagcagaaggtagtgacactcttatcggaccctgaaaacattgttaaacagacactgatggaaaacggaatcacacgtttatgcgtttttttcggtagacagaaagccaatgacgtccttctgtctcacatgatcaccttcctaaatgataaaaatgattggcatctcaggggagcatttttcgactcaatagtcggcgtcgctgcatacgttggatggcagagcagctctatactgaagccgttgttgcagcaaggtttatccgacgccgaagagttcgtgatcgtaaaggccttatacgccttgacatgtatgtgccagttgggtttgctgcagaagccacatgtgtatgagttcgctagtgatatcgcgccattcttgtgtcacccaaacctatggatcagatacggcgcagtgggcttcattacagtggttgccagacagattagtacagcggacgtctattgcaagctaatgccctatctcgatccctacattactcagcctataatccagattgagcgcaagcttgtgctactgtctgttctgaaggaaccagtgtcccgcagtatctttgactacgccttgcgatcaaaagacattacgtccctgttccggcatctgcacatgagacagaagaagcgtaacggcagtctccccgactgcccccctcccgaggatccagccatcgcgcagctgctgaagaaattgctctctcaaggaatgaccgaagaggaggaggacaaattactcgccttgaaagatttcatgatgaagtctaacaaagctaaggcgaatatcgtcgatcagtcccacctccatgactcttctcagaaaggggttattgacctcgccgcactgggcatcaccgggcgtcaagtggatctggtgaaaaccaagcaggagcccgacgataagcgggctcgtaaacacgtgaagcaggactctaacgtaaatgaggaatggaagtccatgttcgggagcttagaccctccaaatatgccccaggcccttcctaaaggatccgaccaggaggttatacaaaccgggaagcctcccagaagcgaaagttccgcaggcatttgcgtgcctctaagcactagctcacaagtgccagaggtgactaccgtgcaaaacaagaaacctgtaatcccagtgctgtcgagcaccattctgccctccacctatcagatcaggatcaccacctgtaaaacagagctacagcagctgatacagcagaaacgggagcagtgtaacgccgagcgcatcgcaaaacaaatgatggaaaatgcggaatgggagtctaagccaccaccccctggttggcggcctaaggggcttctcgtcgcccacctccatgaacataaatcggcagttaatcggatccgagtgagtgacgagcattctctgtttgcaacctgctcaaatgatggcactgtcaagatctggaactctcagaaaatggaggggaaaaccacgactacccgcagcattttgacctacagtagaataggcggaagggtaaaaacccttacattctgtcagggctcacattacttggcgattgctagtgataacggtgccgtgcagttgcttgggattgaagcctctaagcttcccaaatctcccaaaattcacccattacaatctagaattctggatcagaaagaggacgggtgtgtggtcgatatgcaccattttaactctggtgcccagagtgttctcgcctacgctacggttaacggctccttagtaggatgggacttacgatctagctccaatgcatggacactgaagcacgatctcaagtctgggctcattacctcattcgccgtggatatacaccagtgctggctgtgcatcggtacctcatccggcaccatggcctgttgggacatgcgatttcagttgccaatttcgtcccactgccatccatcccgcgctaggatacgtaggctgtccatgcatcccctgtaccagagctgggtgatcgctgcagtgcaagggaataacgaagtctctatgtgggatatggaaaccggagaccgaagattcaccctatgggcctccagcgcacctcccttatctgaattgcaaccaagtcctcattcagtgcacggaatctattgctcacctgccgacggtaatcctatactgctcactgctggctctgatatgaagatccggttctgggatctggcatacccggaacgctcctacgtcgtcgccggaagcacgtcttccccgtcagttagttactatcgaaaaatcatagagggtacggaggtcgtgcaggagatccagaacaaacagaaagtgggacccagcgacgatacgcctaggcggggacctgaaagcctgcctgtgggccatcacgatattatcaccgatgtggctacattccagaccacacaggggttcatcgtgacggcctctcgagacggtatagtaaaggtctggaagtag

SEQ ID NO: 181036 - protein, 124 aa, Artificial Sequence
  derived and/or modified sequence
MSYIPGQPVTAVVQRVEIHKLRQGENLILGFSIGGGIDQDPSQNPFSEDKTDKGIYVTRVSEGGPAEIAGLQIGDKIMQVNGWDMTMVTHDQARKRLTKRSEEVVRLLVTRQSLQKAVQQSMLS

SEQ ID NO: 181037 - DNA, 1377 bp, Artificial Sequence
  derived and/or modified sequence
agtggcgctccggccagtgattggctggaggtttgttaactattcatgagggggcgggccgagcggggcggcctttgttaagcagcgagggcgcgaccgcgggtactctgctgccggcttctcggagcggcgctgggcgaccagagcagggtcgagatgtcctacatcccgggccagccggtcaccgccgtggtgcaaagagttgaaattcacaagctgcgtcaaggtgagaacttaatcctgggtttcagcattggaggtggaatcgaccaggatccttcccagaatcccttctctgaagacaagacggacaagggtatttatgtcacacgggtgtctgaaggaggccctgctgaaatcgctgggctgcagattggagacaagatcatgcaggtgaacggctgggacatgaccatggtcacacacgaccaggcccgcaagcggctcaccaagcgctcggaggaggtggtgcgtctgctggtgacgcggcagtcgctgcagaaggccgtgcagcagtccatgctgtcctagcagccaccaccatctgcgactcctgcctgccgcctctctgtacagtaacgccacttccacactctgtccccatctggcttctgctgaccgctgggccccagctcagaagggctatagctggtcccagaggcctggcctggccttccttcccttctcccatccctggcctggggcctctgggaccggctttctctcctggacaccgaggattggaaataagggcctggagctgagtagtagccagtctgctgtgaccacaggctcaggtccgaccctgctgcttggccacagcagtggctgggcaagtgggaaccactatctcttgggagcccccaaaagctgggaaatgctggaggaaccaggcctttcccgcttttgcctggctgcagggttcggctctgcccctgccccccagccctcgtgtgtccacaccgcagtgcctctgcccctcgggggactggacacacatcctgccagaggcgctacgaagctttgcccagatgaagccaggtgggctccgcgttcactcccactctcccgaggggtgctggcctccccagggtttgccttcttacggatttagacgaggttcgaggctcacctatcagggcagctctcaggattgtcattttcctctttgcctgtgggtttaacttttgtatttttttaatcacaagtttgatacaaaatgtttttatcgtactctttggagatgcccattctacttttgaatttagcttttactaattcgcatctggaagctcagcaagtgcacaagccttactttggttaccgtggaaaccactgccgcccctccccgatgtggtgcgctcaataaaaatgctg

SEQ ID NO: 181038 - DNA, 375 bp, Artificial Sequence
  derived and/or modified sequence
atgtcgtatattcccgggcaacctgtgactgccgtggtgcagcgggtcgagatacacaagctacgccagggcgaaaacttgattctcggctttagcattgggggggggatcgaccaggacccctctcagaatcctttcagtgaagataagactgacaaagggatctacgtcacgcgggtttctgaggggggcccagctgagattgctggactccaaatcggggataaaatcatgcaggtcaatgggtgggatatgacaatggtgactcacgaccaagctcgaaagaggttgacaaagcgctccgaggaagtggtgaggctcctggtgactagacagagcctgcagaaagccgttcagcagtcaatgttgtcctag

SEQ ID NO: 181039 - DNA, 375 bp, Artificial Sequence
  derived and/or modified sequence
atgagctacatccctggccagcctgtgacagctgtggtgcagagggtggagatccacaagctgcggcagggagaaaatctcatcctgggcttcagcattggaggcggcatcgaccaggaccccagccagaaccccttcagcgaggacaagacagacaagggcatctacgtgaccagggtgtctgagggcggccctgctgagattgctggcctgcagattggagacaagatcatgcaggtgaatggctgggacatgaccatggtgacccatgaccaggccaggaagaggctgaccaagaggtctgaggaggtggtgcggctgctggtgacccggcagagcctgcagaaggctgtgcagcagagcatgctgtcctag

SEQ ID NO: 181040 - DNA, 375 bp, Artificial Sequence
  derived and/or modified sequence
atgagctacatccccggccagcccgtgaccgccgtggtgcagcgggtggaaattcataaacttaggcagggagaaaacttaatcctcggattcagtatcggaggtggcatcgaccaggacccctcccagaacccattttccgaggataagaccgacaaaggcatctatgtaacgcgggtctctgaaggaggcccagccgagattgcagggctgcagattggcgacaaaataatgcaagtaaatggatgggatatgacaatggtgactcacgaccaggcacgcaagaggctcactaaacgaagcgaggaggtggtaaggttactggtcactagacagtcgttacaaaaagcggtgcagcaatccatgctgagctag

SEQ ID NO: 181041 - DNA, 375 bp, Artificial Sequence
  derived and/or modified sequence
atgagctatataccaggccagccagtcacagccgtcgtgcagcgagtcgagattcataaactgcggcagggcgaaaacctgatcttaggtttttctattggagggggtattgatcaagaccctagccaaaaccctttcagtgaagataaaactgataaaggtatctatgtgacccgggtttcagagggcggtccagcagaaatcgctggactgcaaatcggagacaaaatcatgcaggtgaatggatgggacatgacaatggtcacacacgatcaggctaggaagcgcctgactaaaaggagtgaggaggtggttcgtctgttggtcacacggcaaagtctgcagaaggccgttcaacagagcatgctgtcctag

SEQ ID NO: 181042 - DNA, 375 bp, Artificial Sequence
  derived and/or modified sequence
atgagctacatccccggccagcccgtgaccgccgtggtgcagagagtggagatccacaagctgagacagggcgagaacctgatcctgggcttcagcatcggcggcggcatcgaccaggaccccagccagaaccccttcagcgaggacaagaccgacaagggcatctacgtgaccagagtgagcgagggcggccccgccgagatcgccggcctgcagatcggcgacaagatcatgcaggtgaacggctgggacatgaccatggtgacccacgaccaggccagaaagagactgaccaagagaagcgaggaggtggtgagactgctggtgaccagacagagcctgcagaaggccgtgcagcagagcatgctgagctag

SEQ ID NO: 181043 - protein, 1050 aa, Artificial Sequence
  derived and/or modified sequence
MLCWGYWSLGQPGISTNLQGIVAEPQVCGFISDRSVKEVACGGNHSVFLLEDGEVYTCGLNTKGQLGHEREGNKPEQIGALADQHIIHVACGESHSLALSDRGQLFSWGAGSDGQLGLMTTEDSVAVPRLIQKLNQQTILQVSCGNWHCLALAADGQFFTWGKNSHGQLGLGKEFPSQASPQRVRSLEGIPLAQVAAGGAHSFALSLSGAVFGWGMNNAGQLGLSDEKDRESPCHVKLLRTQKVVYISCGEEHTAVLTKSGGVFTFGAGSCGQLGHDSMNDEVNPRRVLELMGSEVTQIACGRQHTLAFVPSSGLIYAFGCGARGQLGTGHTCNVKCPSPVKGYWAAHSGQLSARADRFKYHIVKQIFSGGDQTFVLCSKYENYSPAVDFRTMNQAHYTSLINDETIAVWRQKLSEHNNANTINGVVQILSSAACWNGSFLEKKIDEHFKTSPKIPGIDLNSTRVLFEKLMNSQHSMILEQILNSFESCLIPQLSSSPPDVEAMRIYLILPEFPLLQDSKYYITLTIPLAMAILRLDTNPSKVLDNWWSQVCPKYFMKLVNLYKGAVLYLLRGRKTFLIPVLFNNYITAALKLLEKLYKVNLKVKHVEYDTFYIPEISNLVDIQEDYLMWFLHQAGMKARPSIIQDTVTLCSYPFIFDAQAKTKMLQTDAELQMQVAVNGANLQNVFMLLTLEPLLARSPFLVLHVRRNNLVGDALRELSIHSDIDLKKPLKVIFDGEEAVDAGGVTKEFFLLLLKELLNPIYGMFTYYQDSNLLWFSDTCFVEHNWFHLIGITCGLAIYNSTVVDLHFPLALYKKLLNVKPGLEDLKELSPTEGRSLQELLDYPGEDVEETFCLNFTICRESYGVIEQKKLIPGGDNVTVCKDNRQEFVDAYVNYVFQISVHEWYTAFSSGFLKVCGGKVLELFQPSELRAMMVGNSNYNWEELEETAIYKGDYSATHPTVKLFWETFHEFPLEKKKKFLLFLTGSDRIPIYGMASLQIVIQSTASGEEYLPVAHTCYNLLDLPKYSSKEILSARLTQALDNYEGFSLA

SEQ ID NO: 181044 - protein, 128 aa, Artificial Sequence
  derived and/or modified sequence
MLCWGYWSLGQPGISTNLQGIVAEPQVCGFISDRSVKEVACGGNHSVFLLEDGEVYTCGLNTKGQLGHEREGNKPEQIGALADQHIIHVACGESHSLALSDRGQLFSWGAGSDGQLGLMTTEDSVAVP

SEQ ID NO: 181045 - protein, 131 aa, Artificial Sequence
  derived and/or modified sequence
MLCWGYWSLGQPGISTNLQGIVAEPQVCGFISDRSVKEVACGGNHSVFLLEDGEVYTCGLNTKGQLGHEREGNKPEQIGALADQHIIHVACGESHSLALSDRGQLFSWGAGSDGQLGLMTTEDSVAVPRLI

SEQ ID NO: 181046 - protein, 78 aa, Artificial Sequence
  derived and/or modified sequence
MLCWGYWSLGQPGISTNLQGIVAEPQVCGFISDRSVKEVACGGNHSVFLLEDGEVYTCGLNTKGQLGHEREGNKPEQI

SEQ ID NO: 181047 - DNA, 1485 bp, Artificial Sequence
  derived and/or modified sequence
atgaagctggtgaacctgtacaagggcgccgtgctgtacctgctgagaggcagaaagaccttcctgatccccgtgctgttcaacaactacatcaccgccgccctgaagctgctggagaagctgtacaaggtgaacctgaaggtgaagcacgtggagtacgacaccttctacatccccgagatcagcaacctggtggacatccaggaggactacctgatgtggttcctgcaccaggccggcatgaaggccagacccagcatcatccaggacaccgtgaccctgtgcagctaccccttcatcttcgacgcccaggccaagaccaagatgctgcagaccgacgccgagctgcagatgcaggtggccgtgaacggcgccaacctgcagaacgtgttcatgctgctgaccctggagcccctgctggccagaagccccttcctggtgctgcacgtgagaagaaacaacctggtgggcgacgccctgagagagctgagcatccacagcgacatcgacctgaagaagcccctgaaggtgatcttcgacggcgaggaggccgtggacgccggcggcgtgaccaaggagttcttcctgctgctgctgaaggagctgctgaaccccatctacggcatgttcacctactaccaggacagcaacctgctgtggttcagcgacacctgcttcgtggagcacaactggttccacctgatcggcatcacctgcggcctggccatctacaacagcaccgtggtggacctgcacttccccctggccctgtacaagaagctgctgaacgtgaagcccggcctggaggacctgaaggagctgagccccaccgagggcagaagcctgcaggagctgctggactaccccggcgaggacgtggaggagaccttctgcctgaacttcaccatctgcagagagagctacggcgtgatcgagcagaagaagctgatccccggcggcgacaacgtgaccgtgtgcaaggacaacagacaggagttcgtggacgcctacgtgaactacgtgttccagatcagcgtgcacgagtggtacaccgccttcagcagcggcttcctgaaggtgtgcggcggcaaggtgctggagctgttccagcccagcgagctgagagccatgatggtgggcaacagcaactacaactgggaggagctggaggagaccgccatctacaagggcgactacagcgccacccaccccaccgtgaagctgttctgggagaccttccacgagttccccctggagaagaagaagaagttcctgctgttcctgaccggcagcgacagaatccccatctacggcatggccagcctgcagatcgtgatccagagcaccgccagcggcgaggagtacctgcccgtggcccacacctgctacaacctgctggacctgcccaagtacagcagcaaggagatcctgagcgccagactgacccaggccctggacaactacgagggcttcagcctggcctag

SEQ ID NO: 181048 - DNA, 3153 bp, Artificial Sequence
  derived and/or modified sequence
atgctgtgttgggggtactggtctctagggcagccagggatttccactaatttacaagggatcgtggctgagccacaggtatgcggattcatcagtgacagatctgtgaaagaagtcgcatgcgggggaaaccattctgtgttcctactggaggacggcgaagtttacacttgtggattgaacacgaaaggacagttgggccacgagcgggaaggaaacaagcctgaacagatcggcgccctagcagaccagcacataattcacgttgcatgcggtgagtcacatagcttggctctttctgatagaggtcagctcttttcttggggggcaggctctgacggccaacttgggctgatgaccaccgaagattcagtcgcagttcctcggctcatccagaaactcaaccaacagactatcctccaggtgtcttgcggcaactggcactgtctggccctagcagctgatggtcagttcttcacctggggtaaaaattcccatgggcagctgggccttgggaaggagttccccagtcaagcctccccccaaagagtccgttcgttggagggcatcccgctcgcccaagtcgcggctggcggagcacactctttcgctctaagcctatccggagcagtctttgggtgggggatgaacaacgctggtcagttagggctgtcagacgagaaggaccgcgagtctccatgccatgtgaagctcctgcgaacacagaaagtggtgtatattagctgtggcgaggagcataccgccgttcttacgaagtcaggaggggtgtttacgttcggcgcggggagctgtggccagcttggacacgactcgatgaacgatgaggtgaatcctaggcgcgtgcttgaactaatgggctccgaagttacacagattgcctgtggcaggcagcacacgctggcgtttgtgccatcttcagggctcatctatgcattcgggtgcggggcccgtggccaattggggactgggcacacatgcaatgtaaaatgcccctctcctgtaaaaggttattgggccgctcactctggccagctgtccgcaagagccgaccggtttaagtaccatattgtgaagcagatcttttccggaggggatcagacattcgtgctgtgttctaaatatgaaaactattcgccggccgttgattttcggacaatgaatcaagcgcactacacttccctaatcaatgacgaaacaatcgccgtgtggcgccaaaagctgagcgaacataataatgcaaatactatcaatggggtggtacagatcctgtccagtgcagcctgctggaacggaagttttctcgagaagaagatcgacgaacacttcaagacgtccccaaaaattccgggcatcgacctcaactccacacgggtccttttcgaaaaacttatgaattcccagcactctatgatcctagagcagatactgaactcattcgagagttgcttaatccctcagctatcttccagtccaccggacgtggaagccatgaggatctaccttattctgcctgagttccccctgctgcaggactccaagtattacattacactaacaatccccctcgctatggctatcctgaggctcgacactaatccctcgaaggtgttggataattggtggtcccaagtgtgccccaagtatttcatgaaactagttaatctgtacaaaggcgctgtgctgtacctcctaagaggccgcaagaccttcctcatccctgtgttgtttaacaactacattactgcggcccttaagctgttagagaagttatataaggtaaacctcaaagttaaacacgtagaatacgacacattttacattcccgagatctccaacctcgtggatatccaggaggattacctgatgtggtttctgcaccaggcgggaatgaaagccaggccttccattatccaagacacagttacattgtgttcctaccccttcattttcgatgctcaggcaaagaccaagatgctgcagacagacgcagagctgcagatgcaggtggccgtcaacggggcgaacctgcagaacgtattcatgctgctgaccctggaaccattgcttgctcgaagccccttcttggtgctccatgtacggagaaacaatctagtgggagatgcgctgagagaactgagcatccattcagacatcgatctgaagaagcccctgaaggttatattcgatggtgaagaggccgtggatgcgggtggggttaccaaagagtttttcctgctgctgctgaaggagctcctcaaccccatttatggtatgttcacctattaccaggatagtaacctgctctggttttctgatacatgcttcgtggaacataactggtttcatcttatcggaatcacctgcggtctggcaatctacaacagcacagtggtggacctgcatttcccgctggccttatataagaagctgctgaacgtgaagcctggcctggaagacctgaaagaacttagtcccaccgaagggcgcagcctccaagagttactggactacccaggagaggacgtcgaagaaacattctgtttaaactttacgatctgcagggagagctatggcgttatagaacaaaagaaattgattcccggcggagataatgtaaccgtctgcaaggacaataggcaggagttcgtcgatgcctatgtaaattatgtttttcagatatcggtacacgagtggtacacagctttcagctcaggatttctgaaggtttgcgggggaaaagtgctggagctgtttcagcctagtgaactacgtgctatgatggtaggaaactcaaactataattgggaggagctggaggagaccgcaatatataaaggggattactctgccactcatcctactgtcaaacttttctgggagacattccatgagttccccctggagaagaagaagaaattcttactgttcctgaccggctcggatagaataccaatctatggtatggcttccctgcagatcgtcatccagagtactgccagcggggaggaatatcttcccgtggcccatacctgctacaatctgctcgatcttcctaagtactccagcaaggagatcctgtctgcccgcctcacccaggcccttgacaactatgaagggttttcactcgcctag

SEQ ID NO: 181049 - DNA, 3153 bp, Artificial Sequence
  derived and/or modified sequence
atgctctgttggggctattggtccctcggtcagccaggtatctcgacgaatttgcaaggcattgtggccgaaccccaggtctgcgggtttatatcggatagatccgtaaaggaggttgcttgcggtggaaaccactcagtgttcctgctcgaagacggcgaggtttacacctgcggactgaataccaagggacagctggggcacgagcgcgagggcaacaaaccagagcaaatcggagcgctagctgatcaacacattatacacgtagcgtgcggagagagtcattcacttgcgttgtcggaccgcggccaactcttcagttggggcgcaggaagtgacgggcagctgggcctcatgactaccgaggacagcgtggctgtgcccaggctgatccagaaactgaaccaacagaccatcctccaggtgtcatgcggcaactggcactgcttggcgctggctgctgacgggcaatttttcacctgggggaaaaacagtcacggccagctaggactgggcaaggaattcccatcccaggcctccccccaaagggtgcgaagcctggaggggatccccctcgcccaggttgctgccgggggcgcgcacagttttgccttgtccctaagtggcgctgtctttggctggggcatgaacaacgccgggcagctggggttgagcgacgagaaagacagggaatcaccctgtcatgttaaactactccgcacccaaaaggtcgtgtatatctcgtgcggcgaggaacacaccgctgttctgactaaatccgggggcgtgtttacgttcggggccggcagttgcgggcagctgggacacgatagtatgaatgacgaggtcaacccaaggagagtgctggagctcatggggtctgaagtgacacagatagcgtgtggccgccaacacaccctcgccttcgtgccgagtagtggtcttatctacgcctttggctgtggagcgcggggccagctagggacagggcacacctgtaacgtgaaatgtccttcccctgtgaaaggctattgggcagcacattcggggcaactcagcgcacgcgccgaccgatttaaataccatattgtgaagcaaattttttctggcggcgatcagaccttcgtgctttgctcaaagtatgagaactactctccagctgtcgactttcggaccatgaaccaggcccattacacctcactgatcaatgacgagaccatagccgtatggagacaaaaactcagcgagcacaacaacgcaaataccatcaatggtgtggtgcagatattgtcatccgctgcatgttggaacggtagttttttggaaaaaaaaatcgacgagcacttcaagacttcgccgaagattccaggaattgatctgaatagcactagggtcctcttcgagaagctgatgaattctcagcatagcatgatcctcgagcaaatcctaaactcattcgagagttgtttaataccccagttgtccagtagccctccggatgtcgaagctatgaggatctacctcatattgccagagttccccctgcttcaggacagtaagtactatataactctcaccattcctctggcaatggctatcctgcgcctcgacacaaaccccagcaaggtgctagacaattggtggtcccaggtgtgcccaaagtattttatgaaactggtaaatctctataaaggtgcagtcctctacctcctgaggggtcggaaaaccttcctgatcccagtgctgtttaataactatatcacagctgctctgaagttgttggaaaaactgtacaaggttaatctcaaggtcaagcatgtagaatacgatactttctacatccccgagatctccaacctcgtcgatatccaggaagactatctcatgtggttcctacatcaggcggggatgaaggccaggccgtccattatccaggacacagtgaccctctgtagttaccctttcatttttgatgcccaggcgaaaaccaagatgctgcaaacagatgccgagctgcagatgcaggtagctgttaatggggctaacctgcagaacgtgttcatgctcctgaccctggagcccctgctggcacggagcccttttctggttctgcacgttcggcgcaataatctagtcggagatgcccttagagagctttccattcatagcgatatcgaccttaagaaacctcttaaagtgatcttcgacggggaggaggctgtggacgccggaggggtgacgaaggaatttttcctcttattgcttaaagaactcctgaaccccatctacggaatgttcacttattaccaagactccaatttgctttggttttcggacacatgcttcgtggaacataactggtttcacctcatcggtattacctgtggcctggccatttacaacagcaccgtggtggatctgcacttcccgctggccctgtataagaaactgctaaacgtgaaacccggcctggaggacctgaaggagctcagccccaccgaaggcaggtctcttcaggagctcttagactacccgggagaagacgtggaagagacattctgtctcaacttcaccatctgcagagaatcctatggagttatcgagcaaaaaaaactgattcctgggggggacaatgttactgtttgcaaagacaaccgccaggagtttgtagatgcctacgtcaattacgtatttcagatcagtgtgcacgagtggtatacggctttcagcagcggatttctgaaagtgtgcggaggcaaagtgctcgagctgtttcagcccagcgaactcagagccatgatggtgggcaattcaaactataattgggaagaactcgaagagacagcaatttacaaaggtgactattctgcgacacacccaacggtgaagctcttctgggagacatttcatgagtttcctctggagaagaaaaaaaagttcctgctgtttctaacagggagcgaccggattccaatttacggaatggcatcccttcaaatagtgattcagagtacagcgtctggtgaagaataccttcctgtggcccacacatgctacaatctactggatctgccaaaatatagtagtaaggaaatcctctccgctcgcctgacccaagccctggacaattacgagggttttagcctggcatag

SEQ ID NO: 181050 - DNA, 1485 bp, Artificial Sequence
  derived and/or modified sequence
atgaaactggttaatctgtataagggagccgtcctgtacctcctccggggcagaaaaacatttcttattcctgtgctgtttaataattatattactgctgcattgaaacttcttgagaagttgtataaggtcaacctaaaggttaaacatgtggagtacgacactttctatattccagaaatttctaatctggtggatattcaggaagactacctcatgtggtttttgcaccaggccggaatgaaagcgcggccaagtataattcaggatactgtcacactgtgctcttatcctttcatctttgacgcacaggctaagacgaagatgctccagactgacgccgaacttcaaatgcaggtcgcagtgaacggggccaacctccagaatgtattcatgctcctcaccctggaaccgctgctagccaggagcccatttctggtgcttcatgttaggcgaaacaacctggttggcgatgctttgcgggagctctctatccacagcgacatagacttaaaaaaacccctgaaggttatcttcgacggcgaagaggccgtggacgcgggcggggtcacgaaggagttttttctgttgctgcttaaagaactcttaaatcccatttacgggatgtttacctactaccaggactctaacctactgtggtttagcgacacctgttttgtggagcataactggttccacctcattggcatcacttgtgggctggctatctacaatagtacagtggtagatctccacttcccactggcactctacaaaaagctgcttaacgtcaaacccgggctggaagaccttaaggagctgtctcccaccgagggccgctcactccaggagttgttggattatcccggcgaagatgtggaggaaaccttttgcctgaatttcactatttgtagagagtcttatggagtgattgagcagaaaaagttgattccagggggagacaatgttactgtttgcaaagacaacaggcaggaatttgtcgacgcctacgtaaactatgtgttccaaatctcagttcacgaatggtataccgcattctcatcgggatttctgaaggtgtgtggaggcaaagtgttggaactatttcaaccatctgaactaagggccatgatggtaggcaacagtaattacaactgggaagaactggaggagacggccatttataaaggggactatagcgccacacatccgactgtaaagctcttctgggaaacttttcatgaatttcccttggagaagaaaaagaaattcctcctttttcttaccgggagtgaccgcatcccaatttacggcatggcctccctgcaaatcgtcatccaaagtactgcgagtggggaagagtaccttccagtggcccatacttgctacaatctcttagatcttcccaaatactccagcaaggagattttaagtgcgaggcttactcaagcactcgataactacgagggtttctcactggcttag

SEQ ID NO: 181051 - DNA, 3153 bp, Artificial Sequence
  derived and/or modified sequence
atgctgtgctggggctactggagcctgggccagcccggcatcagcaccaacctgcagggcatcgtggccgagccccaggtgtgtggcttcatcagtgacagatctgtgaaggaggtggcctgtggcggcaaccacagcgtcttcctgctggaggatggagaggtgtacacctgtggcctgaacaccaagggccagctgggccacgagcgggagggcaacaagccagagcagatcggggccctggccgaccagcacatcatccacgtggcctgtggggagagccacagcctggccctgagtgaccggggccagctgttctcctggggcgccggcagtgatggccagctgggcctgatgaccacagaggacagcgtggccgtgcccaggctcatccagaagctgaaccagcagaccatcctgcaggtgtcctgtggcaactggcactgcctggccctggccgcagatggccagttcttcacctggggcaagaacagccacggccagctgggcctgggcaaggagttccccagccaggccagcccccagagggtgcgcagcctggagggcatccccctggcccaggtggccgccggcggggcccacagctttgccctgagcctgagcggggctgtgtttggctggggcatgaacaatgccggccagctgggcctgagtgatgagaaggaccgggagagcccctgccacgtgaagctgctgcggacccagaaggtggtgtacatcagctgtggggaggagcacacagctgtgctgaccaagagcggcggcgtcttcaccttcggggccggcagctgtggccagctgggccatgacagcatgaatgatgaggtgaacccccggcgggtgctggagctgatgggcagcgaggtgacccagatcgcctgtggccggcagcacaccctggcctttgtgcccagcagcggcctcatctatgccttcggctgtggggcccggggccagctgggcaccggccacacctgcaatgtgaagtgccccagccctgtgaagggctactgggccgcccacagcggccagctgagcgcccgggctgaccgcttcaagtaccacatcgtgaagcagatcttctctggaggagaccagacctttgtgctgtgcagcaaatatgagaactacagccctgctgtggacttccgcaccatgaaccaggcccactacaccagcctcatcaatgatgagaccatcgctgtgtggaggcagaagctgtctgagcacaacaatgccaacaccatcaacggggtggtgcagatcctgagcagcgctgcctgctggaatggcagcttcctggagaagaagattgatgagcacttcaagaccagccccaagatccctggcatcgacctgaacagcaccagggtgctgtttgagaagctgatgaacagccagcacagcatgatcctggagcagatcctgaacagctttgagagctgcctgatcccccagctgagcagcagccccccagatgtggaggccatgaggatctacctgatcctgcctgagttccccctgctgcaggacagcaagtactacatcaccctgaccatccccctggccatggccatcctgcggctggacaccaaccccagcaaggtgctggacaactggtggagccaggtgtgccccaagtacttcatgaagctggtgaacctgtacaagggagctgtgctgtacctgctgcggggcaggaagaccttcctgatccctgtgctcttcaacaactacatcacagctgccctgaagctgctggagaagctgtacaaggtgaacctgaaggtgaagcacgtggagtatgacaccttctacatccctgagatcagcaacctggtggacatccaggaggactacctgatgtggttcctgcaccaggccggcatgaaggcccggcccagcatcatccaggacacagtgaccctgtgcagctaccccttcatctttgatgcccaggccaagaccaagatgctgcagacagatgctgagctgcagatgcaggtggccgtgaatggagccaacctgcagaatgtgttcatgctgctgaccctggagcccctgctggcccggagccccttcctggtgctgcacgtgagaagaaacaacctggtgggagatgccctgcgggagctgagcatccacagcgacatcgacctgaagaagcccctgaaggtgatctttgatggagaggaggccgtggatgctggaggagtgaccaaggagttcttcctgctgctgctgaaggagctgctgaaccccatctacggcatgttcacctactaccaggacagcaacctgctgtggttcagtgacacctgctttgtggagcacaactggttccacctgattggcatcacctgtggcctggccatctacaacagcacagtggtggacctgcacttccccctggccctgtacaagaagctgctgaatgtgaagccaggcctggaggacctgaaggagctgagccccacagagggccgcagcctgcaggagctgctggactacccaggagaagatgtggaggagaccttctgcctgaacttcaccatctgccgggagagctatggagtgattgagcagaagaagctgatccctggaggagacaacgtgacagtgtgcaaggacaaccggcaggagtttgtggatgcctacgtgaactacgtgttccagatctctgtgcatgagtggtacacagccttcagcagcggcttcctgaaggtgtgtggcggcaaggtgctggagctgttccagcccagcgagctgcgggccatgatggtgggcaacagcaactacaactgggaggagctggaggagacagccatctacaagggggactacagcgccacccaccccaccgtgaagctgttctgggagaccttccacgagttccccctggagaagaagaagaagttcctgctcttcctgactggaagtgaccgcatccccatctacggcatggccagcctgcagatcgtcatccagagcacagccagcggggaggagtacctgcctgtggcccacacctgctacaacctgctggacctgcccaagtacagcagcaaggagatcctgagcgcccggctgacccaggccctggacaactatgagggcttcagcctggcctag

SEQ ID NO: 181052 - DNA, 1485 bp, Artificial Sequence
  derived and/or modified sequence
atgaagctggtgaacctgtacaagggagctgtgctgtacctgctgcggggcaggaagaccttcctgatccctgtgctcttcaacaactacatcacagctgccctgaagctgctggagaagctgtacaaggtgaacctgaaggtgaagcacgtggagtatgacaccttctacatccctgagatcagcaacctggtggacatccaggaggactacctgatgtggttcctgcaccaggccggcatgaaggcccggcccagcatcatccaggacacagtgaccctgtgcagctaccccttcatctttgatgcccaggccaagaccaagatgctgcagacagatgctgagctgcagatgcaggtggccgtgaatggagccaacctgcagaatgtgttcatgctgctgaccctggagcccctgctggcccggagccccttcctggtgctgcacgtgagaagaaacaacctggtgggagatgccctgcgggagctgagcatccacagcgacatcgacctgaagaagcccctgaaggtgatctttgatggagaggaggccgtggatgctggaggagtgaccaaggagttcttcctgctgctgctgaaggagctgctgaaccccatctacggcatgttcacctactaccaggacagcaacctgctgtggttcagtgacacctgctttgtggagcacaactggttccacctgattggcatcacctgtggcctggccatctacaacagcacagtggtggacctgcacttccccctggccctgtacaagaagctgctgaatgtgaagccaggcctggaggacctgaaggagctgagccccacagagggccgcagcctgcaggagctgctggactacccaggagaagatgtggaggagaccttctgcctgaacttcaccatctgccgggagagctatggagtgattgagcagaagaagctgatccctggaggagacaacgtgacagtgtgcaaggacaaccggcaggagtttgtggatgcctacgtgaactacgtgttccagatctctgtgcatgagtggtacacagccttcagcagcggcttcctgaaggtgtgtggcggcaaggtgctggagctgttccagcccagcgagctgcgggccatgatggtgggcaacagcaactacaactgggaggagctggaggagacagccatctacaagggggactacagcgccacccaccccaccgtgaagctgttctgggagaccttccacgagttccccctggagaagaagaagaagttcctgctcttcctgactggaagtgaccgcatccccatctacggcatggccagcctgcagatcgtcatccagagcacagccagcggggaggagtacctgcctgtggcccacacctgctacaacctgctggacctgcccaagtacagcagcaaggagatcctgagcgcccggctgacccaggccctggacaactatgagggcttcagcctggcctag

SEQ ID NO: 181053 - DNA, 3153 bp, Artificial Sequence
  derived and/or modified sequence
atgctgtgctggggctactggagcctgggccagcccggcatcagcacaaacctgcagggcatagtagctgagccgcaggtttgtggtttcatcagtgatcgatctgtcaaagaggtggcctgtgggggcaaccattctgtgtttctgttggaggacggggaagtctatacatgcggcctgaatacgaaggggcaacttggacatgagcgggaggggaacaagcccgagcagatcggagccctagccgatcagcatatcatacacgtcgcatgtggggagtcccatagcctggccctgagtgacagggggcagttgttttcttggggagccggaagcgacggacagctgggtctgatgaccaccgaagatagtgtggccgttcctcggctgattcagaagctgaatcagcaaaccattctgcaggtgtcatgtggcaactggcattgccttgcgttggccgctgatggccagttctttacttggggtaagaattcccacggccagctgggactgggcaaagagttccctagtcaggcatctccccagcgggtgcgcagcctggagggcatccccctggcacaggttgccgccggaggagctcattctttcgctctgtctttgtcaggggctgtcttcgggtggggcatgaacaatgccggacaactgggcctcagcgacgagaaggaccgggagagcccttgtcacgtgaaactgcttagaacccagaaggtggtctatatttcctgcggggaggagcatacggctgtcctgaccaagtccggcggggtatttactttcggggccggctcgtgtggccagctaggccacgacagcatgaatgacgaagttaatcccaggagggtactcgaattgatgggaagcgaggtaacacagatcgcctgtggccggcagcacacactggcctttgtgccaagttctggactcatctatgcctttggttgtggtgcaaggggacagctaggtactggtcacacctgtaacgtgaagtgtccgagccctgtcaaaggttattgggccgcccacagcggacagctgagcgcaagagccgataggttcaaatatcatatcgtgaagcagatcttctcaggaggcgaccagacctttgtgctgtgtagcaaatacgagaactactcacctgctgtcgacttcaggactatgaatcaggcacactacacctctttaatcaatgatgagactattgcagtttggcggcagaaactcagcgagcacaataatgctaacaccatcaatggcgttgtgcaaattctctcatctgcagcttgttggaacggatcattccttgaaaagaaaatcgacgaacattttaagacttctccaaaaatccctggaatcgacctgaactctacccgagtgctctttgagaagctcatgaattctcagcactctatgattctggagcagatcctcaatagctttgaaagttgcctgatccctcagttatctagcagccctcctgatgtagaagcaatgaggatctatctgatattgcccgagttccctctcctgcaggactccaagtattacataacgctgaccattcctctcgcgatggctatcctgaggttggatacaaatccttctaaggtgttggataactggtggagccaggtctgtcctaagtacttcatgaaacttgtgaatctgtataagggggcagtcctgtacctgctccgaggcagaaagaccttcctcatccctgtactgtttaataactatattaccgctgcccttaaactcctggagaagctctacaaggtcaatctgaaggtcaaacacgtcgaatacgacacattctacatccccgagatatcgaacttggtagacatccaagaagactaccttatgtggtttctgcaccaggcggggatgaaggctaggccgtcaatcatccaggatacagtcacactttgctcttacccctttattttcgacgctcaggccaagaccaagatgttgcaaaccgacgctgaactccagatgcaggtcgcagtaaatggagcgaatctgcaaaatgttttcatgctgttaacactggaaccattactggccagatctcctttcctggttttgcacgtccgcaggaataatttggttggagacgccttacgcgaactctcaatccactcggatattgacttgaagaagccattgaaggtgattttcgacggggaagaagccgtcgatgccggaggtgtaaccaaagagttcttcttactgctgctgaaggagctcctgaatccgatttatggaatgttcacctactaccaggatagcaatctgctgtggttctcagacacttgttttgtagaacataattggtttcatctgatcgggatcacctgtggcctggccatctacaattccacagttgtggacctgcacttcccactagcactctacaagaaacttctcaacgtgaagcctggattggaggatctgaaggagctctcacccacggagggacgatccctacaggaactgctggactaccccggtgaggacgtagaggagaccttctgcctaaatttcaccatctgccgcgagtcctatggtgtcatagaacaaaagaagttaatacctggcggcgacaacgtaactgtatgcaaagataatcgccaggagttcgttgatgcctacgtcaactacgtgtttcagatatcagtccacgagtggtacaccgcattctcaagcggcttccttaaagtctgcggcggaaaggttctagaactttttcagccttccgaactgcgggccatgatggtcggcaactccaactacaactgggaggaattggaggagactgcgatatacaagggcgactacagcgccacacaccctacggtaaaattattttgggagacgttccacgaattccctctggaaaagaagaagaagtttttgttatttctgacaggcagcgatcgaatacccatatacgggatggcgagcctacagatcgtgatccagagcaccgcttctggtgaagagtatctgcccgtggcccacacatgttacaatttactggacctacctaaatattcatctaaagaaattctgtctgccagactgacgcaagcccttgataattatgaggggttttccctggcctag

SEQ ID NO: 181054 - DNA, 3153 bp, Artificial Sequence
  derived and/or modified sequence
atgctgtgctggggctactggagcctgggccagcccggcatcagcacaaaccttcaaggaatcgtcgccgaaccacaggtgtgtggtttcatttcggatcggagcgtgaaggaggtggcctgtggcggcaatcattctgtctttctcctggaagatggtgaggtgtacacatgtgggttgaacacgaagggacaactgggacatgaaagggagggcaacaaacccgaacagatcggagcgctggccgaccagcacatcattcatgtagcttgcggggagagtcactcacttgccttaagtgatagaggccaattattttcctggggggctggcagcgatggacagttgggcttgatgactacggaagatagcgtcgcggtgccgcgactgattcagaagctcaatcaacagactatcctccaggtttcatgtgggaattggcactgcctggcactggcagctgatggacagtttttcacctggggtaaaaactcccacggacagctgggccttggcaaggagttccctagccaggcatctcctcaaagggtgaggtccctggagggaatccccttggcccaggtggccgccggcggggcccattcttttgccctcagcttaagcggtgctgtgtttggttggggcatgaataacgctggacagcttggcctgtcagacgaaaaggatcgtgagtctccgtgccacgtgaagttgctcagaacacagaaggtcgtgtacattagttgcggcgaagaacataccgctgtccttacgaagagtggcggagtcttcacttttggcgctggatcgtgtgggcaactggggcacgacagcatgaacgatgaggtgaaccctcgccgcgttctggaactgatgggtagtgaggtgacacagatcgcttgcgggcggcagcacacactggcattcgtgccatcaagcggcctcatctatgcattcggttgcggagcgagaggacaattaggaactgggcacacatgtaacgtaaagtgtccgagccccgttaagggatattgggctgcacactccgggcagctgtctgctcgggcggatcgtttcaaatatcacattgtgaagcagatcttttcagggggtgaccaaacattcgtattgtgttccaagtatgagaactactctccagccgttgatttccgcacaatgaatcaagcccactatactagtctgatcaacgatgagacaattgcagtgtggcgccagaaactttcagagcataataatgcaaataccattaacggcgtcgtgcagatcctgtctagtgccgcatgttggaatggatcttttctggaaaaaaaaatcgacgaacattttaaaacaagtcccaagatcccagggatcgatcttaactccacccgagtcctgtttgaaaagctgatgaatagccaacattcaatgattctagaacagatactcaactcctttgagagctgcctgatccctcagctctcatcgagcccccctgacgtcgaggctatgagaatatatctgatcctgcccgaatttccccttcttcaggactctaaatattacattaccctcactatcccattggccatggcaatcctgcgtctagacacaaaccccagtaaggtcctcgacaactggtggtcacaagtgtgcccgaagtatttcatgaaactcgtgaatctctataaaggtgcggtgctttacttactgagaggcagaaagacattcctgattcccgtcctttttaacaattatataaccgccgccctcaagcttctggagaagttatacaaggtcaatctgaaagtcaagcacgtagagtatgatactttctatattcccgagattagcaatctggtcgatatacaggaggactacctaatgtggttcctccatcaagctgggatgaaagccagaccctccattatacaagatactgttacgttatgcagttatccttttatctttgacgcacaggcaaagacaaaaatgctgcagacagatgctgagctccagatgcaggtcgccgtaaacggagctaacttacagaacgtgtttatgctgctaaccttagaaccactcctcgcccggtctccctttctagtgctccacgttcggaggaacaatctagtaggagatgcactgagggaattgagcatacacagtgacatcgatcttaagaaacccttaaaagtcatctttgatggcgaagaagccgtggatgccggcggtgttactaaagagttcttccttctgctgcttaaggagctgctgaatcccatttatggaatgtttacatactaccaggatagtaatctgctctggttttccgacacatgcttcgtggagcacaactggtttcatttgattggtattacctgtggcttggcgatctataattcaactgtggtggacctgcactttcccctggctctgtacaagaagttactgaacgtcaaaccaggattagaagatctgaaggaactgtcgccgaccgagggtcgctctctccaagaacttctcgattatccgggggaggatgtggaggaaacattctgtttaaacttcaccatctgcagagaatcttatggggttatcgaacagaaaaagctgatccccggtggggacaatgtaaccgtatgcaaagacaaccgccaggaatttgtcgatgcctatgtgaactatgtgttccaaatatctgtgcatgaatggtatacagccttcagcagtggcttcctgaaggtgtgcggtgggaaggtgctcgaactattccagccaagcgagttgcgggctatgatggtgggaaacagcaactacaactgggaggagctcgaagagaccgcaatctataagggggattatagcgctactcaccccaccgtgaaattgttctgggaaactttccacgaatttcctttagaaaaaaaaaaaaaatttcttttgttcctgacaggtagtgatcggataccgatctacggtatggcctctctgcagatcgtgatacagtctaccgcttccggagaggaatacctccccgtggctcacacctgttataatctcctcgaccttccaaaatattcttccaaggagatactgtccgcccgcttgacccaagcactggataattacgagggatttagcctggcttag

SEQ ID NO: 181055 - DNA, 4974 bp, Artificial Sequence
  derived and/or modified sequence
ggtgcgaagccattcacccagcgcattccgccgcccgcaggcttgcggggaaacttccttattattgtgacgccgaaaacggagaaaccccgggtccggcgagaggggctgtgacagtcggagtcccaagctgcggttcggctgctgccgagaactgcaaggtgtggaatatttctggcttctagtccaatgccaagtgtgtgacctgtggctacatgattccctgaaagataagaacaatgttatgttggggatattggtctctgggccaacctggtatcagcaccaacctgcagggaattgtggctgagccccaggtgtgtgggttcatatctgacagaagtgtcaaggaagtggcctgtgggggaaaccactctgtgttcctgctggaagatggggaagtttacacatgtggtttgaacaccaaggggcaactgggccatgagagggaaggaaacaagccagaacaaattggagctctggcagatcagcatatcattcatgtggcatgtggcgagtcccacagtctggccctcagtgaccgaggccagctgttttcttggggtgcagggagtgatggtcagctaggactcatgactactgaggattctgtggcagtgcccaggttaatacaaaagctgaaccagcaaacaatattacaagtttcctgtggcaactggcattgcttggctcttgcggctgatggccagttcttcacctggggaaagaacagccatgggcagcttggcttagggaaggagttcccctcccaagccagcccacagagggtgaggtccctggaggggatcccactggctcaggtggctgccggaggggctcacagctttgccctgtctctctcaggagctgtttttggctgggggatgaataatgccgggcagctagggctcagtgatgaaaaagatcgagaatctccatgccatgtaaaactcttacgcacgcaaaaagttgtctatattagttgtggagaagaacacacagcagttctcacaaagagtggaggtgtgtttacctttggcgctggttcctgtgggcaacttggacacgactccatgaatgatgaggttaaccctagaagagttctagagctgatgggtagtgaagtaactcaaattgcttgtggcagacaacataccctagccttcgtgccttcttctggactcatctatgcatttggttgtggagcaagaggtcaattaggaactgggcacacttgtaatgttaagtgcccatctcctgtcaagggttactgggctgcccacagtggccagctttcagcccgagctgatcgctttaaatatcatatcgttaagcagatcttctctggaggagaccagacttttgtactttgctccaaatacgagaattattctcctgctgttgacttcaggactatgaaccaagcacattataccagtttaataaatgatgaaaccatagcagtttggagacaaaaactctcagaacacaacaatgcaaatacaatcaatggtgttgttcagatattatcttctgcagcctgttggaatggaagttttcttgaaaaaaaaattgatgaacattttaaaacgagtcccaaaatccctgggattgacctgaactcaactagggtgttatttgagaagttaatgaactctcagcactccatgattctagaacagattttgaacagttttgaaagttgtctgattccccagttgtcaagctcaccaccagatgttgaagccatgagaatctatttaatactacctgagtttcccctactccaggattccaagtattatataacattgactattcccttggctatggccattcttcggctggatacaaaccccagcaaagtactagataactggtggtctcaggtatgcccgaaatatttcatgaagctggtaaacctctataaaggtgcagtcctttatctactgaggggaagaaagacattcttaattcccgtactgtttaacaattatatcacagcagctctcaaactcttggagaagttatataaggtaaatcttaaagtgaagcatgtggaatatgatacattttacattcctgagatttccaatctcgtggacattcaggaagactacctcatgtggttcttgcatcaagcagggatgaaggctagaccatcaataatacaggatactgtaacactttgttcctaccctttcatctttgatgcccaagccaagaccaaaatgttacagacagatgctgaactacagatgcaggtggcagtcaatggagccaacctgcagaatgtcttcatgcttctcaccctggagcctctgctggccagaagccccttcctggtccttcacgttcgcaggaacaaccttgttggagatgccctaagagagctgagcattcattctgatattgatttgaaaaagcctctcaaagtaatctttgatggtgaagaagcagtggatgccggtggtgttacaaaggaattttttcttttgctgttaaaagaacttttgaatcccatctatggaatgtttacctactatcaagattcaaatctcttgtggttttcagacacgtgttttgtagagcacaactggtttcacttgattggtataacctgtggactagctatctacaactccactgtggtcgatctccacttcccattggctctctacaagaagttactcaatgtaaagcctggcttggaagacttaaaggagttgtcacccactgaaggaaggagtctccaagagcttttagattaccccggggaggatgtggaggagactttctgcctcaacttcacgatctgccgagaaagctatggagtgattgaacagaagaagctgatacctgggggagataatgtaactgtgtgcaaggataacaggcaggaatttgtggatgcttatgtgaattatgtcttccaaatctcagttcatgaatggtacacagccttctctagtggcttcctaaaggtgtgtggtggcaaagtacttgagctcttccagccttcagaactgagggctatgatggtggggaacagcaactacaactgggaagaactggaagagactgccatctacaagggagattactcggccacacatcccactgtaaaactattttgggaaacatttcatgagtttccattggaaaagaagaagaagtttctcttgttcctgacaggcagcgatcggattcccatctacggcatggccagtctgcagattgtcatccagtccacagccagcggggaggagtacttgccggtggcccacacttgctacaaccttcttgacctccccaagtacagcagcaaagagattctgagtgcccggctgacccaggcccttgacaactatgaagggtttagtttggcctgaggcttctcagcttgtccagtatttcccttcgttcctcagtgtccacattgaggcctatacagaaaatcatggggagtgatttctatttttttattgtctaagtgggttgggacttttaaatactgagcctggttgatgtgtttctgggattgtatagcagtaaacaacctttttgaaaaattagaggttggggatggggtgaaaaattggcccttgtatgggaggtgtttttgtttttgttttaaaccaaactacccagtattccttgcacttgtgaatgtgttgcactctgctggatgaaatggcagtggatttttaaactttaatttcccaaatgtctctctcagccctgatgttttctcacagtgcttccttgtccttctcttaacttctcattcctctataagaatgatttagactgacctgtccttttttatctgcgcatgcgagaacatcaccttcctctgtacacttggaaatgcctctggcttgttgcagccctcctttaacccaaaggaggaaaggactgcttcagaaactcccaattccaaaaagctgagtctgggtccattattttggcagaactcctaagaatttatgggagcctatataaacatatcttgcttttaaaaagttcttgagggaatagcaactttcccatggctgtgcctatttcctagaccttttaaaagatgtgcagagcagcttagcattcgttgcagctgagcctaattttttcttgctcatccttgtccctttgacaataaggttaattgatagacccaccacctcttgcactctcgcttttggagcaagttgcattaactattttgagtctctatattgtccaagaaaagtagaaataataaatttactttccctttttctatcaccttatgtcctctaccattttctccttcctcccttcccttattttctccttttcgtaccctgtgtcctccctgattttcctttcgtttcttctttattttatcccattctctgttacttgactcagtgctcccttcctctcctctccttctagtggatgcatgcagcctttttttcaatttttatttaaattgcaaaatttttactcagattttttttcctcttccctaattgctaagatttaaggacgttctttattatgaaactttatcacattcgaaatgtttgtttacagtgggattttaggggggattgtgtttaaatcaaatatatgtattttaaaaataatgacatgctcaaccttcctcatcatggagtaagaaaattctacatgattaaagaatccatgtaagtctaattttaaattcctagtaactagagaaaagacttatttatataaaatgaagtatttatgaactgtgataaagcatcaaatcttgatgaaggattgtagatttttgctttttctttttgtttttaaaacttattccaattgctaaattggtagtttttcagtctttataaatacaggattaaaaatatatatacagttatatgaaatgtttattttctatgtgtgtgcatatagttcaatattatgcaataaatttggtgttttaacttaaaacta

SEQ ID NO: 181056 - DNA, 1485 bp, Artificial Sequence
  derived and/or modified sequence
atgaagctggtgaacctgtacaagggcgccgtgctgtacctgctgcgtggacgtaaaaccttcctgatccccgtcctgttcaataattatataactgcagccctgaaactgctggagaagttgtacaaagttaaccttaaagtgaagcacgtcgaatacgacaccttctacatcccggaaatcagcaatctggttgatatccaggaagattatctcatgtggttcctgcaccaggctggaatgaaggcaaggcccagcataatccaggatactgttactctatgcagctatccgtttattttcgatgctcaggcaaaaaccaaaatgctccagacggacgccgagctccagatgcaggtggccgtaaacggggccaatctgcagaacgtcttcatgctcctcaccctcgaacctctcttagcacgaagcccttttcttgtactgcatgtgcgtcggaataacctcgtgggcgatgcgctccgggagctgagtattcactctgacatcgatttgaaaaagcctctgaaagtgatcttcgatggtgaagaggctgtggatgcgggaggggtcactaaagagttttttctcttgttactgaaggagctcctcaatcccatttacggcatgttcacttactaccaggactctaacctcctgtggttctccgacacttgtttcgtggagcacaattggttccatttaattggtatcacttgtggattggccatctacaactcgactgtggttgatctccacttccctttagctttgtacaaaaaattgttgaatgtcaaaccaggacttgaagatttgaaagagcttagccctaccgagggacggagcctacaagaactgttggactacccaggcgaggacgtagaagagaccttctgtctgaactttactatttgcagggagagttatggggtgattgaacagaaaaagctcattcctggcggagataatgtgacagtgtgcaaggataaccgccaggagttcgttgacgcatatgtgaactacgtgtttcagatctccgtgcatgagtggtacacggccttttccagcgggttcctgaaagtttgtgggggaaaagtgctggagttgttccaaccaagcgagcttcgagccatgatggttggcaacagcaactataattgggaggaactagaggaaaccgctatttacaagggagactacagcgctacacaccccaccgtcaagctgttctgggaaacctttcacgaatttccattagaaaagaagaagaagttcctcctgttcctgacgggttccgatcggatacctatttacggaatggccagcctccagatcgtgatacagagcactgctagcggggaggaatatctccctgttgcccatacatgctacaatctactcgacctccccaagtactcctcaaaagaaattcttagtgcgcgcctgactcaggcactggacaactacgaaggcttttccctggcctag

SEQ ID NO: 181057 - DNA, 3153 bp, Artificial Sequence
  derived and/or modified sequence
atgctttgctggggctattggtcactgggacaaccaggtatctccaccaaccttcaggggatcgtcgctgaacctcaggtgtgcggctttatctccgaccggtccgtcaaggaggtggcgtgcgggggaaaccactctgtatttctgctggaggacggcgaggtgtatacctgtggacttaatactaagggacagctgggacacgaacgcgagggaaacaagccagaacagattggtgccctggccgatcagcatataatacacgtcgcttgcggcgagagccattcactggctctttctgacagaggccagctcttcagctggggagcaggatcagacggacagctgggtctgatgacaacggaagattcagtggctgtgcctcggttaatccagaagcttaaccagcagacgattcttcaggtatcttgtgggaattggcactgcttagccctggccgctgatggccagttttttacctggggaaaaaattcccatggtcagctaggactgggaaaggaatttcccagtcaggcttcaccccagcgcgttagatccctggagggaattcccctggcacaggtggctgcgggtggcgcacattcgttcgctctctcacttagtggagcggtcttcgggtggggcatgaataatgccggtcaactcggcttaagtgacgaaaaggatcgcgagagcccttgccacgttaaactgcttagaactcagaaagttgtttacattagctgtggtgaggagcatacagcggtgctcaccaagtcaggcggtgttttcacgttcggagcaggaagttgcggccagctcggtcatgattctatgaacgatgaggtcaatcctcggagagtattggagctaatgggcagtgaagtcacccagatcgcctgtggcagacagcataccctggctttcgtgccctccagcggtcttatatacgccttcggttgtggcgcaagggggcagcttggcaccggccatacatgcaacgtgaagtgccctagtcccgtcaagggttactgggccgcacactctggacagctgagcgccagagcagaccggtttaagtaccatatagtgaagcagatattctctggcggtgatcagacctttgtgctgtgcagtaagtatgagaactattctcctgcagtcgactttcggaccatgaatcaggcccattacacatccctcataaatgatgaaacaatcgccgtttggaggcagaagctaagtgagcacaacaacgccaacacgatcaatggagtggttcaaattctgtctagcgcggcttgttggaacggaagttttctggagaagaagatcgacgaacattttaagacaagtcccaagattccagggattgacctgaattcgactcgggtcctctttgaaaagctgatgaattcacagcactctatgatcctggagcaaatcctgaactcatttgagagctgtctgattccacaattgagctccagtcctccagatgtggaagcaatgcgaatctatctgatcctcccagaatttccactgctgcaggattccaagtattacatcacactgacaatccctttagcaatggctatcctgagactggacaccaatccttccaaggtgctcgacaactggtggtcacaggtttgtccaaagtactttatgaaactggtgaacctgtataagggcgctgtgctttatctactcagaggccgtaagacatttcttattcctgtcctcttcaataattatatcactgcagccctgaagttgctcgagaaactatacaaggtcaacctgaaagttaagcatgtggaatacgacactttttatatacctgagatctccaacctcgtggatattcaggaagattacctgatgtggttcctacatcaagctgggatgaaagccaggccaagtataatccaggataccgtgaccctgtgcagttatcctttcatatttgacgcacaggctaaaactaagatgctgcagacagatgctgagttacagatgcaggtggctgtcaatggagcgaacctccagaatgtgtttatgcttctaaccctggagccactgctcgctagaagcccctttcttgttctgcacgtgcgcaggaataacttagtgggggatgccctgagagagctgtccattcactccgatattgatctgaaaaagccgcttaaagtgatcttcgatggggaggaagccgtggacgccggaggcgtgacaaaggagtttttcttgctactgctgaaggaactgttaaatcctatatacggaatgtttacttactatcaggattccaatttactctggttctccgatacatgctttgtggagcataactggtttcatctgattgggattacctgcggcctggctatctacaactccacagtcgtcgacctccatttcccactcgctctttacaagaaacttctgaatgtgaagccagggctggaagatttgaaagagctctcacctactgaggggagatccctgcaggaactgcttgactacccgggagaggacgtggaggagaccttctgcctgaacttcacaatctgtcgggagtcttacggtgttatagaacagaagaagctaatccccggtggagacaatgtgactgtgtgtaaggataacagacaagaattcgtggacgcctatgtaaattacgtattccagatatctgtgcatgaatggtatacagcttttagcagtgggtttctgaaggtgtgcggcggaaaggtcctggaactgttccagccctcggagctgagagctatgatggttggaaatagtaactataactgggaagaactggaagagacggcgatctacaaaggagattatagtgccacccacccgaccgtcaagttgttttgggaaacttttcacgaattcccattggaaaagaagaaaaagttcctactgttcctgaccggctctgaccggattcctatttatggtatggcctctttgcagatcgtcattcaatctaccgcctctggtgaagagtatctgccagttgctcacacctgctataacttgcttgacttgcctaagtactcatccaaagaaattctgtccgctcggttaacgcaggccctcgacaactatgaaggttttagtctggcttag

SEQ ID NO: 181058 - DNA, 3153 bp, Artificial Sequence
  derived and/or modified sequence
atgctgtgctgggggtattggtctctcggccagcccggtattagcacaaacctgcagggtatcgtcgcagaaccgcaagtatgtgggttcatcagtgaccgatctgtcaaggaagtagcctgtggcggaaatcactcagtctttctactggaagatggcgaggtttacacctgcggtctcaatacgaaggggcagctggggcatgagagggagggcaacaaaccagaacaaataggggcactggccgaccaacatatcatacacgttgcctgcggtgaaagtcatagcttagccttatcggacagaggacaactcttcagctggggggcaggaagcgatggccagctcggcctgatgactacagaagacagcgtggctgtgcccaggctgattcagaaactgaaccaacagaccattctgcaagtctcctgtggcaattggcactgtctggcactggcggctgatggacaatttttcacgtggggtaagaatagtcacggccagttgggcttaggtaaggaatttccctcccaggcatcacctcagagggtacggagtctggagggcatcccactcgcacaggtggcagctggaggagcacacagcttcgccctctctctctctggtgcagtgttcggctgggggatgaacaacgccggacagctggggctcagtgacgaaaaagatagggagtcgccttgccacgtgaagctgttgcggacccagaaggtcgtgtatattagctgcggggaggagcacactgccgttctgacaaaaagcggaggggttttcacattcggcgcaggctcatgtggtcagctcgggcatgatagcatgaatgacgaagtcaatcccagaagagttcttgagcttatggggtcagaggtcactcagatcgcatgcgggaggcagcacaccctcgccttcgtgccctcttctggcctgatttacgctttcgggtgcggggctcgcggacaattgggcaccggccacacgtgtaacgtcaagtgtcctagcccagttaaaggctactgggcagcacactctgggcagctctccgctcgggctgaccggttcaagtatcacattgtgaagcaaatattcagcggaggagatcagacatttgtcctgtgttctaaatacgagaattattctcctgccgtcgacttccgcactatgaaccaggcccattatacttcgctcataaacgacgagacaatagcggtgtggagacaaaagctgtccgagcacaataatgctaacaccatcaacggtgtggtacagattctaagtagtgcagcctgttggaacggcagctttttagagaagaaaatcgatgaacattttaagaccagtccaaagatccctggcatcgatctgaacagcacccgcgtcctttttgaaaaacttatgaattcacaacattcgatgattctggagcaaattttaaacagttttgagtcatgtctgatcccccagctatcgtcttcccccccagatgttgaggcgatgagaatttatctgattctgcccgagtttccattgttgcaggatagtaaatactatatcaccctaactatccctctcgccatggctatactgagactggataccaacccatccaaagtcctggacaattggtggtcccaggtctgcccaaaatactttatgaaactagtaaatctgtataaaggagcagtcctataccttctgcgcggaaggaaaacctttttgattcctgtgctcttcaacaactatattaccgccgcactcaaactgctcgagaaactttataaagtgaatctcaaggtgaagcatgtcgagtatgacaccttctacattccagagattagcaacttggtagacatacaggaagattacttgatgtggtttttacaccaggccggaatgaaggcaagaccctccatcatccaggatacagtgaccttatgtagttacccttttatctttgacgcccaggcaaagaccaagatgctgcagaccgatgctgagttgcagatgcaggtagcagtgaacggcgcaaacctgcagaacgtgttcatgctgcttacactggagccacttctagctcgctcccccttcttagttttgcatgttcgtcgtaataacctggtcggtgatgctctaagggaattatctatccacagtgatatcgatctgaaaaagccactgaaggttatctttgacggcgaagaggccgttgacgctgggggtgtgaccaaggaattctttttactgttgctgaaagagctgctgaatcctatttatgggatgttcacctactatcaagacagcaatcttttgtggttttctgatacatgcttcgtggagcataattggtttcatctgatcggcataacctgcggcctggccatatacaattctactgtagtcgacttgcatttccctctcgccttgtacaaaaagcttctgaatgtgaaacctggccttgaggacctaaaggaactctctcctaccgagggacgcagcttgcaggaacttcttgactatcctggggaagacgtggaagagacattttgtctcaatttcacaatttgccgagagtcctacggagttatcgaacagaaaaaactgataccgggtggagataacgtgacagtgtgtaaggacaataggcaggagttcgtggatgcatacgtgaattatgtgtttcaaatctctgtgcacgagtggtacactgctttctcttctggctttctgaaggtgtgcggtgggaaagtcttagagttgttccaaccaagtgaactccgagctatgatggtgggaaactctaactacaactgggaggaactggaagaaacagcgatctataagggcgactatagtgctacacaccccaccgtgaaattgttctgggagacatttcacgaatttccgctggaaaaaaaaaagaaattccttctgttcctgacaggaagtgatcggattcctatttacgggatggcctcactacaaatcgtgatccagtccacagccagtggggaggaatacctgccagtggcgcatacctgctacaatctgctggatctaccaaagtatagttccaaggagatattaagcgcacgcctgacacaggcactggacaactacgagggcttcagcctagcgtag

SEQ ID NO: 181059 - DNA, 1485 bp, Artificial Sequence
  derived and/or modified sequence
atgaaattagttaacctctataagggtgccgtgctgtacctgcttagaggtcggaagaccttcctgataccagtgcttttcaataattatataactgctgcacttaaacttctcgaaaagttgtacaaggtcaatttgaaagtcaaacatgtcgagtacgataccttttacatcccagagatttccaacttggttgacattcaggaggattatttaatgtggtttttgcaccaggccggaatgaaggccagaccctctatcatacaggacacagtgacattatgttcctatccttttatatttgacgcccaggctaagactaaaatgttgcagacagatgctgaattacagatgcaggtggccgtcaacggcgctaatctgcagaacgtgttcatgctactgaccctggaacctttgctggcgaggagccctttcctggtgctacatgtgcgtagaaataatctcgtgggcgatgcactccgcgagcttagcatccactctgacatcgacttaaaaaaaccgcttaaagtcattttcgatggcgaggaggccgtggatgctggcggtgtgaccaaggagttcttcttgctgcttctgaaagagcttttgaaccccatctacggaatgtttacttattaccaagattcaaatttactgtggttttccgacacatgcttcgtagagcacaactggtttcacctgattggcataacttgtggattggcaatttataacagcacagttgttgacctccattttcctctggcgctgtacaagaagcttctaaatgtaaaaccaggtttggaagacctgaaagagctttcgcccaccgaaggtcgtagtctccaggaactcctggattaccccggtgaagacgtcgaggaaacattctgtctgaactttactatttgccgcgagtcttacggggtcattgaacaaaaaaaactcatccctggaggtgacaatgtgacagtgtgcaaagacaatcggcaagagtttgtggatgcatacgtgaactatgtttttcagatctcggtacacgaatggtatacagctttttcatcagggttcctcaaggtgtgtgggggaaaggtgctagagctgttccagccatctgagctgagggccatgatggtcgggaattcaaactataactgggaggagttggaggaaacagccatatacaagggggactattccgccacccatccaaccgttaagttgttttgggaaacattccacgagtttccattggaaaaaaagaagaagttcttattatttctcactggaagcgatagaatacctatttatggaatggctagcctgcagatcgtaatccagagcacagcatcaggagaagagtacctgccagtcgcccatacttgttataaccttcttgatctgccaaagtacagctccaaagaaatcctgtctgctcgactcacacaggctctcgataattatgaaggcttcagcttggcttag

SEQ ID NO: 181060 - DNA, 4758 bp, Artificial Sequence
  derived and/or modified sequence
ggctacatgattccctgaaagataagaacaatgttatgttggggatattggtctctgggccaacctggtatcagcaccaacctgcagggaattgtggctgagccccaggtgtgtgggttcatatctgacagaagtgtcaaggaagtggcctgtgggggaaaccactctgtgttcctgctggaagatggggaagtttacacatgtggtttgaacaccaaggggcaactgggccatgagagggaaggaaacaagccagaacaaattggagctctggcagatcagcatatcattcatgtggcatgtggcgagtcccacagtctggccctcagtgaccgaggccagctgttttcttggggtgcagggagtgatggtcagctaggactcatgactactgaggattctgtggcagtgcccaggttaatacaaaagctgaaccagcaaacaatattacaagtttcctgtggcaactggcattgcttggctcttgcggctgatggccagttcttcacctggggaaagaacagccatgggcagcttggcttagggaaggagttcccctcccaagccagcccacagagggtgaggtccctggaggggatcccactggctcaggtggctgccggaggggctcacagctttgccctgtctctctcaggagctgtttttggctgggggatgaataatgccgggcagctagggctcagtgatgaaaaagatcgagaatctccatgccatgtaaaactcttacgcacgcaaaaagttgtctatattagttgtggagaagaacacacagcagttctcacaaagagtggaggtgtgtttacctttggcgctggttcctgtgggcaacttggacacgactccatgaatgatgaggttaaccctagaagagttctagagctgatgggtagtgaagtaactcaaattgcttgtggcagacaacataccctagccttcgtgccttcttctggactcatctatgcatttggttgtggagcaagaggtcaattaggaactgggcacacttgtaatgttaagtgcccatctcctgtcaagggttactgggctgcccacagtggccagctttcagcccgagctgatcgctttaaatatcatatcgttaagcagatcttctctggaggagaccagacttttgtactttgctccaaatacgagaattattctcctgctgttgacttcaggactatgaaccaagcacattataccagtttaataaatgatgaaaccatagcagtttggagacaaaaactctcagaacacaacaatgcaaatacaatcaatggtgttgttcagatattatcttctgcagcctgttggaatggaagttttcttgaaaaaaaaattgatgaacattttaaaacgagtcccaaaatccctgggattgacctgaactcaactagggtgttatttgagaagttaatgaactctcagcactccatgattctagaacagattttgaacagttttgaaagttgtctgattccccagttgtcaagctcaccaccagatgttgaagccatgagaatctatttaatactacctgagtttcccctactccaggattccaagtattatataacattgactattcccttggctatggccattcttcggctggatacaaaccccagcaaagtactagataactggtggtctcaggtatgcccgaaatatttcatgaagctggtaaacctctataaaggtgcagtcctttatctactgaggggaagaaagacattcttaattcccgtactgtttaacaattatatcacagcagctctcaaactcttggagaagttatataaggtaaatcttaaagtgaagcatgtggaatatgatacattttacattcctgagatttccaatctcgtggacattcaggaagactacctcatgtggttcttgcatcaagcagggatgaaggctagaccatcaataatacaggatactgtaacactttgttcctaccctttcatctttgatgcccaagccaagaccaaaatgttacagacagatgctgaactacagatgcaggtggcagtcaatggagccaacctgcagaatgtcttcatgcttctcaccctggagcctctgctggccagaagccccttcctggtccttcacgttcgcaggaacaaccttgttggagatgccctaagagagctgagcattcattctgatattgatttgaaaaagcctctcaaagtaatctttgatggtgaagaagcagtggatgccggtggtgttacaaaggaattttttcttttgctgttaaaagaacttttgaatcccatctatggaatgtttacctactatcaagattcaaatctcttgtggttttcagacacgtgttttgtagagcacaactggtttcacttgattggtataacctgtggactagctatctacaactccactgtggtcgatctccacttcccattggctctctacaagaagttactcaatgtaaagcctggcttggaagacttaaaggagttgtcacccactgaaggaaggagtctccaagagcttttagattaccccggggaggatgtggaggagactttctgcctcaacttcacgatctgccgagaaagctatggagtgattgaacagaagaagctgatacctgggggagataatgtaactgtgtgcaaggataacaggcaggaatttgtggatgcttatgtgaattatgtcttccaaatctcagttcatgaatggtacacagccttctctagtggcttcctaaaggtgtgtggtggcaaagtacttgagctcttccagccttcagaactgagggctatgatggtggggaacagcaactacaactgggaagaactggaagagactgccatctacaagggagattactcggccacacatcccactgtaaaactattttgggaaacatttcatgagtttccattggaaaagaagaagaagtttctcttgttcctgacaggcagcgatcggattcccatctacggcatggccagtctgcagattgtcatccagtccacagccagcggggaggagtacttgccggtggcccacacttgctacaaccttcttgacctccccaagtacagcagcaaagagattctgagtgcccggctgacccaggcccttgacaactatgaagggtttagtttggcctgaggcttctcagcttgtccagtatttcccttcgttcctcagtgtccacattgaggcctatacagaaaatcatggggagtgatttctatttttttattgtctaagtgggttgggacttttaaatactgagcctggttgatgtgtttctgggattgtatagcagtaaacaacctttttgaaaaattagaggttggggatggggtgaaaaattggcccttgtatgggaggtgtttttgtttttgttttaaaccaaactacccagtattccttgcacttgtgaatgtgttgcactctgctggatgaaatggcagtggatttttaaactttaatttcccaaatgtctctctcagccctgatgttttctcacagtgcttccttgtccttctcttaacttctcattcctctataagaatgatttagactgacctgtccttttttatctgcgcatgcgagaacatcaccttcctctgtacacttggaaatgcctctggcttgttgcagccctcctttaacccaaaggaggaaaggactgcttcagaaactcccaattccaaaaagctgagtctgggtccattattttggcagaactcctaagaatttatgggagcctatataaacatatcttgcttttaaaaagttcttgagggaatagcaactttcccatggctgtgcctatttcctagaccttttaaaagatgtgcagagcagcttagcattcgttgcagctgagcctaattttttcttgctcatccttgtccctttgacaataaggttaattgatagacccaccacctcttgcactctcgcttttggagcaagttgcattaactattttgagtctctatattgtccaagaaaagtagaaataataaatttactttccctttttctatcaccttatgtcctctaccattttctccttcctcccttcccttattttctccttttcgtaccctgtgtcctccctgattttcctttcgtttcttctttattttatcccattctctgttacttgactcagtgctcccttcctctcctctccttctagtggatgcatgcagcctttttttcaatttttatttaaattgcaaaatttttactcagattttttttcctcttccctaattgctaagatttaaggacgttctttattatgaaactttatcacattcgaaatgtttgtttacagtgggattttaggggggattgtgtttaaatcaaatatatgtattttaaaaataatgacatgctcaaccttcctcatcatggagtaagaaaattctacatgattaaagaatccatgtaagtctaattttaaattcctagtaactagagaaaagacttatttatataaaatgaagtatttatgaactgtgataaagcatcaaatcttgatgaaggattgtagatttttgctttttctttttgtttttaaaacttattccaattgctaaattggtagtttttcagtctttataaatacaggattaaaaatatatatacagttatatgaaatgtttattttctatgtgtgtgcatatagttcaatattatgcaataaatttggtgttttaactt

SEQ ID NO: 181061 - DNA, 2130 bp, Artificial Sequence
  derived and/or modified sequence
agccaggggagaagatttcttacttctgtgacacaattaaaatggataggtacccactctgaagtgtattctgcgacagtagaaaaggggatcaaggagaaacttcaattaatgaaaaatatgctttcggaattttttttttgacagatcgctttaaatatcatatcgttaagcagatcttctctggaggagaccagacttttgtactttgctccaaatacgagaattgatgaacattttaaaacgagtcccaaaatccctgggattgacctgaactcaactagggtgttatttgagaagttaatgaactctcagcactccatgattctagaacagataactggtggtctcaggtatgcccgaaatatttcatgaagctggtaaacctctataaaggtgcagtcctttatctactgaggggaagaaagacattcttaattcccgtactgtttaacaattatatcacagcagctctcaaactcttggagaagttatataaggtaaatcttaaagtgaagcatgtggaatatgatacattttacattcctgagatttccaatctcgtggacattcaggaagactacctcatgtggttcttgcatcaagcagggatgaaggctagaccatcaataatacaggatactgtaacactttgttcctaccctttcatctttgatgcccaagccaagaccaaaatgttacagacagatgctgaactacagatgcaggtggcagtcaatggagccaacctgcagaatgtcttcatgcttctcaccctggagcctctgctggccagaagccccttcctggtccttcacgttcgcaggaacaaccttgttggagatgccctaagagagctgagcattcattctgatattgatttgaaaaagcctctcaaagtaatctttgatggtgaagaagcagtggatgccggtggtgttacaaaggaattttttcttttgctgttaaaagaacttttgaatcccatctatggaatgtttacctactatcaagattcaaatctcttgtggttttcagacacgtgttttgtagagcacaactggtttcacttgattggtataacctgtggactagctatctacaactccactgtggtcgatctccacttcccattggctctctacaagaagttactcaatgtaaagcctggcttggaagacttaaaggagttgtcacccactgaaggaaggagtctccaagagcttttagattaccccggggaggatgtggaggagactttctgcctcaacttcacgatctgccgagaaagctatggagtgattgaacagaagaagctgatacctgggggagataatgtaactgtgtgcaaggataacaggcaggaatttgtggatgcttatgtgaattatgtcttccaaatctcagttcatgaatggtacacagccttctctagtggcttcctaaaggtgtgtggtggcaaagtacttgagctcttccagccttcagaactgagggctatgatggtggggaacagcaactacaactgggaagaactggaagagactgccatctacaagggagattactcggccacacatcccactgtaaaactattttgggaaacatttcatgagtttccattggaaaagaagaagaagtttctcttgttcctgacaggcagcgatcggattcccatctacggcatggccagtctgcagattgtcatccagtccacagccagcggggaggagtacttgccggtggcccacacttgctacaaccttcttgacctccccaagtacagcagcaaagagattctgagtgcccggctgacccaggcccttgacaactatgaagggtttagtttggcctgaggcttctcagcttgtccagtatttcccttcgttcctcagtgtccacattgaggcctatacagaaaatcatggggagtgatttctatttttttattgtctaagtgggttgggacttttaaatactgagcctggttgatgtgtttctgggattgtatagcagtaaacaacctttttgaaaaattagaggttggggatggggtgaaaaattggcccttgtatgggaggtgtttttgtttttgttttaaaccaaactacccagtattccttgcacttg

SEQ ID NO: 181062 - DNA, 3153 bp, Artificial Sequence
  derived and/or modified sequence
atgctgtgctggggctactggagcctgggccagcccggcatcagcaccaacctgcagggcatcgtggccgagccccaggtgtgcggcttcatcagcgacagaagcgtgaaggaggtggcctgcggcggcaaccacagcgtgttcctgctggaggacggcgaggtgtacacctgcggcctgaacaccaagggccagctgggccacgagagagagggcaacaagcccgagcagatcggcgccctggccgaccagcacatcatccacgtggcctgcggcgagagccacagcctggccctgagcgacagaggccagctgttcagctggggcgccggcagcgacggccagctgggcctgatgaccaccgaggacagcgtggccgtgcccagactgatccagaagctgaaccagcagaccatcctgcaggtgagctgcggcaactggcactgcctggccctggccgccgacggccagttcttcacctggggcaagaacagccacggccagctgggcctgggcaaggagttccccagccaggccagcccccagagagtgagaagcctggagggcatccccctggcccaggtggccgccggcggcgcccacagcttcgccctgagcctgagcggcgccgtgttcggctggggcatgaacaacgccggccagctgggcctgagcgacgagaaggacagagagagcccctgccacgtgaagctgctgagaacccagaaggtggtgtacatcagctgcggcgaggagcacaccgccgtgctgaccaagagcggcggcgtgttcaccttcggcgccggcagctgcggccagctgggccacgacagcatgaacgacgaggtgaaccccagaagagtgctggagctgatgggcagcgaggtgacccagatcgcctgcggcagacagcacaccctggccttcgtgcccagcagcggcctgatctacgccttcggctgcggcgccagaggccagctgggcaccggccacacctgcaacgtgaagtgccccagccccgtgaagggctactgggccgcccacagcggccagctgagcgccagagccgacagattcaagtaccacatcgtgaagcagatcttcagcggcggcgaccagaccttcgtgctgtgcagcaagtacgagaactacagccccgccgtggacttcagaaccatgaaccaggcccactacaccagcctgatcaacgacgagaccatcgccgtgtggagacagaagctgagcgagcacaacaacgccaacaccatcaacggcgtggtgcagatcctgagcagcgccgcctgctggaacggcagcttcctggagaagaagatcgacgagcacttcaagaccagccccaagatccccggcatcgacctgaacagcaccagagtgctgttcgagaagctgatgaacagccagcacagcatgatcctggagcagatcctgaacagcttcgagagctgcctgatcccccagctgagcagcagcccccccgacgtggaggccatgagaatctacctgatcctgcccgagttccccctgctgcaggacagcaagtactacatcaccctgaccatccccctggccatggccatcctgagactggacaccaaccccagcaaggtgctggacaactggtggagccaggtgtgccccaagtacttcatgaagctggtgaacctgtacaagggcgccgtgctgtacctgctgagaggcagaaagaccttcctgatccccgtgctgttcaacaactacatcaccgccgccctgaagctgctggagaagctgtacaaggtgaacctgaaggtgaagcacgtggagtacgacaccttctacatccccgagatcagcaacctggtggacatccaggaggactacctgatgtggttcctgcaccaggccggcatgaaggccagacccagcatcatccaggacaccgtgaccctgtgcagctaccccttcatcttcgacgcccaggccaagaccaagatgctgcagaccgacgccgagctgcagatgcaggtggccgtgaacggcgccaacctgcagaacgtgttcatgctgctgaccctggagcccctgctggccagaagccccttcctggtgctgcacgtgagaagaaacaacctggtgggcgacgccctgagagagctgagcatccacagcgacatcgacctgaagaagcccctgaaggtgatcttcgacggcgaggaggccgtggacgccggcggcgtgaccaaggagttcttcctgctgctgctgaaggagctgctgaaccccatctacggcatgttcacctactaccaggacagcaacctgctgtggttcagcgacacctgcttcgtggagcacaactggttccacctgatcggcatcacctgcggcctggccatctacaacagcaccgtggtggacctgcacttccccctggccctgtacaagaagctgctgaacgtgaagcccggcctggaggacctgaaggagctgagccccaccgagggcagaagcctgcaggagctgctggactaccccggcgaggacgtggaggagaccttctgcctgaacttcaccatctgcagagagagctacggcgtgatcgagcagaagaagctgatccccggcggcgacaacgtgaccgtgtgcaaggacaacagacaggagttcgtggacgcctacgtgaactacgtgttccagatcagcgtgcacgagtggtacaccgccttcagcagcggcttcctgaaggtgtgcggcggcaaggtgctggagctgttccagcccagcgagctgagagccatgatggtgggcaacagcaactacaactgggaggagctggaggagaccgccatctacaagggcgactacagcgccacccaccccaccgtgaagctgttctgggagaccttccacgagttccccctggagaagaagaagaagttcctgctgttcctgaccggcagcgacagaatccccatctacggcatggccagcctgcagatcgtgatccagagcaccgccagcggcgaggagtacctgcccgtggcccacacctgctacaacctgctggacctgcccaagtacagcagcaaggagatcctgagcgccagactgacccaggccctggacaactacgagggcttcagcctggcctag

SEQ ID NO: 181063 - protein, 508 aa, Artificial Sequence
  derived and/or modified sequence
MLWFQGAIPAAIATAKRSGAVFVVFVAGDDEQSTQMAASWEDDKVTEASSNSFVAIKIDTKSEACLQFSQIYPVVCVPSSFFIGDSGIPLEVIAGSVSADELVTRIHKVRQMHLLKSETSVANGSQSESSVSTPSASFEPNNTCENSQSRNAELCEIPPTSDTKSDTATGGESAGHATSSQEPSGCSDQRPAEDLNIRVERLTKKLEERREEKRKEEEQREIKKEIERRKTGKEMLDYKRKQEEELTKRMLEERNREKAEDRAARERIKQQIALDRAERAARFAKTKEEVEAAKAAALLAKQAEMEVKRESYARERSTVARIQFRLPDGSSFTNQFPSDAPLEEARQFAAQTVGNTYGNFSLATMFPRREFTKEDYKKKLLDLELAPSASVVLLPAGRPTASIVHSSSGDIWTLLGTVLYPFLAIWRLISNFLFSNPPPTQTSVRVTSSEPPNPASSSKSEKREPVRKRVLEKRGDDFKKEGKIYRLRTQDDGEDENNTWNGNSTQQM

SEQ ID NO: 181064 - protein, 490 aa, Artificial Sequence
  derived and/or modified sequence
MLWFQGAIPAAIATAKRSGAVFVVFVAGDDEQSTQMAASWEDDKVTEASSNSFVAIKIDTKSEACLQFSQIYPVVCVPSSFFIGDSGIPLEVIAGSVSADELVTRIHKVRQMHLLKTASFEPNNTCENSQSRNAELCEIPPTSDTKSDTATGGESAGHATSSQEPSGCSDQRPAEDLNIRVERLTKKLEERREEKRKEEEQREIKKEIERRKTGKEMLDYKRKQEEELTKRMLEERNREKAEDRAARERIKQQIALDRAERAARFAKTKEEVEAAKAAALLAKQAEMEVKRESYARERSTVARIQFRLPDGSSFTNQFPSDAPLEEARQFAAQTVGNTYGNFSLATMFPRREFTKEDYKKKLLDLELAPSASVVLLPAGRPTASIVHSSSGDIWTLLGTVLYPFLAIWRLISNFLFSNPPPTQTSVRVTSSEPPNPASSSKSEKREPVRKRVLEKRGDDFKKEGKIYRLRTQDDGEDENNTWNGNSTQQM

SEQ ID NO: 181065 - DNA, 1527 bp, Artificial Sequence
  derived and/or modified sequence
atgctgtggttccagggcgccatccccgccgccatcgccaccgccaagagaagcggcgccgtgttcgtggtgttcgtggccggcgacgacgagcagagcacccagatggccgccagctgggaggacgacaaggtgaccgaggccagcagcaacagcttcgtggccatcaagatcgacaccaagagcgaggcctgcctgcagttcagccagatctaccccgtggtgtgcgtgcccagcagcttcttcatcggcgacagcggcatccccctggaggtgatcgccggcagcgtgagcgccgacgagctggtgaccagaatccacaaggtgagacagatgcacctgctgaagagcgagaccagcgtggccaacggcagccagagcgagagcagcgtgagcacccccagcgccagcttcgagcccaacaacacctgcgagaacagccagagcagaaacgccgagctgtgcgagatcccccccaccagcgacaccaagagcgacaccgccaccggcggcgagagcgccggccacgccaccagcagccaggagcccagcggctgcagcgaccagagacccgccgaggacctgaacatcagagtggagagactgaccaagaagctggaggagagaagagaggagaagagaaaggaggaggagcagagagagatcaagaaggagatcgagagaagaaagaccggcaaggagatgctggactacaagagaaagcaggaggaggagctgaccaagagaatgctggaggagagaaacagagagaaggccgaggacagagccgccagagagagaatcaagcagcagatcgccctggacagagccgagagagccgccagattcgccaagaccaaggaggaggtggaggccgccaaggccgccgccctgctggccaagcaggccgagatggaggtgaagagagagagctacgccagagagagaagcaccgtggccagaatccagttcagactgcccgacggcagcagcttcaccaaccagttccccagcgacgcccccctggaggaggccagacagttcgccgcccagaccgtgggcaacacctacggcaacttcagcctggccaccatgttccccagaagagagttcaccaaggaggactacaagaagaagctgctggacctggagctggcccccagcgccagcgtggtgctgctgcccgccggcagacccaccgccagcatcgtgcacagcagcagcggcgacatctggaccctgctgggcaccgtgctgtaccccttcctggccatctggagactgatcagcaacttcctgttcagcaaccccccccccacccagaccagcgtgagagtgaccagcagcgagccccccaaccccgccagcagcagcaagagcgagaagagagagcccgtgagaaagagagtgctggagaagagaggcgacgacttcaagaaggagggcaagatctacagactgagaacccaggacgacggcgaggacgagaacaacacctggaacggcaacagcacccagcagatgtag

SEQ ID NO: 181066 - DNA, 1473 bp, Artificial Sequence
  derived and/or modified sequence
atgctgtggttccagggcgccatccccgccgccatcgccaccgccaagagaagcggcgccgtgttcgtggtgttcgtggccggcgacgacgagcagagcacccagatggccgccagctgggaggacgacaaggtgaccgaggccagcagcaacagcttcgtggccatcaagatcgacaccaagagcgaggcctgcctgcagttcagccagatctaccccgtggtgtgcgtgcccagcagcttcttcatcggcgacagcggcatccccctggaggtgatcgccggcagcgtgagcgccgacgagctggtgaccagaatccacaaggtgagacagatgcacctgctgaagaccgccagcttcgagcccaacaacacctgcgagaacagccagagcagaaacgccgagctgtgcgagatcccccccaccagcgacaccaagagcgacaccgccaccggcggcgagagcgccggccacgccaccagcagccaggagcccagcggctgcagcgaccagagacccgccgaggacctgaacatcagagtggagagactgaccaagaagctggaggagagaagagaggagaagagaaaggaggaggagcagagagagatcaagaaggagatcgagagaagaaagaccggcaaggagatgctggactacaagagaaagcaggaggaggagctgaccaagagaatgctggaggagagaaacagagagaaggccgaggacagagccgccagagagagaatcaagcagcagatcgccctggacagagccgagagagccgccagattcgccaagaccaaggaggaggtggaggccgccaaggccgccgccctgctggccaagcaggccgagatggaggtgaagagagagagctacgccagagagagaagcaccgtggccagaatccagttcagactgcccgacggcagcagcttcaccaaccagttccccagcgacgcccccctggaggaggccagacagttcgccgcccagaccgtgggcaacacctacggcaacttcagcctggccaccatgttccccagaagagagttcaccaaggaggactacaagaagaagctgctggacctggagctggcccccagcgccagcgtggtgctgctgcccgccggcagacccaccgccagcatcgtgcacagcagcagcggcgacatctggaccctgctgggcaccgtgctgtaccccttcctggccatctggagactgatcagcaacttcctgttcagcaaccccccccccacccagaccagcgtgagagtgaccagcagcgagccccccaaccccgccagcagcagcaagagcgagaagagagagcccgtgagaaagagagtgctggagaagagaggcgacgacttcaagaaggagggcaagatctacagactgagaacccaggacgacggcgaggacgagaacaacacctggaacggcaacagcacccagcagatgtag

SEQ ID NO: 181067 - DNA, 1527 bp, Artificial Sequence
  derived and/or modified sequence
atgctgtggtttcagggtgcaattcccgcagcaattgccaccgctaaacgatccggcgccgtctttgtggtttttgtggctggagacgatgagcaatctacacagatggccgcaagctgggaggatgataaagtgacagaagcatcttccaacagtttcgtcgcgattaagatcgatacaaagtctgaggcctgccttcagttttctcagatatatccggtggtgtgcgtgccctctagcttctttataggggatagcggtatccctcttgaggtgatcgccggcagcgtgtcagccgacgagttggtgacccgaatccataaggtgcggcaaatgcacctcttgaagagtgaaactagcgtcgccaacgggtcgcagagtgaatcctccgtatccacaccttctgcgagttttgagccaaataacacatgcgagaatagccagtctagaaacgcagagctttgtgagattcctccaactagcgatacaaaaagtgacacagctactggcggtgagagtgctggacacgctacaagtagccaggaaccctctgggtgcagcgatcagaggcccgccgaggacctgaacatccgcgtagaaagactgacaaagaagttggaagagaggagagaggagaagcgcaaggaagaggaacagagggagatcaagaaggaaatcgagaggaggaagacaggcaaggagatgttagattataagcgcaaacaggaggaagagttgactaaaaggatgttagaagagcgcaatcgagagaaggccgaagatcgggcagcaagagagcgaatcaagcaacaaatcgctctggatagagcagaacgcgcagcacgattcgccaagaccaaggaggaggttgaggctgccaaggccgcggctctcctggccaagcaggcagagatggaggtgaaacgagagtcctatgccagggagcgctccacagttgcccggattcaatttaggctgcccgatggttcaagcttcacaaaccagttcccttcagacgctccgctggaggaggcgcggcagtttgcagcccagactgttggaaacacgtacggtaacttctccctggccacaatgttcccacgtcgcgagttcacaaaggaagattacaagaaaaagctcctggaccttgaattggcccctagtgcgtctgtggttttactgccggcaggccgtcccactgcctcaatcgtgcacagctcatccggtgacatctggaccctcctcggaactgtattatatccatttctggccatatggagactgatcagcaatttccttttttctaaccctccccctacacagacgtccgtgagggtcacttcatccgaacctccaaaccctgctagctcctccaaaagcgagaaacgggaaccagtgcggaaacgcgtactggaaaagcgtggagatgacttcaagaaagaggggaagatataccggctgcggactcaggatgacggagaagatgaaaataacacgtggaacggaaattctacgcagcagatgtag

SEQ ID NO: 181068 - DNA, 1473 bp, Artificial Sequence
  derived and/or modified sequence
atgctttggttccaaggggcgatcccagcggcaatcgctactgccaagcggagcggagctgtgtttgtcgtttttgtagcgggcgacgatgagcagtccactcaaatggctgcgtcttgggaggacgacaaagtgaccgaagcaagctcaaactccttcgtggcaatcaaaatcgataccaaaagcgaggcatgcctgcaattctctcagatctatcctgtcgtgtgtgtgccaagttccttcttcatcggagacagtggtatccctcttgaggtcatcgccggatcggtaagtgccgatgaacttgtgaccagaatacataaggtccgacagatgcatttgctgaagaccgcctcattcgagcccaataatacttgcgagaactcccagtcacgcaatgccgaactatgtgagatacctccaacctccgacactaaatccgacactgccactgggggggaatctgccgggcacgctacaagtagccaggagccatccggttgcagtgaccagagacccgcagaggatctcaacatccgcgtggagagattaacaaaaaaactggaagagaggcgggaggagaagcgcaaagaggaagaacagagagaaattaagaaggaaatcgagagaagaaagacgggcaaagagatgctagactataagcggaaacaggaagaggaattgacaaagaggatgttggaggaacgaaatcgtgagaaagctgaagatcgagcagccagagagagaattaagcaacagattgctctcgaccgagccgagcgggctgcccgctttgctaaaaccaaggaagaagttgaggcggctaaagctgccgccttacttgccaaacaggccgaaatggaggtgaagcgcgagtcctatgctcgagaaagatccaccgtcgccagaatccaatttagactgcctgatggaagttcattcactaatcagttcccctccgacgcaccactcgaagaagcacgtcaattcgcagctcagactgttggcaatacctatggaaacttctctctcgccaccatgttcccccgtcgggagtttactaaggaagattacaaaaagaagctcctcgacctcgagctggccccatccgctagtgtggtactgctccctgctggacgacccactgcgtctattgtgcacagctcttcgggggatatctggacactgctgggcacagtgttatatcccttcctcgcgatctggcggctcatcagcaatttcctgtttagtaacccccctccaactcaaacctctgtgagagtaacgtcatctgaacctccaaaccctgcctctagcagcaaaagcgagaagcgtgaaccagtacgcaagcgggtgctggaaaagcggggggacgactttaaaaaagaagggaagatctaccggctgagaacgcaggatgatggagaggacgagaacaatacttggaacggaaattcgactcaacagatgtag

SEQ ID NO: 181069 - DNA, 1527 bp, Artificial Sequence
  derived and/or modified sequence
atgctgtggttccagggcgccatcccagctgccatcgccacagccaagaggtctggagctgtgtttgtggtgtttgtggccggagatgatgagcagagcacccagatggccgcctcctgggaggatgacaaggtgacagaggccagcagcaacagctttgtggccatcaagattgacaccaagtctgaggcctgcctgcagttcagccagatctaccctgtggtgtgtgtgcccagcagcttcttcatcggggacagcggcatccccctggaggtgattgctggctctgtgtctgcagatgagctggtgacccgcatccacaaggtgcggcagatgcacctgctgaagtctgagacctctgtggccaacggcagccagagcgagagctctgtgtccaccccatctgccagctttgagcccaacaacacctgtgagaacagccagagcagaaatgctgagctgtgtgagatcccccccaccagtgacaccaagagtgacacagccactggaggagagagcgctggccacgccaccagcagccaggagcccagcggctgcagcgaccagaggcctgctgaggacctgaacatccgggtggagcggctgaccaagaagctggaggagcggcgggaggagaagaggaaggaggaggagcagcgggagatcaagaaggagattgaaagaaggaagacaggcaaggagatgctggactacaagaggaagcaggaggaggagctgaccaagaggatgctggaggagaggaaccgggagaaggccgaggacagagctgcccgggagcgcatcaagcagcagatcgccctggacagagctgagcgggccgccaggtttgccaagaccaaggaggaggtggaggccgccaaggccgccgccctgctggccaagcaggccgagatggaggtgaagcgggagagctatgcccgggagaggagcacagtggcccgcatccagttccggctgcctgatggcagcagcttcaccaaccagttccccagtgatgcccccctggaggaggcccggcagtttgctgcccagacagtgggcaacacctacggcaacttcagcctggccaccatgttcccccggcgggagttcaccaaggaggactacaagaagaagctgctggacctggagctggcccccagcgcctctgtggtgctgctgcctgctggccggcccacagccagcatcgtgcacagcagcagcggggacatctggaccctgctgggcaccgtgctgtaccccttcctggccatctggaggctcatcagcaacttcctgttcagcaaccccccacccacccagacctctgtgcgggtgaccagcagcgagccccccaacccagccagcagcagcaagtctgagaagcgggagcctgtgaggaagagggtgctggagaagagaggagatgacttcaagaaggagggcaagatctaccgcctgcggacccaggatgatggagaagatgagaacaacacctggaatggaaacagcacccagcagatgtag

SEQ ID NO: 181070 - DNA, 1473 bp, Artificial Sequence
  derived and/or modified sequence
atgctgtggttccagggcgccatcccagctgccatcgccacagccaagaggtctggagctgtgtttgtggtgtttgtggccggagatgatgagcagagcacccagatggccgcctcctgggaggatgacaaggtgacagaggccagcagcaacagctttgtggccatcaagattgacaccaagtctgaggcctgcctgcagttcagccagatctaccctgtggtgtgtgtgcccagcagcttcttcatcggggacagcggcatccccctggaggtgattgctggctctgtgtctgcagatgagctggtgacccgcatccacaaggtgcggcagatgcacctgctgaagacagccagctttgagcccaacaacacctgtgagaacagccagagcagaaatgctgagctgtgtgagatcccccccaccagtgacaccaagagtgacacagccactggaggagagagcgctggccacgccaccagcagccaggagcccagcggctgcagcgaccagaggcctgctgaggacctgaacatccgggtggagcggctgaccaagaagctggaggagcggcgggaggagaagaggaaggaggaggagcagcgggagatcaagaaggagattgaaagaaggaagacaggcaaggagatgctggactacaagaggaagcaggaggaggagctgaccaagaggatgctggaggagaggaaccgggagaaggccgaggacagagctgcccgggagcgcatcaagcagcagatcgccctggacagagctgagcgggccgccaggtttgccaagaccaaggaggaggtggaggccgccaaggccgccgccctgctggccaagcaggccgagatggaggtgaagcgggagagctatgcccgggagaggagcacagtggcccgcatccagttccggctgcctgatggcagcagcttcaccaaccagttccccagtgatgcccccctggaggaggcccggcagtttgctgcccagacagtgggcaacacctacggcaacttcagcctggccaccatgttcccccggcgggagttcaccaaggaggactacaagaagaagctgctggacctggagctggcccccagcgcctctgtggtgctgctgcctgctggccggcccacagccagcatcgtgcacagcagcagcggggacatctggaccctgctgggcaccgtgctgtaccccttcctggccatctggaggctcatcagcaacttcctgttcagcaaccccccacccacccagacctctgtgcgggtgaccagcagcgagccccccaacccagccagcagcagcaagtctgagaagcgggagcctgtgaggaagagggtgctggagaagagaggagatgacttcaagaaggagggcaagatctaccgcctgcggacccaggatgatggagaagatgagaacaacacctggaatggaaacagcacccagcagatgtag

SEQ ID NO: 181071 - DNA, 1527 bp, Artificial Sequence
  derived and/or modified sequence
atgctgtggttccagggcgccatccccgccgccatcgccaccgccaagaggagcggcgccgtgttcgtagtgtttgtcgcgggcgatgacgaacagtccacccagatggcagcaagttgggaagatgacaaggtcactgaggcaagctctaactctttcgtggcgatcaagatcgacacaaaaagcgaggcctgtttgcagttctctcagatatatccagtagtgtgtgtcccctcttctttttttatcggcgatagcggaatacctttggaagttatagccggctctgttagtgcagatgaacttgtgaccagaatccacaaggtcaggcagatgcacctgctcaaaagtgaaaccagcgtggccaacggatcacagtccgaatcttccgtttcaacacctagcgcaagctttgagcctaataacacctgcgaaaacagtcaatcccgcaacgcagagctatgcgaaattccaccaacctctgataccaagtccgacaccgctacagggggagaaagtgccggacatgccacatcttcccaagagccttctggttgctccgatcagcggcctgccgaggatctcaatatccgtgtcgagaggctcacgaaaaagttggaagaaaggagggaagaaaagcgtaaggaagaagaacagcgggagatcaagaaggagattgagcgacgaaaaactggaaaagagatgctggactacaaaaggaagcaggaggaggaactcaccaagcgaatgcttgaagaacgcaaccgggagaaggctgaagatagagcagctagagagagaataaaacaacagatcgcccttgaccgcgccgagcgagcggcccgcttcgccaaaaccaaagaagaggtcgaggcagccaaggccgcggccctgctggccaagcaagccgaaatggaagtaaaaagagagagctatgcaagggaaaggtccacagtagcccggatccagtttaggcttccggacgggagctctttcactaatcagttcccctccgacgctccgctggaggaagcgcgtcagtttgccgcgcagactgtaggtaacacttatggtaacttctccctggccacaatgtttcctcgccgcgaatttactaaagaggattacaagaagaaactcctggacctcgaactggcgccgtctgcatccgtcgtacttctcccggccggtcggcctacggcctctatcgtgcacagctcctccggggacatctggacactgcttggtactgttctttacccgtttctggcaatctggcgcctaatatctaacttcctcttttccaatcccccccccacccagacttctgtgagggtcaccagctccgaaccacctaatccagcttcttcctcgaagtccgaaaaacgagagcccgttcgtaagagagtcctcgagaagcgaggcgacgattttaaaaaggaaggaaagatttatcggcttcggacccaggatgatggagaggacgagaacaacacctggaatggcaacagcacgcagcagatgtag

SEQ ID NO: 181072 - DNA, 1473 bp, Artificial Sequence
  derived and/or modified sequence
atgctgtggttccagggcgccatccccgccgccatcgccaccgccaaacgctctggcgccgtgtttgttgttttcgtcgccggcgacgatgagcagtccacccagatggcagcatcctgggaagatgacaaggtcacggaagctagtagcaatagcttcgtggcaataaaaattgatactaagtcagaggcttgtctgcagttctctcagatctatccagtggtgtgcgtaccctctagtttttttataggtgacagcgggatccctctagaggtgatcgcaggctccgtcagtgctgacgaactggttacccggatccataaggtgcgccagatgcatctccttaagactgcttcatttgaaccaaataacacgtgtgaaaactcacagagtcgaaatgctgaactgtgcgagatccctccgacaagcgatacaaagagcgacacggcaaccggcggcgaatctgccggccacgctacaagttcacaagagccttcagggtgtagcgaccaacggcctgccgaagacctcaatattcgcgtcgagagactcacaaagaagttggaagagagaagggaggaaaaacgcaaggaggaagagcaacgggagatcaaaaaggagattgaaagacgcaaaaccggcaaagagatgctggattacaaacggaaacaggaagaggaactcaccaaaagaatgttggaagagaggaacagagagaaagcagaagatagagccgcccgagaaaggataaagcagcagattgcacttgaccgggcagaacgggctgctcgcttcgcaaagactaaggaggaagtggaggcagcgaaggccgcggcgctgctcgctaaacaggcagaaatggaggtgaaacgcgagagttatgctagggagcgcagcaccgtcgctcggatccagttccgcctccctgacgggagttctttcactaatcagttcccatcagatgctcccctggaggaggcccgccagtttgccgcgcaaactgtcgggaacacttacggcaacttttcgttagccacaatgttcccaagaagagaattcaccaaggaagattacaagaagaagttgctggacttggagctagctccctcagcatcagtcgtacttctaccggctggccggcccacagcctctatcgttcatagcagtagtggtgatatttggaccttactgggaactgtgctttaccccttcttggccatctggcggttgatcagtaacttcctctttagcaaccctcccccaactcagacctcagtaagggtgactagctccgagcctccgaaccctgccagcagcagtaagagcgagaaacgtgagccggtaagaaaaagagttctggaaaagaggggagacgacttcaagaaagagggcaagatctaccggcttagaacacaggatgacggtgaggatgagaacaacacatggaacgggaacagcacccaacagatgtag

SEQ ID NO: 181073 - DNA, 1527 bp, Artificial Sequence
  derived and/or modified sequence
atgctgtggtttcaaggagctattcctgccgcaatcgccacggcaaaaaggtccggcgctgtttttgtcgtgttcgtggcgggtgacgatgaacagagtactcaaatggccgcttcctgggaagacgataaagttaccgaggcatctagcaatagctttgtcgcaatcaagatcgatacaaagtctgaggcctgcctgcagttctcacaaatctatcctgtggtgtgcgtgccttcttccttctttataggcgactcaggcattcccttagaagttattgccggatctgtgagtgcagacgaactcgtcacgcgaatacataaggtgagacagatgcacttgctgaagtctgaaactagtgtggccaatggcagccaatccgagtcatcagttagtaccccttcggcgagtttcgaacctaacaatacatgtgaaaattcccaatcccgtaacgctgaactgtgtgagatccctccaacctccgataccaagagcgatacggcaaccggtggcgagagtgcgggtcatgcgaccagcagccaggagccatcgggatgtagcgaccagcggcctgcagaggaccttaatatccgcgtggagcggctgactaaaaaacttgaggaacggagagaggagaagaggaaagaagaggagcagcgtgagatcaagaaggagattgaacgccgtaagacgggaaaggagatgcttgattacaaacggaaacaagaggaagaattgacgaagcgcatgctcgaggaacgaaacagggaaaaagctgaggatcgggctgcacgagaaagaatcaagcagcagatcgctctagaccgcgctgaaagagctgcaaggttcgccaagaccaaggaggaggtggaggccgctaaggctgccgctttattggccaaacaggctgagatggaggtgaaacgagagagttatgcgagagagcgctccacagtagcccgtatacagttccgacttcctgatggatctagttttaccaatcagtttcctagtgatgccccattggaagaggcgaggcaattcgctgcccaaacagttggcaatacgtatggaaatttttcccttgccactatgttcccaaggagagagttcacaaaggaggactacaaaaaaaaattgttggacctggaactggctccaagcgcttcagtggtcctgctccccgcaggccgtccaacagctagcatagttcattccagtagtggagacatttggactctcctgggcacggtcttgtacccttttttagccatctggagactgatctccaattttctcttttcgaatcctccgcctacccagactagcgtgagggtgacctcttccgagcctcccaaccctgcgagctctagcaagagcgagaagcgtgagcccgtgaggaaaagggtcctggaaaaacgcggagatgatttcaagaaagaaggtaagatttaccgcctccgcacgcaggatgacggagaggatgagaacaatacctggaatggcaactcgactcagcaaatgtag

SEQ ID NO: 181074 - DNA, 1473 bp, Artificial Sequence
  derived and/or modified sequence
atgctttggttccagggcgcaattcccgctgctatcgccacggctaagaggagcggtgcggtatttgtcgtgttcgtggcgggtgacgacgagcaatcgacccaaatggccgcttcctgggaagacgataaggtcacggaggcgagtagcaactcttttgtcgcgattaaaattgacacaaagtccgaagcctgtcttcaattcagccagatttatcccgttgtgtgcgtcccgtcatcctttttcatcggggattcaggcatcccactggaggtgatcgcagggagcgtctcagccgacgagcttgtgactagaatacataaagtccgccaaatgcacctcttgaaaacagccagctttgagcctaataatacttgcgagaattctcagtctcggaacgcagaactgtgcgagattccccctacaagtgatactaaatccgacaccgcgaccgggggagagtcagctgggcatgccacttcgtctcaagaaccttctggatgcagcgaccagcggccagcagaagatctgaacatccgcgtggagagactcactaagaagctggaagagcgacgagaggagaagcggaaggaggaagaacaaagggagattaagaaggaaatcgagcgtagaaagacgggaaaggagatgctggactataaacgaaagcaggaagaggagctgactaagagaatgctcgaggaacgtaatcgcgagaaggccgaagacagagcagcgagagagcggattaagcaacaaatagcactggatcgagcggagcgtgctgccagattcgccaaaactaaagaggaagtggaagctgccaaagcggctgccctgctagctaaacaagcggagatggaagtgaagcgagagagctacgctcgcgagagatcaacagtggctagaattcaatttagactgccagacggcagttccttcactaatcagttccctagtgacgccccattggaagaagcacggcagtttgcagctcagacagtggggaacacgtacggcaatttttcactagcaacaatgtttccaagaagagaattcacaaaagaggattacaaaaagaagctgcttgaccttgaacttgctccatcggcgtctgtggtcctgttgccggcaggacgaccaacagctagcattgtgcactcctcgagcggcgatatctggactctgctggggacagtcctgtacccgtttcttgctatatggcggttaatttcaaatttcttgttctctaatccaccgcctacacagacctctgttagggttactagttcagagccgcctaacccagcaagctcaagcaaaagcgaaaaacgcgagcccgtgcgcaagcgtgtgcttgaaaaacggggtgacgatttcaaaaaggaaggcaaaatctaccggctacgtacacaggacgacggagaagacgaaaataacacctggaatgggaactcgacacaacagatgtag

SEQ ID NO: 181075 - DNA, 4006 bp, Artificial Sequence
  derived and/or modified sequence
ttcctccacttcctggactgcgcgaccggaggcctagcgggcgcgcgcccgcaccatcgactcgccaacgagagaaggtcctggggcacggacaccgacgggttgcgactgtgacgtgaggtgttctcgcgcgcgctagcgcgcgtctccgggtgccgctgacgggcgtgcgcgcttgtgcggagccggaggtgggggccgaaccagccaaggttgcgggggccgcagagccggacgaagacggagggcggagccggcttcgggactgcggagactacacaccgagcgagcgcctgggcccgaagggagcgatgctgtggttccagggcgccattccggccgccatcgcgacggccaaaaggagcggcgcggtcttcgtggtgttcgtggcaggtgatgatgaacagtctacacagatggctgcaagttgggaagatgataaagttacagaagcatcttcaaacagttttgttgctattaaaatcgataccaaaagtgaagcctgcctacagttttcacaaatctatcctgtagtgtgtgttccatccagtttctttattggagacagtggaattcccttggaagtaatagcaggaagtgtttctgcagatgaacttgttacaagaattcacaaggtccgacagatgcatttgctaaaaagtgaaacatcagtagcaaatggcagtcagtcagaaagttcagtgtctactccatctgcgtcatttgaacctaacaacacttgtgaaaactctcagtccagaaatgcagagctttgtgagataccacccacttctgatacaaagtcagatactgcaacaggaggagaaagtgcaggccatgccacttcctctcaggagcctagtggatgctcagatcagagacctgcagaggacctcaacatccgagtggaaagactaacaaaaaaacttgaagaaaggagagaagagaaaagaaaagaggaagaacagagagaaattaagaaggaaattgagaggagaaaaactggaaaagaaatgttggattataaaagaaaacaagaagaagaattaacaaaaagaatgctggaggaaagaaacagagagaaagcagaagatagggcagctcgagaacgtataaaacagcagattgcattggaccgtgcagagagagctgctcgttttgcaaagacaaaggaagaagtagaggctgccaaagctgctgccttgctagcaaaacaggcagaaatggaagtcaagagggaatcttatgcaagagaaagaagcactgttgcaagaattcaattccgtcttcctgatggttcttcctttacaaatcagttcccttctgatgctcctctagaagaggcaaggcagtttgctgcacagactgttggcaacacttacggtaatttttcgttagcaaccatgtttcccaggagggaatttaccaaagaagattataaaaagaagttactggatttggaacttgccccaagcgcttcggtggtactgttgccagcaggaagaccaactgcatccattgtacactcttccagcggagacatttggaccttgttgggaacagtgctttatccattccttgccatctggagattaattagcaatttcttgtttagtaatccgcctcccacacagacttcagtgagagtaacatcgtcagaacccccaaaccctgcatcatctagcaaatcagaaaaaagggaaccagtgagaaaaagagtgctggaaaaacgtggagacgactttaaaaaggaggggaaaatttatagattaaggactcaagatgatggtgaagatgaaaacaacacttggaatggaaattccactcaacagatgtagtgtgacaagtataatatgtgcaataatcattgtttctcttatgatttaattcaactaaaattctactggagaagtgggactgctttatattttccaactggtctataaaatgtctctttattcctgcttagtgggtgtgggttgaaggtgtttaactcagaaaagtaaagacaggaaataactctctgctaggtccttgcttatatggcaaccactgctagaaccctaaaagaaccaaaaatctgccacagcctgcctccatcagcttcttatttagtatttcatatgcccattagccctatgcttcagatgacacgttttgtttagagctactttgctccaagactcttaagcccaaagtaactggtatgtcactgagtaacttgactcggtgtcagagcattttaactagccactcagatgagaatttatgtttaacttctctttttactcatcagctgcaagcaaaatcttgtagtttttaatcttaaacactgaataaaaaaactttcccctaaattggaatgatcttagttttgctttgagttttgttatctagcatctttttgttgcacagggctctattgaggtcctatgtctctgatttttttttttccccagtattgccctggagctgtctctggaaagtagctggcgaggttaccttaactatcactgaagaaagaaattttctgacacactgatggcatgtgacttgtctcctaagtcagtgaggcatcactttgtttgcataaagtatacggtttgttaaggcctttgttcttgtgagatgcaaaacagctgctagtctgcaacctagttttccctctcacctttaactgacgttttgtcctcaataattacacaaggacctagagtacctataggacaaaaagtatagaataaaaatatgcctttagtcatttggtttttcttaaaaagttgagattcttaatctgacttacatgttactttatccgtatgtctttgttagtggagaccgctaaactaatgatgtttgaaaacagttcctctgttttagattggaagatagcactctagagtggacatacggaaagactgtgactttattttgtaatgggaggaagaaattttctcagagcaaactttctattttttacctgtgaaataacagtgactttttaaaatggtgacagtgttggcaaggaaacagcaacacaggctgcgctgttggtaggagtgaaaaccagtataattcttctgaaaaacatttatcagaaacttaaaatatttcataccgtttgatccagtagcttcttctaaatcataaatgcagacaatgtttaggtaaagacatactcattaagtgttatttattttactcaagaactggaaaccaactaaatgccttctatagaagtaatttttgatgaggagaaatggtacaatactaattaacaacttggtttaacatgtttactgagcatctgttaagtgttgggggaaaaagcagcaggatccagagctataggtacagtgtgatctcagctttgcaaacacattttctacatagatagtactaggtattaatagatatgtaaagaaagaaatcacaccattaataatggtaagattggtttatgtgattttagtggtatttttggcacccttatatatgttttccaaactttcagcagtgatattatttccataacttaaaaagtgagtttgaaaaagaaaatctccagcaagcatctcatttaaataaaggtttgtcatctttaaaaatacagcaatatgtgactttttaaaaaagctgtcaaataggtgtgaccctactaataattattagaaatacatttaaaaacatcgagtacctcaagtcagtttgccttgaaaaatatcaaatataactcttagagaaatgtacataaaagaatgcttcgtaattttggagtaggaggttccctcctcaattttgtatttttaaaagtacatggtaaaaaaaaaaattcacaacagtatataaggctgtaaaatgagaattctgccccctcacctcttaccccagtactattctccagaggtaatctattaacaatttcttatgtaattttcagaaaatttgtatgcgtatataagcaaatatgtaatctttattttttaaataaatgggatcatattat

SEQ ID NO: 181076 - DNA, 3960 bp, Artificial Sequence
  derived and/or modified sequence
ttcctccacttcctggactgcgcgaccggaggcctagcgggcgcgcgcccgcaccatcgactcgccaacgagagaaggtcctggggcacggacaccgacgggttgcgactgtgacgtgaggtgttctcgcgcgcgctagcgcgcgtctccgggtgccgctgacgggcgtgcgcgcttgtgcggagccggaggtgggggccgaaccagccaaggttgcgggggccgcagagccggacgaagacggagggcggagccggcttcgggactgcggagactacacaccgagcgagcgcctgggcccgaagggagcgatgctgtggttccagggcgccattccggccgccatcgcgacggccaaaaggagcggcgcggtcttcgtggtgttcgtggcaggtgatgatgaacagtctacacagatggctgcaagttgggaagatgataaagttacagaagcatcttcaaacagttttgttgctattaaaatcgataccaaaagtgaagcctgcctacagttttcacaaatctatcctgtagtgtgtgttccatccagtttctttattggagacagtggaattcccttggaagtaatagcaggaagtgtttctgcagatgaacttgttacaagaattcacaaggtccgacagatgcatttgctaaaaactgcgtcatttgaacctaacaacacttgtgaaaactctcagtccagaaatgcagagctttgtgagataccacccacttctgatacaaagtcagatactgcaacaggaggagaaagtgcaggccatgccacttcctctcaggagcctagtggatgctcagatcagagacctgcagaggacctcaacatccgagtggaaagactaacaaaaaaacttgaagaaaggagagaagagaaaagaaaagaggaagaacagagagaaattaagaaggaaattgagaggagaaaaactggaaaagaaatgttggattataaaagaaaacaagaagaagaattaacaaaaagaatgctggaggaaagaaacagagagaaagcagaagatagggcagctcgagaacgtataaaacagcagattgcattggaccgtgcagagagagctgctcgttttgcaaagacaaaggaagaagtagaggctgccaaagctgctgccttgctagcaaaacaggcagaaatggaagtcaagagggaatcttatgcaagagaaagaagcactgttgcaagaattcaattccgtcttcctgatggttcttcctttacaaatcagttcccttctgatgctcctctagaagaggcaaggcagtttgctgcacagactgttggcaacacttacggtaatttttcgttagcaaccatgtttcccaggagggaatttaccaaagaagattataaaaagaagttactggatttggaacttgccccaagcgcttcggtggtactgttgccagcaggaagaccaactgcatccattgtacactcttccagcggagacatttggaccttgttgggaacagtgctttatccattccttgccatctggagattaattagcaatttcttgtttagtaatccgcctcccacacagacttcagtgagagtaacatcgtcagaacccccaaaccctgcatcatctagcaaatcagaaaaaagggaaccagtgagaaaaagagtgctggaaaaacgtggagacgactttaaaaaggaggggaaaatttatagattaaggactcaagatgatggtgaagatgaaaacaacacttggaatggaaattccactcaacagatgtagtgtgacaagtataatatgtgcaataatcattgtttctcttatgatttaattcaactaaaattctactggagaagtgggactgctttatattttccaactggtctataaaatgtctctttattcctgcttagtgggtgtgggttgaaggtgtttaactcagaaaagtaaagacaggaaataactctctgctaggtccttgcttatatggcaaccactgctagaaccctaaaagaaccaaaaatctgccacagcctgcctccatcagcttcttatttagtatttcatatgcccattagccctatgcttcagatgacacgttttgtttagagctactttgctccaagactcttaagcccaaagtaactggtatgtcactgagtaacttgactcggtgtcagagcattttaactagccactcagatgagaatttatgtttaacttctctttttactcatcagctgcaagcaaaatcttgtagtttttaatcttaaacactgaataaaaaaactttcccctaaattggaatgatcttagttttgctttgagttttgttatctagcatctttttgttgcacagggctctattgaggtcctatgtctctgatttttttttttccccagtattgccctggagctgtctctggaaagtagctggcgaggttaccttaactatcactgaagaaagaaattttctgacacactgatggcatgtgacttgtctcctaagtcagtgaggcatcactttgtttgcataaagtatacggtttgttaaggcctttgttcttgtgagatgcaaaacagctgctagtctgcaacctagttttccctctcacctttaactgacgttttgtcctcaataattacacaaggacctagagtacctataggacaaaaagtatagaataaaaatatgcctttagtcatttggtttttcttaaaaagttgagattcttaatctgacttacatgttactttatccgtatgtctttgttagtggagaccgctaaactaatgatgtttgaaaacagttcctctgttttagattggaagatagcactctagagtggacatacggaaagactgtgactttattttgtaatgggaggaagaaattttctcagagcaaactttctattttttacctgtgaaataacagtgactttttaaaatggtgacagtgttggcaaggaaacagcaacacaggctgcgctgttggtaggagtgaaaaccagtataattcttctgaaaaacatttatcagaaacttaaaatatttcataccgtttgatccagtagcttcttctaaatcataaatgcagacaatgtttaggtaaagacatactcattaagtgttatttattttactcaagaactggaaaccaactaaatgccttctatagaagtaatttttgatgaggagaaatggtacaatactaattaacaacttggtttaacatgtttactgagcatctgttaagtgttgggggaaaaagcagcaggatccagagctataggtacagtgtgatctcagctttgcaaacacattttctacatagatagtactaggtattaatagatatgtaaagaaagaaatcacaccattaataatggtaagattggtttatgtgattttagtggtatttttggcacccttatatatgttttccaaactttcagcagtgatattatttccataacttaaaaagtgagtttgaaaaagaaaatctccagcaagcatctcatttaaataaaggtttgtcatctttaaaaatacagcaatatgtgactttttaaaaaagctgtcaaataggtgtgaccctactaataattattagaaatacatttaaaaacatcgagtacctcaagtcagtttgccttgaaaaatatcaaatataactcttagagaaatgtacataaaagaatgcttcgtaattttggagtaggaggttccctcctcaattttgtatttttaaaagtacatggtaaaaaaaaaaattcacaacagtatataaggctgtaaaatgagaattctgccccctcacctcttaccccagtactattctccagaggtaatctattaacaatttcttatgtaattttcagaaaatttgtatgcgtatataagcaaatatgtaatctttattttttaaataaatgggatcatattatatattcta

SEQ ID NO: 181077 - protein, 445 aa, Artificial Sequence
  derived and/or modified sequence
MAAPEERDLTQEQTEKLLQFQDLTGIESMDQCRHTLEQHNWNIEAAVQDRLNEQEGVPSVFNPPPSRPLQVNTADHRIYSYVVSRPQPRGLLGWGYYLIMLPFRFTYYTILDIFRFALRFIRPDPRSRVTDPVGDIVSFMHSFEEKYGRAHPVFYQGTYSQALNDAKRELRFLLVYLHGDDHQDSDEFCRNTLCAPEVISLINTRMLFWACSTNKPEGYRVSQALRENTYPFLAMIMLKDRRMTVVGRLEGLIQPDDLINQLTFIMDANQTYLVSERLEREERNQTQVLRQQQDEAYLASLRADQEKERKKREERERKRRKEEEVQQQKLAEERRRQNLQEEKERKLECLPPEPSPDDPESVKIIFKLPNDSRVERRFHFSQSLTVIHDFLFSLKESPEKFQIEANFPRRVLPCIPSEEWPNPPTLQEAGLSHTEVLFVQDLTDE

SEQ ID NO: 181078 - protein, 212 aa, Artificial Sequence [sequence omitted]

SEQ ID NO: 181079 - DNA, 1338 bp, Artificial Sequence
  derived and/or modified sequence
atggccgcaccagaggagcgtgatttgacccaagaacagaccgagaaactgctgcaattccaggatctgacaggcatagagtctatggaccaatgcaggcataccttagagcagcataactggaacatcgaagctgccgttcaggatcgcctgaacgaacaggagggtgtcccatctgtgttcaacccgccacccagtagacctctgcaggtgaacactgctgaccaccgaatatattcatatgtggtgagccggccacagcctagaggcctgctgggttggggttactatctcatcatgttgcccttcagattcacctattacactattctggacattttccggttcgccctgagatttatccggccggatcctagatcccgggtcaccgatcctgtgggggatatagtgtccttcatgcacagctttgaggagaagtatggacgtgcacaccccgtgttctatcagggtacttactcccaggccctgaacgacgcaaagagggagctgaggtttctactcgtttatctgcatggcgatgaccaccaggattctgatgagttttgcaggaataccctgtgtgccccagaagttatttcgctcatcaatacgagaatgctcttctgggcatgcagtacaaacaaaccagaagggtatagagttagccaagcactgcgagaaaatacatacccattcctggccatgatcatgctgaaagatagaaggatgaccgtggtgggccgactggagggcctgatccaacccgacgatctgatcaaccagctgaccttcatcatggatgccaatcagacttacctcgtgagcgaaaggcttgagcgggaagagaggaaccaaacgcaggtgctgaggcagcagcaagacgaagcatatcttgcaagcctgcgcgccgatcaagagaaggagcggaagaagagagaggagcgagagcgaaagaggcggaaggaagaggaggtgcaacagcagaagctcgccgaggagcgcaggagacagaatctgcaggaagaaaaagaaagaaaactggagtgcctgcctcctgagccctcaccagacgatccagaaagcgtgaagattatcttcaagctgcccaatgacagccgggtggagagaaggttccacttttcccagtcactcacagtgatccacgatttcttgttcagcctcaaggagtctccagaaaagtttcagattgaggcaaattttccccggcgggtgttgccgtgtatccccagtgaggaatggcccaacccgcccacattacaagaggcaggtctatcccatacggaggttcttttcgtgcaagacctgactgatgagtag

SEQ ID NO: 181080 - DNA, 1338 bp, Artificial Sequence
  derived and/or modified sequence
atggccgcccctgaggagcgggacctgacccaggagcagacagagaagctgctgcagttccaggacctgaccggcatcgagagcatggaccagtgccgccacaccctggagcagcacaactggaacattgaagctgctgtgcaggaccggctgaatgagcaggagggcgtgcccagcgtcttcaaccccccacccagccggcccctgcaggtgaacacagctgaccaccgcatctacagctatgtggtgtcccggccccagccccggggcctgctgggctggggctactacctgatcatgctgcccttccgcttcacctactacaccatcctggacatcttccgctttgccctgcgcttcatccggccagaccccaggagccgggtgacagatcctgtgggggacatcgtgtccttcatgcacagctttgaggagaagtatggccgggcccaccctgtgttctaccagggcacctacagccaggccctgaatgatgccaagcgggagctgcgcttcctgctggtgtacctgcatggagatgaccaccaggacagtgatgagttctgcaggaacaccctgtgtgcccctgaggtgatcagcctcatcaacaccaggatgctgttctgggcctgcagcaccaacaagccagagggctacagagtgtcccaggccctgcgggagaacacctaccccttcctggccatgatcatgctgaaggacaggaggatgacagtggtgggccgcctggagggcctcatccagccagatgacctgatcaaccagctgaccttcatcatggatgccaaccagacctacctggtgtctgagcggctggagcgggaggagaggaaccagacccaggtgctgcggcagcagcaggatgaggcctacctggccagcctgcgggctgaccaggagaaggagaggaagaagcgggaggagcgggagaggaagaggaggaaggaggaggaggtgcagcagcagaagctggccgaggagcggcggcggcagaacctgcaggaggagaaggagaggaagctggagtgcctgcccccagagcccagcccagatgatcctgagagcgtgaagatcatcttcaagctgcccaatgacagccgggtggagcggcgcttccacttcagccagagcctgaccgtcatccatgacttcctgttcagcctgaaggagagccctgagaagttccagatcgaggccaacttccccaggagagtgctgccctgcatccccagcgaggagtggcccaacccccccaccctgcaggaggccggcctgagccacacagaggtgctgtttgtgcaggacctgacagatgaatag

SEQ ID NO: 181081 - DNA, 1338 bp, Artificial Sequence
  derived and/or modified sequence
atggccgcccccgaggagcgggacctgacccaggagcagaccgagaagcttctgcaattccaggatctcaccggtattgaatcaatggatcagtgccggcacacattggaacagcataattggaatatcgaagctgccgtacaagatcgactgaacgaacaggagggtgtgccaagcgtgttcaacccgccccccagcagaccccttcaggtgaatactgccgatcaccgtatttactcctatgtggtgagtcgtccacaacctaggggcctcttggggtggggttattacctgatcatgctgccctttaggttcacctattataccattctggacatatttagattcgccctgaggttcatacggccagatccaagaagccgcgtaacggacccagtgggcgatatcgtgagcttcatgcacagtttcgaagagaagtatgggagggcccacccggtattttaccaaggaacttattctcaggcattaaacgacgctaagcgcgaattgaggttcctacttgtgtacttacacggcgacgaccaccaggactcagacgaattctgccgtaacaccctttgtgcccccgaggtgatctctctaattaatactagaatgctattttgggcttgttcaaccaataagcctgaaggctaccgtgtgtcacaggctcttcgggagaacacctatccattcttggccatgatcatgttgaaagatcgtcgcatgactgtggtggggcggttggaaggactgattcagcccgacgatttaattaatcagttaacctttattatggatgccaatcagacatatttggtgagcgaacggctggaacgagaggagcggaaccagactcaggtgcttcgccaacagcaggacgaggcctacttagctagcttgagagctgatcaggagaaggaaaggaaaaagagggaggaacgtgaaagaaagcggcgaaaggaagaagaggtgcagcagcaaaaactggccgaggaacggagacgccagaatctacaggaggaaaaggaacgcaagctcgaatgtctaccgcctgagccctcaccagatgatcctgaaagtgtgaaaataatctttaaactacccaacgacagccgagtggaacggcggtttcactttagtcaatccttaacagtaatccacgattttctttttagccttaaagaatccccagaaaagtttcaaatagaggccaactttccaagaagagtgcttccgtgcattcccagcgaggagtggccaaatccccctacacttcaggaagcgggactgagtcatactgaagtgttgttcgtacaggacctaaccgatgagtag

SEQ ID NO: 181082 - DNA, 1338 bp, Artificial Sequence
  derived and/or modified sequence
atggccgcacccgaggagcgggatctcacacaggaacagacagagaagctcctgcagtttcaggacctgactggaattgagtcaatggaccagtgccgtcacacgctggagcagcataactggaacatagaagccgcagtgcaggaccggctcaatgagcaagagggcgttcccagtgtgttcaacccccctccttctagacccttgcaggtcaatacagctgatcacaggatctatagctatgtggtctccaggcctcagcctagagggttgctcggatggggttattatttgatcatgcttcccttccggtttacttattataccattttggatatattcagattcgcactgaggttcatacgcccagatcctaggtcaagagtgaccgatcctgttggagacatcgtttccttcatgcatagcttcgaggagaagtatggcagggcacatcctgtgttctatcaagggacttactcccaagcgctcaatgatgccaagcgggagctgaggtttcttctggtgtatctgcacggggacgaccaccaggactctgatgaattctgccggaatacactgtgcgccccagaggtcatcagcctcatcaacacccgaatgctgttctgggcgtgctccacaaacaaacccgagggctaccgggtgagccaggcccttagggagaacacctatccttttttggctatgattatgctcaaggaccgcagaatgactgtggtggggaggctggaggggctcattcagcctgatgacctcattaaccagttgactttcattatggacgcaaatcagacctatttggtcagcgagaggctggagagagaggagagaaatcagacgcaggtactgagacaacaacaagacgaagcctacctggcatcactccgggctgaccaggaaaaagaacggaagaaacgcgaggaaagggaacggaagcgacgaaaggaagaggaggtgcagcaacagaagctggctgaagagaggcggagacagaacctgcaggaggagaaggaacgcaaacttgaatgtctgccacctgaaccttcccccgatgatccagagagtgtaaagatcattttcaaattgccaaacgatagccgggtggagcggagatttcatttctctcagtccctcacggtcatccacgattttctattctctttaaaggaaagtccagaaaaattccagatcgaagccaattttcctcgacgtgtcctcccctgcatcccctcagaagagtggcccaatcccccaaccctccaggaagcgggtctgtcccacacagaggtcttgtttgtacaggatctgacagacgagtag

SEQ ID NO: 181083 - DNA, 4515 bp, Artificial Sequence
  derived and/or modified sequence
agttccggcgggtgacggtgcggacgggtcaggagcgtagaggcggcggcaaaatggcggcgcctgaggagcgggatctaacccaggagcagacagagaagctgctgcagtttcaggatctcactggcatcgaatctatggatcagtgtcgccataccttggaacagcataactggaacatagaggctgctgtacaggacagattgaatgagcaagagggcgtacctagtgttttcaacccacctccatcacgacccctgcaggttaatacagctgaccacaggatctacagctatgttgtctcaagacctcaaccaagggggctgcttggatggggttattacttgataatgcttccattccggtttacctattacacgatacttgatatatttaggtttgctcttcgttttatacggcctgaccctcgcagccgggtcactgaccccgttggggacattgtttcatttatgcactcttttgaagagaaatatgggagggcacaccctgtcttctaccagggaacgtacagccaggcacttaacgatgccaaaagggagcttcgctttcttttggtttatcttcatggagatgatcaccaggactctgatgagttttgtcgcaacacactctgtgcacctgaagttatttcactaataaacactaggatgctcttctgggcatgctctacaaacaaacctgagggatacagggtctcacaggctttacgagagaacacctatccattcctggccatgattatgctgaaggatcgaaggatgactgtggtgggacggctagaaggcctcattcaacctgatgacctcattaaccaactgacatttatcatggatgctaaccagacttacctggtgtcagaacgcctagaaagggaagaaagaaaccagacccaagtgctgagacaacagcaggatgaggcctacctggcctctctcagagctgaccaggagaaagaaagaaagaaacgggaggagcgggagcgtaagcggcggaaggaggaggaggtgcaacagcaaaagttggcagaggagagacggcggcagaatttacaggaggaaaaggaaaggaagttggaatgcctgccccctgaaccttcccctgatgaccctgaaagtgtcaagatcatcttcaaattacctaatgattctcgagtagagagacgattccacttttcacagtctctaacagtaatccacgacttcttattctccttgaaggaaagcccagaaaagtttcagattgaagccaattttcccaggcgagtgctgccctgcatcccttcagaggagtggcccaatccccctacgctacaggaggccggactcagccacacagaagttctttttgttcaggacctaactgacgaatgacatttttttcttcctgtcccctcctaccccagtccctaaaagaaatggggaaaaaagaaaacaacagcaagtcagaaaaaaaaaacaagagagagaaattcatattattattattattataatacaatattttttttaaaagactgctgcatccttaggaaggatcagaaaccatgctgcccgtaagagtcacaacctgtgtgtgcgcgcaaggttagcaacaaacgtacccgcttggcaagcccacccttcctgtggcctctgtgcacgcaccttccagtgaacagagactcttcaccttcgacccatccattgtcccagctgggaaggggacattcccactagttctcattcattcttgcttttatgaaaaataaaagtgaaaaacctccatcaaccagctacttgcagcatctcctgaggacttgcttctcctgcctctggggaagagagggaagagaaagcacagagcagagaagcagagatgttccttgaactgcccacaagttttcaataacttttatttctgttttgtaatgaccaaaggaatgaggctgacataggtatatatatatatttttttcctttatttgataaagagccaattctttaaacccatgagtttatgccctgggctccttagcccacaatagtgtaataaaagtgccccgggctggtttgtgcttatttctgccattgtccctctcacgttcccagagaggtcattctttttggtccaactcttgctgtcctttcttaccacctgtgcaccccacttggagcagtgggaggaaatctgggtttgtggccccacaaaggctgtatatgtaaagatacacctatgtatgtggtggaactcacctttacacacaactgcagcttttccttggagtctgtaccaggtggtggttatggggtctgaaccaaaggatagcagctcttcattcctcttctgacatgtgcatgctgctccccccagccctgggctttcctgaattgccaagcctggtgcctttccaaaggactagcagggcctgtggtggagccagcagaaccacaggagagtgccctgcctgtctcagtggaagtgtattattgttttaaggatagaaccagaggccttgaagggagccaagacagaactcccagcctgtgtaatctattggaaggcacattttcatttctgatgcagccaccttctggaggcagcttttatcctttctctctattgctatgttgaagtaatagggttttttttaacctctggatgtctcgtctgtggttgagtttatggtaatgggtacatgggtcaggccatgtattaacagatgccagtgcgctctgacaagtattccaaagtgttctgtagctagactggtgcaggctcgttgtaccactgcaaccgactgacgttactgtagttcctagaatgctgtgagggcggggggttcagatcaacataaagcctaacttgctggagttgtagtctcaaggctttctctcttgcttaactaaaacctaaggaccactgtttttggtagcaattatatggttactatccactgcagtcctcagttgttggggtaaatcccacatggcagagtaaggcaccccacagaaattaacttggagagcctgagaaattcccagtggccttggcatagctgtctagaacaccatctctaggaaaatttaattctgtccctggccagctattgttcttccacttcgttttctgctgtcccaaggccagatgagtggaatcaccatctgactgctgtcaataaaatgtatctggcgtgaacagcaggataacccatgttctccacataaggataaccttacgtgaaaccttcctgctgacaaccatgcagaggaatttttccacttaagtcagagccttcctccccatctggaattcacagctgttccctggcagcacacaggagggtattaaggacctttgtgaggctaggtacactgtccacacctctttggggaagttacgattttttttttccatcataattcagtctcttcttattctacagtgtgcactttatgcctctcgccttttgataatagttgttcagtgaaggaagtcagctgccagaatattaagaagggtctccctttatgtcagtacaactgttagggcggccttcccatttactttaggtttcaagaggattcaccggaagcacatgccccggtctagtcccatttgaaacagttctgctttactgagaccctaggccggtctccttgctgaccctagcgctgctgcctaggtgccatttcctttcctcctcagtcaaatacaggctgcacattttgtcacttaatgccagtacaatctgtgttactcctaaggacttttgggattttgatgagacctgcgagggagaagacactgagaagccagtgatctgcaagcatttgctcttgtttccacatcacctctgggatatttcagctgttgtttccaaatggcaaatcatcaactaaaagcacttgtttcaagttttgttctgcactcccacgactgaagttgtagattgagctgaataaccatgggaagtgaccaagcaaagacactcgattggagtcagttgaatatttgtaccctcagtggagcccttctggtcttttcttccacttctgcagaatttcctctagcaaatacttctttctccttgcttgcctccaccatgatatttgaataagagatggccagaggataacacttgtctcttaaaaactaagctaaaaagaacctagaaccttcaattgagcagttgtgaaaattgctaatggtgccaaggccaagcaaagagtttcagaaaatgactgagaaggagcgataacccccagaatgcaaaatcaggggcatcattatccggtgcttgaacaaggagctccgctctacaactggtttttttaggacttgtgaggaacacagcaacggaaatccatccacaaaggatgcagtgccccaacttgtactgcgcctgaatagtcatgtgataatttactgaagaaatctagtgtactttaaatttttttcataaaagtttacattgtattgtaggttaacattaaatgttttatagcaaaaacttca

SEQ ID NO: 181084 - DNA, 1338 bp, Artificial Sequence
  derived and/or modified sequence
atggccgcccccgaggagagagacctgacccaggagcagaccgagaagctgctgcagttccaggacctgaccggcatcgagagcatggaccagtgcagacacaccctggagcagcacaactggaacatcgaggccgccgtgcaggacagactgaacgagcaggagggcgtgcccagcgtgttcaaccccccccccagcagacccctgcaggtgaacaccgccgaccacagaatctacagctacgtggtgagcagaccccagcccagaggcctgctgggctggggctactacctgatcatgctgcccttcagattcacctactacaccatcctggacatcttcagattcgccctgagattcatcagacccgaccccagaagcagagtgaccgaccccgtgggcgacatcgtgagcttcatgcacagcttcgaggagaagtacggcagagcccaccccgtgttctaccagggcacctacagccaggccctgaacgacgccaagagagagctgagattcctgctggtgtacctgcacggcgacgaccaccaggacagcgacgagttctgcagaaacaccctgtgcgcccccgaggtgatcagcctgatcaacaccagaatgctgttctgggcctgcagcaccaacaagcccgagggctacagagtgagccaggccctgagagagaacacctaccccttcctggccatgatcatgctgaaggacagaagaatgaccgtggtgggcagactggagggcctgatccagcccgacgacctgatcaaccagctgaccttcatcatggacgccaaccagacctacctggtgagcgagagactggagagagaggagagaaaccagacccaggtgctgagacagcagcaggacgaggcctacctggccagcctgagagccgaccaggagaaggagagaaagaagagagaggagagagagagaaagagaagaaaggaggaggaggtgcagcagcagaagctggccgaggagagaagaagacagaacctgcaggaggagaaggagagaaagctggagtgcctgccccccgagcccagccccgacgaccccgagagcgtgaagatcatcttcaagctgcccaacgacagcagagtggagagaagattccacttcagccagagcctgaccgtgatccacgacttcctgttcagcctgaaggagagccccgagaagttccagatcgaggccaacttccccagaagagtgctgccctgcatccccagcgaggagtggcccaacccccccaccctgcaggaggccggcctgagccacaccgaggtgctgttcgtgcaggacctgaccgacgagtag

SEQ ID NO: 181085 - protein, 1843 aa, Artificial Sequence
  derived and/or modified sequence
MEPAERAGVGEPPEPGGRPEPGPRGFVPQKEIVYNKLLPYAERLDAESDLQLAQIKCNLGRAVQLQELWPGGLFWTRKLSTYIRLYGRKFSKEDHVLFIKLLYELVSIPKLEISMMQGFARLLINLLKKKELLSRADLELPWRPLYDMVERILYSKTEHLGLNWFPNSVENILKTLVKSCRPYFPADATAEMLEEWRPLMCPFDVTMQKAITYFEIFLPTSLPPELHHKGFKLWFDELIGLWVSVQNLPQWEGQLVNLFARLATDNIGYIDWDPYVPKIFTRILRSLNLPVGSSQVLVPRFLTNAYDIGHAVIWITAMMGGPSKLVQKHLAGLFNSITSFYHPSNNGRWLNKLMKLLQRLPNSVVRRLHRERYKKPSWLTPVPDSHKLTDQDVTDFVQCIIQPVLLAMFSKTGSLEAAQALQNLALMRPELVIPPVLERTYPALETLTEPHQLTATLSCVIGVARSLVSGGRWFPEGPTHMLPLLMRALPGVDPNDFSKCMITFQFIATFSTLVPLVDCSSVLQERNDLTEVERELCSATAEFEDFVLQFMDRCFGLIESSTLEQTREETETEKMTHLESLVELGLSSTFSTILTQCSKEIFMVALQKVFNFSTSHIFETRVAGRMVADMCRAAVKCCPEESLKLFVPHCCSVITQLTMNDDVLNDEELDKELLWNLQLLSEITRVDGRKLLLYREQLVKILQRTLHLTCKQGYTLSCNLLHHLLRSTTLIYPTEYCSVPGGFDKPPSEYFPIKDWGKPGDLWNLGIQWHVPSSEEVSFAFYLLDSFLQPELVKLQHCGDGKLEMSRDDILQSLTIVHNCLIGSGNLLPPLKGEPVTNLVPSMVSLEETKLYTGLEYDLSRENHREVIATVIRKLLNHILDNSEDDTKSLFLIIKIIGDLLQFQGSHKHEFDSRWKSFNLVKKSMENRLHGKKQHIRALLIDRVMLQHELRTLTVEGCEYKKIHQDMIRDLLRLSTSSYSQVRNKAQQTFFAALGAYNFCCRDIIPLVLEFLRPDRQGVTQQQFKGALYCLLGNHSGVCLANLHDWDCIVQTWPAIVSSGLSQAMSLEKPSIVRLFDDLAEKIHRQYETIGLDFTIPKSCVEIAELLQQSKNPSINQILLSPEKIKEGIKRQQEKNADALRNYENLVDTLLDGVEQRNLPWKFEHIGIGLLSLLLRDDRVLPLRAIRFFVENLNHDAIVVRKMAISAVAGILKQLKRTHKKLTINPCEISGCPKPTQIIAGDRPDNHWLHYDSKTIPRTKKEWESSCFVEKTHWGYYTWPKNMVVYAGVEEQPKLGRSREDMTEAEQIIFDHFSDPKFVEQLITFLSLEDRKGKDKFNPRRFCLFKGIFRNFDDAFLPVLKPHLEHLVADSHESTQRCVAEIIAGLIRGSKHWTFEKVEKLWELLCPLLRTALSNITVETYNDWGACIATSCESRDPRKLHWLFELLLESPLSGEGGSFVDACRLYVLQGGLAQQEWRVPELLHRLLKYLEPKLTQVYKNVRERIGSVLTYIFMIDVSLPNTTPTISPHVPEFTARILEKLKPLMDVDEEIQNHVMEENGIGEEDERTQGIKLLKTILKWLMASAGRSFSTAVTEQLQLLPLFFKIAPVENDNSYDELKRDAKLCLSLMSQGLLYPHQVPLVLQVLKQTARSSSWHARYTVLTYLQTMVFYNLFIFLNNEDAVKDIRWLVISLLEDEQLEVREMAATTLSGLLQCNFLTMDSPMQIHFEQLCKTKLPKKRKRDPGSVGDTIPSAELVKRHAGVLGLGACVLSSPYDVPTWMPQLLMNLSAHLNDPQPIEMTVKKTLSNFRRTHHDNWQEHKQQFTDDQLLVLTDLLVSPCYYA

SEQ ID NO: 181086 - DNA, 5532 bp, Artificial Sequence
  derived and/or modified sequence
atggagcccgccgagcgcgcaggggttggagagccaccagaaccaggcggacgccctgaacccgggccacgcggatttgtcccacagaaggaaatagtttacaataaactgctcccttacgctgagagactcgacgccgagtccgatcttcagcttgcacagattaagtgcaatctgggccgagctgtccaacttcaagaactctggcccggtgggttgttctggactcgaaagctgagcacttatatcaggctttatggcaggaaattttccaaggaggatcacgtgctcttcataaaactcttgtacgagctggtctcgattcctaagctggagatctctatgatgcagggctttgctcggttgctgatcaacctgttaaaaaagaaggagctgctcagccgagcagaccttgaactgccttggcggcccctatatgacatggtcgagaggattctgtattccaaaaccgaacacctcggcttaaactggttccctaattcagtggagaatattctaaagacactcgttaaatcttgtcgaccatacttcccagccgatgctacggcagagatgctcgaagaatggcgaccactaatgtgtccatttgatgtgacaatgcagaaggctataacctacttcgaaattttcctgcccacctctttgcctcccgaactccaccataaggggttcaagctgtggttcgatgagctgattggcctgtgggtctccgtccaaaacttgccacagtgggaaggtcagctggttaacctgttcgcccgtttagccactgataatataggatacattgattgggacccgtacgtgcctaagatattcacgcgaattttgcggtcccttaatctgcccgtggggagtagccaggtcttggtgccacgtttcctaacaaacgcatacgacataggccacgctgtcatctggatcacggccatgatgggcggcccgagcaagttggtgcagaaacacctcgctggacttttcaattcaatcacctcattttaccatccctctaataacgggaggtggctaaataagctcatgaaattgctgcagcgactgccaaacagcgtggtgcggcgtttacacagggaacggtataaaaaaccctcctggctaacaccagtgcccgattcacacaagctgactgaccaggatgtgactgatttcgtgcagtgtattattcagccagtactcttggctatgttctccaagactggaagtctggaggcagcccaagccctgcagaacttggcactgatgagaccggaactggtgattcctcccgtgctcgagcgtacttatcccgccctcgagaccctgacagagcctcatcagctgaccgctaccttgtcctgcgtgataggggtggccaggagcctggtgtcaggcggacgctggtttcctgagggaccgacgcacatgctcccgctgcttatgagggccctaccaggagttgatccaaatgacttcagcaagtgtatgatcacttttcagtttatagctacatttagcactctcgtccctcttgttgattgtagcagcgtgctccaagagcggaatgatttaactgaggtggaacgagaactttgtagtgctaccgctgagttcgaagactttgtgttgcagttcatggacaggtgctttggacttattgagagcagtacactggaacaaaccagggaggaaacagagaccgagaagatgacccatctggagtctttagtcgagttagggctgagcagtacattctccactatcctcacgcaatgttctaaggaaatttttatggtcgccctgcagaaggtgtttaatttttctacgagccacatctttgaaactcgggtcgccgggcggatggtcgcggatatgtgccgggctgctgtaaagtgctgtccagaggagtcactgaagcttttcgtaccacattgttgtagtgttattacccagctaacaatgaacgacgatgttttaaatgatgaggaacttgataaagagctcttatggaacctccagctgctgtcagagattactcgtgtggacggtcgcaagctgctgctctaccgggaacagctggtgaagattctgcagcggacacttcacctgacatgcaagcagggctatacactatcatgcaatcttttgcatcatctgctcagaagtaccactctaatctatcctaccgagtactgtagcgtgcccggcgggtttgacaagcctccctcagagtattttcccataaaggattggggcaaaccgggcgatctttggaatcttggaatacaatggcacgtgcccagttctgaagaagtttcttttgctttttacctgctcgactctttcctgcagcccgaactcgtcaaactgcaacactgtggggacggcaagttggagatgagccgagatgacatcctgcagtccctcaccatcgtccataactgcttgatcgggtcaggaaaccttctgccaccactaaaaggagagcctgtgaccaacctggtcccaagtatggtcagcctcgaggagacaaagctctatacaggattggaatacgacctctccagggagaaccacagagaagtgatcgctaccgtaattcgaaaattactgaatcatatactggacaatagcgaggacgacaccaaatcactgtttttgattattaaaatcattggtgacctactgcaatttcagggaagtcacaaacacgaattcgattccaggtggaaatccttcaatctggtcaagaagtctatggagaaccggctgcatgggaagaaacagcacattcgtgcacttttgattgatcgggtgatgctacagcatgagcttagaaccctcacagtcgaaggctgtgaatacaagaaaatccaccaggatatgattcgcgacctcctgcgcctgagcactagtagttactcacaggttcggaacaaggctcagcagaccttcttcgcagccctgggtgcatataatttctgctgccgggacatcatacccttggtgttagaatttctgaggcctgaccgccaaggagtgacgcaacagcagtttaagggcgccctgtactgtctcctgggaaaccacagtggcgtatgcttagcgaatctccatgactgggactgtattgtacaaacgtggcccgccatcgtgagttcgggcctgtcccaagccatgagccttgagaaaccctccatcgtgcgactctttgacgacctggctgagaaaatccaccgccagtacgaaacaattgggctcgacttcactatcccaaagagttgcgttgagatcgccgagcttctgcaacagtccaagaaccctagtataaatcagattctcctctcccctgagaaaatcaaggaaggcatcaaacggcagcaggagaagaatgccgacgccttaagaaattacgaaaacctcgtggataccctgttggatggggtggaacagaggaatctgccctggaagttcgagcatataggaattgggctcctctcactcctcctgcgggacgatagggtactcccactaagggccattagattctttgtggaaaatttgaaccacgacgccattgtggtgcgcaaaatggccatttccgcagtggctggaattctaaagcaacttaaacgtacgcacaaaaaactgactataaatccttgtgagatatctggatgcccaaagcccacccagatcatcgcgggagatcgacccgacaaccactggctgcattacgattccaaaacaatcccccgaaccaagaaagagtgggagtcctcttgttttgtggagaagacgcactggggctattatacatggcccaaaaacatggtggtgtatgccggcgtggaagaacagcccaagctggggcgatctcgagaggacatgaccgaggcagaacagatcatcttcgaccacttttctgatcctaagttcgtcgagcagcttataaccttcctctccctggaggaccgcaagggcaaggacaaatttaatcccaggaggttctgtttgttcaaaggtatttttcgcaactttgatgatgcttttctccccgtgcttaagcctcacctggagcacctcgttgctgatagccacgagtccacacagcggtgtgttgcagagataattgccggccttattcgcgggtctaagcactggacatttgagaaagtcgagaaactctgggagctactatgccccctgctccgcactgctttgtccaatattactgtggagacatataacgactggggtgcctgcatagcaacttcttgcgaatcccgggatcccagaaaactgcattggctgttcgaactactgctggaatcacccctctcgggcgaagggggctcgttcgtggatgcatgtcgcctgtacgtgttgcagggggggctggcccagcaggaatggcgtgtgcccgaacttctgcatcggctcctgaaatatttggaacccaagctaactcaggtgtacaagaacgtgcgcgagcggattgggtcagtcctgacttatatctttatgattgacgtctccttgcccaacactaccccgactatttctcctcacgtcccggagttcacagcaaggatattggagaagctgaagccactgatggatgtggatgaagaaatacagaaccacgtgatggaggaaaatgggattggagaagaggatgagcgtactcaaggcattaagctgttgaagactatcttaaagtggctcatggcctccgccggaagaagtttttctactgctgtgactgagcaactccagcttctgcccctgttcttcaaaatcgcacctgttgaaaacgacaactcatacgacgagttaaagcgtgatgccaagctttgcttaagcctcatgagccagggactgctgtacccccatcaggttccgctggttctgcaggtgctgaaacaaacagctagaagttccagttggcatgctcgctacacggtgttaacgtaccttcagaccatggtattttataatctgtttatctttcttaacaatgaggacgctgttaaagacatccgctggcttgtaatatccctgctggaggatgaacagctagaggtcagggaaatggcagcgacaacgctgtctgggcttttgcagtgcaacttccttactatggacagcccgatgcaaatccactttgagcagctgtgcaagaccaaactcccaaaaaaacgcaaacgggatcctggctctgtgggtgacactatcccttcagccgagctcgtgaagcgacatgcgggggtgctgggcctgggagcctgtgtacttagcagcccctacgacgtcccaacgtggatgccccagcttttgatgaatttatcagctcaccttaatgatccacagccaatcgagatgacagtaaagaaaacattgtccaacttcaggagaacacaccatgacaactggcaggaacataagcagcaattcaccgacgaccaacttcttgtcttaaccgatcttctggttagtccctgctattatgcttag

SEQ ID NO: 181087 - DNA, 2964 bp, Artificial Sequence
  derived and/or modified sequence
atgggcgagaatttagcaaaaaaaatcatgttttttctgttgaccattaagctcatcctgaatcatatcctggataattctgaggacgatacgaagtctctttttctgatcattaaaatcatcggagatcttctgcaattccagggctcacacaagcacgaatttgactcccggtggaaatcttttaatctggtgaaaaaatccatggagaatagactgcatggcaagaagcaacacatccgcgcattactaattgaccgagtgatgctgcaacacgagcttcgcacgctgacagtagagggatgtgagtataaaaaaattcaccaggacatgataagagatctgcttcgcctgagtacttctagttacagtcaagtgcgtaataaggcccagcagactttctttgcagccttgggcgcatacaacttttgctgtagggatataattccactcgtcctcgaatttctgaggcctgatcggcagggtgtgacccagcaacagttcaagggtgctctgtattgtttgttaggtaatcacagcggagtatgcctggctaatctgcatgattgggattgtattgtccaaacttggccagccatcgtgtctagcggattgtcacaagcgatgtccttggagaaaccatctatcgttaggctcttcgatgacctcgcagaaaagatccaccggcagtacgagaccatcggcctagatttcacaattcccaaatcttgcgtagaaatcgccgagctgctgcagcagtctaagaatccttcaatcaaccagatcctgctatcccctgagaagatcaaggagggcataaagagacagcaggagaagaatgcagatgctcttcggaattacgagaacctggtggacacattactggacggtgtggaacagagaaatctgccatggaagtttgagcacatcgggatcggtctgctctcactgctcctgagagacgaccgcgttttaccactgagggctattaggtttttcgtggagaatctaaaccacgatgcaatcgttgtgcgcaagatggctatctcagccgttgccggcatcctgaaacagcttaaaaggacacacaagaagttgacgattaatccctgtgaaatctctgggtgccccaagcctactcagattatcgctggggaccgtcctgataaccactggctgcattatgacagcaagacaattcccagaacgaagaaggaatgggagagctcatgctttgtggaaaagacccactggggctattacacttggcctaagaacatggtggtgtacgcaggcgttgaagagcagccaaagctgggacgttcccgggaggatatgaccgaggcagagcagataatctttgaccacttctctgaccctaagtttgtggagcagctcatcacattcctctccctggaagatcgcaaaggaaaagataagtttaacccacggagattttgcctgtttaaagggatctttcgcaacttcgatgacgctttcctgccagtgctgaaaccccatctggagcatctggtggctgactcccatgagtccacccagaggtgcgtggccgagattatagccggcttgataaggggttcaaagcattggacttttgaaaaggtggagaagctgtgggagttactctgtcccctgctgcgcaccgctctctcgaacattaccgtcgagacctacaatgattggggggcatgtattgctacgtcctgtgagagtagagaccctagaaaactccactggttattcgaactgctgctggagtcacccttgtctggggagggcgggagcttcgtggatgcgtgtcgcttatacgtgctgcaaggtgggctggctcagcaagagtggagagttcccgaactcctgcacaggctcttaaaatatctggaacccaagctcacccaggtgtacaagaacgtacgcgagaggatcggcagtgtactgacctacatctttatgattgacgtatccctccctaataccacccccacgatctccccccacgtgccggagttcacggcccgaatcctggaaaagctcaaacccttaatggatgtggacgaggagattcagaatcatgtcatggaagagaatggtataggggaggaagacgaaaggacacagggcataaagctgctgaaaaccattctaaaatggctgatggccagtgcaggccgaagcttttcaaccgccgtcactgagcagctccaattgctgccgctgttttttaaaatagccccagttgagaacgataacagttacgacgagctcaagagggatgctaaactctgtctcagtttgatgtcccaggggctcctgtatccacatcaggttcccttagttctgcaggtgctgaagcagaccgcccgctccagtagctggcacgctaggtacacggtattgacttaccttcagacgatggtgttctacaatctgtttatcttcctcaataatgaggacgccgtaaaggatatccggtggcttgtcatttcactgctggaagatgaacagttggaagtcagggagatggcggccactactctttccggactattgcagtgtaactttctgaccatggacagcccaatgcaaatccacttcgaacagctatgtaagaccaaattgcctaagaagaggaagcgtgatcctgggagtgtgggggacacgataccttctgctgaattagtgaaaaggcatgccggagtgctgggactgggagcttgtgtcctttctagcccctacgatgtgcctacatggatgccacagctgttgatgaacttgtcagcccatctaaatgacccccagccaattgagatgactgtgaagaaaacactgagcaactttaggcgcacccatcatgataattggcaagagcacaagcagcagtttacagacgatcaactgctagtgcttactgatctactggtctcaccatgttactatgcctag

SEQ ID NO: 181088 - DNA, 5532 bp, Artificial Sequence
  derived and/or modified sequence
atggagcctgctgagagagctggggtgggggagcccccagagcccggcggccggcctgagcccggcccccggggctttgtgccccagaaggagatcgtgtacaacaagctgctgccctatgcagagcggctggatgctgagagtgacctgcagctggcccagatcaagtgcaacctgggccgggctgtgcagctgcaggagctgtggccaggcggcctcttctggaccaggaagctgagcacctacatccggctgtatggcaggaagttcagcaaagaagatcatgtgctcttcatcaagctgctgtatgagctggtgtccatccccaagctggagatctccatgatgcagggctttgcccggctgctgatcaacctgctgaagaagaaggagctgctgagcagagctgacctggagctgccctggaggcccctgtatgacatggtggagcgcatcctgtacagcaagacagagcacctgggcctgaactggttccccaacagcgtggagaacatcctgaagaccctggtgaagagctgccggccctacttcccagcagatgccacagctgagatgctggaggagtggaggcccctgatgtgcccctttgatgtgaccatgcagaaggccatcacctactttgagatcttcctgcccaccagcctgcccccagagctgcaccacaagggcttcaagctgtggtttgatgagctgattggcctgtgggtgtctgtgcagaacctgccccagtgggagggccagctggtgaacctgtttgcccggctggccacagacaacatcggctacatcgactgggacccctacgtgcccaagatcttcacccgcatcctgcggagcctgaacctgcctgtgggcagcagccaggtgctggtgccccgcttcctgaccaatgcctatgacatcggccatgctgtgatctggatcacagccatgatgggcggccccagcaagctggtgcagaagcacctggccggcctcttcaacagcatcaccagcttctaccaccccagcaacaacggccgctggctgaacaagctgatgaagctgctgcagaggctgcccaacagcgtggtgcggcggctgcaccgggagcgctacaagaagcccagctggctgacccctgtgcctgacagccacaagctgacagaccaggatgtgacagactttgtgcagtgcatcatccagcctgtgctgctggccatgttcagcaagacaggcagcctggaggccgcccaggccctgcagaacctggccctgatgaggcctgagctggtgatcccccctgtgctggagaggacctacccagccctggagaccctgacagagccccaccagctgacagccaccctgagctgtgtgattggagtggcccggagcctggtgtctgggggccgctggttccctgagggccccacccacatgctgcccctgctgatgagggccctgcccggggtggaccccaatgacttcagcaagtgcatgatcaccttccagttcatcgccaccttcagcaccctggtgcccctggtggactgcagctctgtgctgcaggagagaaatgacctgacagaggtggagcgggagctgtgcagcgccacagctgagtttgaggactttgtgctgcagttcatggaccgctgcttcggcctcatcgagagcagcaccctggagcagacccgggaggagacagaaacagagaagatgacccacctggagagcctggtggagctgggcctgagcagcaccttcagcaccatcctgacccagtgcagcaaggagatcttcatggtggccctgcagaaggtgttcaacttcagcaccagccacatctttgagaccagggtggccggccgcatggtggccgacatgtgcagagctgctgtgaagtgctgcccagaggagagcctgaagctgtttgtgccccactgctgcagcgtcatcacccagctgaccatgaatgatgatgtgctgaatgatgaggagctggacaaggagctgctgtggaacctgcagctgctgtctgagatcaccagggtggatggcaggaagctgctgctgtaccgggagcagctggtgaagatcctgcagaggaccctgcacctgacctgcaagcagggctacaccctgagctgcaacctgctgcaccacctgctgcggagcaccaccctcatctaccccacagagtactgcagcgtgcctgggggctttgacaagccacccagcgagtacttccccatcaaggactggggcaagccaggggacctgtggaacctgggcatccagtggcacgtgcccagcagcgaggaggtgtcctttgccttctacctgctggacagcttcctgcagcctgagctggtgaagctgcagcactgtggagatggcaagctggagatgagcagagatgacatcctgcagagcctgaccatcgtgcacaactgcctgattggcagcggcaacctgctgccccccctgaagggggagcctgtgaccaacctggtgcccagcatggtgtccctggaggagaccaagctgtacacaggcctggagtatgacctgagccgggagaaccaccgggaggtgattgccaccgtcatcaggaagctgctgaaccacatcctggacaacagtgaagatgacaccaagagcctcttcctgatcatcaagatcattggagacctgctgcagttccagggcagccacaagcatgaatttgacagccgctggaagagcttcaacctggtgaagaagtccatggagaaccggctgcacggcaagaagcagcacatccgggccctgctgattgacagagtgatgctgcagcacgagctgcggaccctgactgtggagggctgtgagtacaagaagatccaccaggacatgatccgggacctgctgcggctgagcaccagcagctacagccaggtgaggaacaaggcccagcagaccttctttgctgccctgggcgcctacaacttctgctgccgggacatcatccccctggtgctggagttcctgcggccagaccggcagggcgtgacccagcagcagttcaagggggccctgtactgcctgctgggcaaccacagcggcgtgtgcctggccaacctgcatgactgggactgcatcgtgcagacctggccagccatcgtgagcagcggcctgagccaggccatgagcctggagaagcccagcatcgtgcggctgtttgatgacctggccgagaagatccaccggcagtatgagaccatcggcctggacttcaccatccccaagagctgtgtggagattgctgagctgctgcagcagagcaagaaccccagcatcaaccagatcctgctgagccctgagaagatcaaggagggcatcaagaggcagcaggagaagaatgctgatgccctgagaaattatgagaacctggtggacaccctgctggatggagtggagcagaggaacctgccctggaagtttgagcacatcggcatcggcctgctgagcctgctgctgagagatgacagagtgctgcccctgcgggccatccgcttctttgtggagaacctgaaccatgatgccatcgtggtgaggaagatggccatctctgctgtggccggcatcctgaagcagctgaagaggacccacaagaagctgaccatcaacccctgtgagatcagcggctgccccaagcccacccagatcatcgccggggacagaccagacaaccactggctgcactatgacagcaagaccatccccaggaccaagaaggagtgggagagcagctgctttgtggagaagacccactggggctactacacctggcccaagaacatggtggtgtatgccggcgtggaggagcagcccaagctgggccgcagccgggaggacatgacagaagctgagcagatcatctttgaccacttcagtgaccccaagtttgtggagcagctgatcaccttcctgagcctggaggacaggaagggcaaggacaagttcaacccccggcgcttctgcctcttcaagggcatcttcaggaactttgatgatgccttcctgcctgtgctgaagccccacctggagcacctggtggccgacagccatgagagcacccagagatgtgtggccgagatcatcgccggcctcatccggggcagcaagcactggacctttgagaaggtggagaagctgtgggagctgctgtgccccctgctgaggacagccctgagcaacatcaccgtggagacctacaatgactggggcgcctgcatcgccaccagctgtgagagccgggaccccaggaagctgcactggctgtttgagctgctgctggagagccccctgtctggagagggcggcagctttgtggatgcctgccgcctgtatgtgctgcagggcggcctggcccagcaggagtggagggtgcctgagctgctgcaccggctgctgaagtacctggagcccaagctgacccaggtgtacaagaatgtgcgggagagaattggctctgtgctgacctacatcttcatgattgatgtgtccctgcccaacaccacccccaccatcagcccccacgtgcctgagttcaccgcccgcatcctggagaagctgaagcccctgatggatgtggatgaggagatccagaaccacgtgatggaggagaatggaattggagaggaggatgagaggacccagggcatcaagctgctgaagaccatcctgaagtggctgatggccagcgctggccgctccttcagcacagctgtgacagagcagctgcagctgctgcccctcttcttcaagatcgcccctgtggagaatgacaacagctatgatgagctgaagagagatgccaagctgtgcctgagcctgatgagccagggcctgctgtacccccaccaggtgcccctggtgctgcaggtgctgaagcagacagcccggagcagctcctggcacgcccgctacacagtgctgacctacctgcagaccatggtgttctacaacctcttcatcttcctgaacaatgaagatgctgtgaaggacatccgctggctggtgatcagcctgctggaggatgagcagctggaggtgcgggagatggccgccaccaccctgagcggcctgctgcagtgcaacttcctgaccatggacagccccatgcagatccactttgagcagctgtgcaagaccaagctgcccaagaagaggaagagggaccccggctctgtgggggacaccatccccagcgctgagctggtgaagagacatgctggggtgctgggcctgggcgcctgtgtgctgagcagcccctatgatgtgcccacctggatgccccagctgctgatgaacctgagcgcccacctgaatgacccccagcccatcgagatgacagtgaagaagaccctgagcaacttccggaggacccaccacgacaactggcaggagcacaagcagcagttcacagatgaccagctgctggtgctgacagacctgctggtgagcccctgctactatgcctag

SEQ ID NO: 181089 - DNA, 2964 bp, Artificial Sequence
  derived and/or modified sequence
atgggagagaacctggccaagaagatcatgttcttcctgctgaccatcaagctgatcctgaaccacatcctggacaacagtgaagatgacaccaagagcctcttcctgatcatcaagatcattggagacctgctgcagttccagggcagccacaagcatgaatttgacagccgctggaagagcttcaacctggtgaagaagtccatggagaaccggctgcacggcaagaagcagcacatccgggccctgctgattgacagagtgatgctgcagcacgagctgcggaccctgactgtggagggctgtgagtacaagaagatccaccaggacatgatccgggacctgctgcggctgagcaccagcagctacagccaggtgaggaacaaggcccagcagaccttctttgctgccctgggcgcctacaacttctgctgccgggacatcatccccctggtgctggagttcctgcggccagaccggcagggcgtgacccagcagcagttcaagggggccctgtactgcctgctgggcaaccacagcggcgtgtgcctggccaacctgcatgactgggactgcatcgtgcagacctggccagccatcgtgagcagcggcctgagccaggccatgagcctggagaagcccagcatcgtgcggctgtttgatgacctggccgagaagatccaccggcagtatgagaccatcggcctggacttcaccatccccaagagctgtgtggagattgctgagctgctgcagcagagcaagaaccccagcatcaaccagatcctgctgagccctgagaagatcaaggagggcatcaagaggcagcaggagaagaatgctgatgccctgagaaattatgagaacctggtggacaccctgctggatggagtggagcagaggaacctgccctggaagtttgagcacatcggcatcggcctgctgagcctgctgctgagagatgacagagtgctgcccctgcgggccatccgcttctttgtggagaacctgaaccatgatgccatcgtggtgaggaagatggccatctctgctgtggccggcatcctgaagcagctgaagaggacccacaagaagctgaccatcaacccctgtgagatcagcggctgccccaagcccacccagatcatcgccggggacagaccagacaaccactggctgcactatgacagcaagaccatccccaggaccaagaaggagtgggagagcagctgctttgtggagaagacccactggggctactacacctggcccaagaacatggtggtgtatgccggcgtggaggagcagcccaagctgggccgcagccgggaggacatgacagaagctgagcagatcatctttgaccacttcagtgaccccaagtttgtggagcagctgatcaccttcctgagcctggaggacaggaagggcaaggacaagttcaacccccggcgcttctgcctcttcaagggcatcttcaggaactttgatgatgccttcctgcctgtgctgaagccccacctggagcacctggtggccgacagccatgagagcacccagagatgtgtggccgagatcatcgccggcctcatccggggcagcaagcactggacctttgagaaggtggagaagctgtgggagctgctgtgccccctgctgaggacagccctgagcaacatcaccgtggagacctacaatgactggggcgcctgcatcgccaccagctgtgagagccgggaccccaggaagctgcactggctgtttgagctgctgctggagagccccctgtctggagagggcggcagctttgtggatgcctgccgcctgtatgtgctgcagggcggcctggcccagcaggagtggagggtgcctgagctgctgcaccggctgctgaagtacctggagcccaagctgacccaggtgtacaagaatgtgcgggagagaattggctctgtgctgacctacatcttcatgattgatgtgtccctgcccaacaccacccccaccatcagcccccacgtgcctgagttcaccgcccgcatcctggagaagctgaagcccctgatggatgtggatgaggagatccagaaccacgtgatggaggagaatggaattggagaggaggatgagaggacccagggcatcaagctgctgaagaccatcctgaagtggctgatggccagcgctggccgctccttcagcacagctgtgacagagcagctgcagctgctgcccctcttcttcaagatcgcccctgtggagaatgacaacagctatgatgagctgaagagagatgccaagctgtgcctgagcctgatgagccagggcctgctgtacccccaccaggtgcccctggtgctgcaggtgctgaagcagacagcccggagcagctcctggcacgcccgctacacagtgctgacctacctgcagaccatggtgttctacaacctcttcatcttcctgaacaatgaagatgctgtgaaggacatccgctggctggtgatcagcctgctggaggatgagcagctggaggtgcgggagatggccgccaccaccctgagcggcctgctgcagtgcaacttcctgaccatggacagccccatgcagatccactttgagcagctgtgcaagaccaagctgcccaagaagaggaagagggaccccggctctgtgggggacaccatccccagcgctgagctggtgaagagacatgctggggtgctgggcctgggcgcctgtgtgctgagcagcccctatgatgtgcccacctggatgccccagctgctgatgaacctgagcgcccacctgaatgacccccagcccatcgagatgacagtgaagaagaccctgagcaacttccggaggacccaccacgacaactggcaggagcacaagcagcagttcacagatgaccagctgctggtgctgacagacctgctggtgagcccctgctactatgcctag

SEQ ID NO: 181090 - DNA, 5532 bp, Artificial Sequence
  derived and/or modified sequence
atggagcccgccgagcgggccggcgtgggcgagccccccgagcccggtggtcgcccagaacctgggcctagggggttcgtccctcaaaaagagatagtgtataacaaactcctcccgtacgccgagaggctggacgcggaaagtgatctgcagcttgcccagatcaaatgcaacctgggacgggccgttcaactacaggagctctggcccggaggcctgttttggacccgtaaactgtcaacttatatccgtctgtacggccgcaagttctctaaggaggaccacgttctatttataaaactgctgtacgaactggtgtctatccctaagttggagattagcatgatgcagggttttgcacgcctgctaataaacctgctgaagaagaaagagctgctgtcaagagctgaccttgagctaccatggcgaccactgtacgatatggtggaacgaattctgtattcaaagactgaacatcttgggttgaactggtttccaaattccgtcgaaaacatactgaagactctcgtgaagtcttgtagaccttatttccccgcggacgcaacagccgaaatgctggaggagtggcgccccctcatgtgcccttttgacgttaccatgcagaaggctatcacatattttgaaatcttccttcctaccagcctcccaccggagctgcatcacaagggattcaaactttggtttgacgaactgataggactttgggtgtcggtgcagaatttacctcagtgggaaggccaactcgtgaatctcttcgcccgcctggccactgacaatatcggttacatcgattgggacccttacgtgcccaagatcttcacacgtatcttgcggagtctcaatctgccagtgggctcctcccaggttctagtacctcgatttctcacgaatgcctacgacattggacacgcagtgatctggattaccgccatgatgggggggccaagcaaactggttcagaaacatctggcaggactgttcaatagtattacctcattttatcacccctctaataacggcaggtggttgaacaaactgatgaaactcctgcagcgactgcccaactccgtcgtccggcgcctccacagagaacgatacaagaagccaagctggcttacgcctgtacctgactcccacaaactgaccgaccaagacgttacagacttcgtacagtgtatcatacaacccgtgctgctggctatgttttccaagactggcagcctcgaagcagcccaggcccttcagaacttggccctaatgcgtcccgagctggtgattcctcctgtgctggagagaacataccccgccctggagacactgaccgaacctcaccagcttaccgcgacgctgtcatgcgttatcggcgttgcccggagcctggtctccggaggcagatggttccccgaaggcccgacacacatgctccctcttctaatgagggccctgcctggggtggatccaaacgatttctccaagtgtatgattacttttcagtttattgctacctttagcacactggtgcctctcgttgattgcagctctgttctgcaggagagaaacgatctaaccgaagtggagagagaactctgtagcgccaccgctgagttcgaagatttcgtgctccaattcatggatcgttgtttcggcttaattgaaagctccactctggaacagacccgcgaggagaccgaaactgagaagatgactcacctagaatccctcgtggagttggggctcagctctacgtttagcaccatcttgactcagtgctccaaggagatattcatggttgcgctacagaaagtctttaattttagcacctcccatatattcgagacgcgggtagccggccggatggtagcggacatgtgcagggcagccgtgaaatgctgcccagaagaaagcctaaaactctttgtaccccactgttgttccgtgattacccagctgaccatgaacgacgacgtgctcaatgacgaagaactggataaggaactactgtggaacttgcagctcttatccgagataactagggtggacggcaggaagctcctgctctaccgagagcagctagtgaagattttgcagcggactttgcacctgacatgtaagcaggggtacactctcagttgcaatctcctgcatcacctcttacgctcgacaacattgatctacccgaccgaatattgcagcgtgccagggggttttgacaaacctccctcagaatacttccctattaaagattggggcaagcccggggatttgtggaacctgggcatccagtggcacgtgcccagcagcgaggaagtgtccttcgcgttctatcttctcgacagtttcctgcagcctgagctcgtaaaactgcagcattgtggcgatgggaaactggagatgagccgcgacgatattctgcagtctttgaccattgtgcataactgcctgattggctcagggaatctgctgccgccactgaaaggggagccggttactaacctcgtgcccagcatggtaagtcttgaagagaccaaactgtataccggcctggagtacgatttgtcacgtgaaaatcaccgggaggttatcgccacagtgattagaaaattgctcaaccacattcttgacaattcggaggacgacacaaaatcactcttcctgatcatcaagattatcggggatctgctccaatttcaggggagccataagcatgagttcgatagccgctggaaatcctttaaccttgttaagaaaagcatggagaaccggctgcacggtaaaaagcaacacattagagcccttctaattgatcgggtaatgttgcaacacgagctcagaactcttacagttgaaggttgcgaatacaaaaagattcatcaggatatgatacgggatctactgagactgagtacatcctcctattcgcaggtgcgaaacaaggcccagcagaccttttttgccgcccttggcgcttacaacttctgctgtcgcgatatcatcccactggtactggaattcctaaggccagatcggcagggcgtgacacaacaacagtttaagggggctctgtattgcctgttgggcaaccattccggggtttgcttagctaacctgcatgactgggattgtattgtccagacatggccagctattgtgagttccggtctaagtcaggcgatgtcgctggaaaagccaagcatcgtgagactgtttgatgatctggccgagaaaattcaccgacagtacgagactattgggctggactttaccatccccaagtcttgcgtggagattgctgagctgttgcagcagtctaaaaacccctccattaatcagatactgctctcgccagaaaaaattaaggagggtatcaaaaggcagcaggagaaaaacgccgacgccctccgcaactacgaaaatctggtggatactctgctggacggcgtggaacaacgcaatcttccttggaagtttgaacacatagggatcggcctcctttctttgttgctgcgcgatgatagggtccttccattgcgcgccatcaggtttttcgtggagaatctcaatcatgatgccattgtggtccgcaaaatggccatctccgctgttgccggaatacttaaacagctcaagagaacacacaaaaaactgacaatcaacccttgcgaaattagtgggtgccccaagcccactcagataattgctggtgataggcctgacaatcattggctgcactacgattccaagacgatccctcggactaagaaggagtgggagtcctcctgctttgtcgaaaaaacgcactggggctattatacatggccaaaaaacatggtggtttacgctggagtggaggaacagcctaagctaggccgaagcagagaagacatgacggaggcagagcagattatctttgatcacttcagcgatcccaagtttgtggagcagctgatcaccttcctctccctggaagacagaaaaggcaaggacaagtttaatccacgcaggttttgcttgtttaaagggatctttaggaattttgacgatgcgttccttcccgtgctcaaacctcacctggaacatctcgtggcagacagccatgagagcacccagcgctgtgtagcagagataatcgcaggacttatcagaggttcaaagcactggacttttgagaaggtagaaaagctgtgggagttactttgccctctgctgaggaccgctctgtctaatatcacagtggagacgtacaatgactggggcgcgtgcatcgctactagctgcgaatcgagggacccgcgcaagttgcactggttgttcgagttgctgttggaatctcctctctcaggtgagggcggttcattcgtggacgcatgtcgcctgtacgtgctgcagggagggctcgcacagcaggagtggcgcgtgcctgagttattacatcgtttgctcaagtatctggagcctaagctgactcaggtgtataagaatgtgcgagagagaattggctctgtccttacttatatctttatgatcgacgtatctttacccaatactaccccaaccatttccccgcatgtgccagagttcacggctagaatcttggagaagctcaaacccttgatggatgttgatgaggaaatccagaaccatgtaatggaggaaaatgggatcggtgaagaggatgagcggacccagggcatcaaattacttaagacaatcctgaagtggctgatggcttccgccggcagaagcttttctaccgcagtgactgagcagctgcagctgttacccctgttttttaagatcgcgcccgtggaaaacgataacagttacgatgagctcaaacgggacgccaagttgtgcctgtcactcatgtcacaggggctgctctatcctcaccaggtgccactcgttctgcaggtattgaaacaaacagcacgctcatcatcctggcacgcaaggtacacggtgctgacatatctgcaaaccatggtattttataacctctttatttttctcaacaacgaagatgccgtcaaagatatccgttggcttgtgatcagtttgctggaggatgagcaactcgaggtcagagagatggccgctaccacactgtccggtcttctccagtgcaacttcctcaccatggactcaccaatgcagattcacttcgaacagctgtgcaaaacaaaacttcccaaaaagcggaagagagaccctggttcagtcggtgataccatccctagcgcagagctggtgaaaagacatgccggggttctcggattaggcgcatgcgtcctgagttccccctacgacgtgcctacatggatgccacaattacttatgaatttgtccgcccacctgaacgacccccaacctatcgagatgactgtgaagaagacactctcaaacttccggcgtacccatcacgacaactggcaagagcacaaacagcagttcaccgatgaccagctcttagtattgactgacttgctggtttccccttgttactatgcatag

SEQ ID NO: 181091 - DNA, 2964 bp, Artificial Sequence
  derived and/or modified sequence
atgggcgagaacctggccaagaagatcatgttcttcctgctgaccatcaaactgatactgaatcacattctcgataactctgaagacgatacaaaaagtctgtttctgattataaagataatcggtgatctgttacagttccagggatcccataaacatgaatttgactctcggtggaagagcttcaatctggtgaagaaatctatggagaaccggctccatggtaaaaagcaacatatacgagccctgctcatcgatcgagtgatgctccagcacgagctgcggacactgacagtggaaggctgcgagtacaaaaaaattcaccaggatatgatccgggatctactgaggttgtctaccagctcctattcgcaggtgaggaataaggcccagcagacttttttcgccgctctgggcgcatataacttttgttgtcgcgatatcattcccctggtcctggagttcttgagacctgaccggcagggcgttacacagcagcaatttaagggggccctgtactgtttactgggcaaccatagtggtgtttgtcttgctaacctacatgactgggattgcattgtgcagacctggcctgccatagtgtcaagcgggctgagccaggccatgtctctggagaaaccctcaatcgtacggctcttcgacgatctggctgaaaaaatccaccggcagtatgagacgattggcctggacttcaccattcctaagagctgtgttgagatcgccgaactcctccagcagagcaagaaccccagtataaatcagattttattaagccctgaaaagatcaaagagggcataaaaaggcagcaagagaaaaacgctgatgctctgcgtaattacgagaatctggttgacacactcttggacggcgtcgagcagcgcaacctgccctggaaatttgaacatattggaatagggctgctgtccttgcttctgcgagacgatagagtgctgcccttgcgggctattcggttcttcgtggagaatcttaatcatgacgcaatagttgttcgtaaaatggcaatctcggccgtggccggtattctgaagcaactcaagagaacccacaaaaagctcaccatcaatccttgcgaaataagcggctgtcccaagccgacccaaatcatcgccggcgaccggcccgacaaccattggttacattatgattccaaaaccatcccgcgcacaaagaaggaatgggagtcctcgtgcttcgttgaaaagactcactggggctactacacatggcctaaaaacatggtcgtctacgccggcgtggaggagcagcctaaacttggccggtccagggaagacatgaccgaggctgaacagattatcttcgaccatttctcagatccaaaattcgtggaacagctcattacatttcttagcctggaggataggaaaggcaaagacaaattcaatcccagacgcttttgtctgttcaaaggaattttcaggaacttcgatgatgcgtttttgcctgtgctgaagccacatttagagcacttagtcgccgactcacatgaaagtacacagcgatgcgtggccgagattatagcaggcctcattcgcggctccaaacactggaccttcgaaaaagtggaaaagttgtgggaactgctgtgtccactgctcaggacagccctgtcgaacatcacagtcgagacctataacgactggggcgcttgcatcgccacttcctgtgagtcgcgggatcctcgaaagttgcattggctgtttgaattgctactcgaatccccccttagcggtgaaggaggatcgttcgtagatgcatgtcgtctgtatgttctgcagggtggactcgcccagcaggaatggcgagtgcctgagcttctccaccgtctgcttaagtacctagagccaaagcttacccaggtgtataagaacgtgagggaacgtatcggttctgtcctgacttatatctttatgatcgatgtttccctacctaataccactcctaccatctcgccccatgttcctgaatttaccgcccggatactcgaaaaactgaagcctcttatggacgtcgacgaagaaatccagaatcacgtaatggaagagaatggaatcggcgaggaggacgagcgtacacagggcataaagctcctgaagacaatccttaagtggttgatggcctctgccggacgtagtttttctactgcagtgaccgaacagcttcagctgcttcctctgtttttcaaaattgcacctgtggaaaacgataactcttacgacgagctgaagcgcgatgcaaaactgtgcctgtcccttatgagccagggattgctgtatccccaccaggtgccactggtgcttcaggtgctgaagcagaccgcacgctcatcctcctggcacgccagatacacagtgctcacatacctgcagactatggtcttctacaacctgtttatcttcctgaataacgaggatgctgtgaaagacatcagatggctcgtgatatcactgttagaggacgagcagctagaggtcagagaaatggcagcgacgacactctccggtctgttgcagtgcaacttccttactatggatagtcccatgcagattcactttgagcagttgtgtaagaccaagctgccaaaaaaacgcaaacgagaccctggtagtgtgggcgacacaattccctctgcagaactggttaaacgtcatgccggagtgctgggtctaggggcatgcgtgttatcttccccttacgacgttccaacatggatgcctcagcttcttatgaatttatcagcccatctcaatgaccctcagcccatcgagatgaccgtaaaaaaaacgctgagcaacttccgacgcacacatcatgataactggcaggaacataagcagcagtttactgacgaccaactgctggtcctgaccgatctgttggtgtcaccatgttactatgcatag

SEQ ID NO: 181092 - DNA, 5531 bp, Artificial Sequence
  derived and/or modified sequence
atggagcccgctgaaagggctggggtgggcgaacctccagaacctgggggacggccagagcccggtccacgcggtttcgtgccccagaaggagattgtttacaacaagcttttgccttatgcagaaaggctggatgctgagtccgatctacagctcgcgcagatcaaatgtaacttggggagggctgttcagctgcaggagctgtggcctggcggattattctggactcggaagctgagcacctacatccgactgtatggaaggaagttctctaaagaggaccatgtgctgttcatcaagctgctctatgaactcgtgtcaattccaaagcttgaaatctcaatgatgcagggctttgcccgtctactgataaacctgttaaaaaagaaggagttactttccagagccgacctggagctaccctggcgtcctctgtacgacatggtggagcgcattttatactctaaaacagagcatctaggactcaattggttccctaattctgtagaaaacattctgaaaactcttgtgaaatcatgccgtccctattttcctgccgatgccacagctgaaatgctggaagagtggagacccctgatgtgcccatttgacgttactatgcagaaggctattacgtacttcgagatctttttgcccacctcactgccgcctgagttacaccataagggcttcaaactctggttcgatgaacttattggactgtgggtatctgttcagaaccttccacagtgggaggggcagctggttaatctgttcgcccgactggctacagataatatcggctatattgactgggatccatatgtgccaaagattttcacccgaattctgcgaagcctgaatctgcctgtaggcagctctcaggttctcgtgccgcgattcctgactaatgcctacgacatagggcatgccgtcatatggattacagccatgatggggggaccatccaagttagtgcagaagcacctcgccggacttttcaattctattactagtttttaccatccctcaaacaatgggagatggctgaataagctcatgaaattgctgcagaggctgccaaatagtgtcgtaagaaggttgcaccgcgagaggtacaagaagccctcatggctgacccctgtgcccgattctcataagctcactgaccaagacgttacagacttcgtacagtgtatcattcagcccgtgctactagccatgttctcgaaaaccggctccctggaggcagcacaggctctccagaacctggcattgatgcggcctgaactggtgattcctccagtgctcgagcggacctatcccgcattagaaactctgaccgagccacaccaactgaccgccaccctgagctgcgtcataggcgttgctaggtccctcgtgagtggcggacgctggtttcctgaagggccaactcacatgctcccattactcatgcgtgcgctgccaggtgtggaccctaatgatttctctaagtgcatgatcaccttccagttcatcgctacgtttagtacattggtacccctggttgattgttcctccgtgttacaggagcggaatgacctcacagaggttgagcgcgagttatgctccgccaccgccgagttcgaagactttgtcctccaattcatggatcgctgcttcgggcttatcgagagttccaccctcgaacaaacacgtgaagagactgaaacggaaaaaatgacccacctcgaatccctggtggagctcggattatctagcactttctcaactatcttgacccagtgctccaaggagatatttatggttgccctccagaaggtgtttaacttctccacctctcacatttttgaaacaagagtcgcagggcgaatggtagcagatatgtgtagagcggctgtcaaatgctgtccggaggaatcactgaaactgttcgtgccccactgttgcagtgtaattacccagttaaccatgaacgatgatgtactgaatgatgaggaactcgacaaagaactgctatggaacctacagttgctcagtgaaataacaagagttgacggcagaaagctgctgctgtaccgggagcagctcgtgaaaatcctccagaggacactgcacctcacctgtaaacaagggtatactttgagttgcaatctgttgcatcacctgctaaggtctactaccctcatttacccgactgaatattgctccgtccctgggggtttcgacaagccaccaagtgagtacttccccatcaaggactggggcaaaccgggtgacctgtggaatctggggatccagtggcacgtaccatcatctgaagaagtcagcttcgctttctatctgctggactcattccttcagcctgagctggtcaagctccagcattgcggcgatgggaagctcgaaatgagccgggatgatatcttgcaatccttaaccatagtgcacaactgtcttatagggagtggcaatcttctccccccattaaagggggagcctgtcaccaacttggtgcctagcatggtcagcctggaggagacaaaactgtacacgggtctggaatacgacctcagccgcgagaatcatcgagaggtgatcgctaccgtgattcgcaagctgctgaaccatatcctggataattcagaggacgatacgaaaagtctgttcctcataataaaaattatcggagacctcctccagtttcaaggctcccacaaacacgagtttgatagccgctggaaatccttcaaccttgttaaaaagtccatggagaaccgtttgcacggcaaaaaacagcacataagagcgcttctgatagaccgggttatgctacagcacgagcttagaaccttgaccgtcgaggggtgtgaatacaaaaagattcatcaggacatgatcagggatctgctacgcttatccaccagcagctactcacaggtcaggaacaaagcacagcaaacgttttttgccgctttgggagcctataatttctgctgtagggacataattccgctcgtacttgaatttctccgacccgaccgccaaggggtgacacagcagcagtttaaaggagcgttatactgtctcttgggcaatcactccggagtgtgtctggcaaatctccacgactgggactgtatcgtacagacatggcccgcaatcgtcagcagcggcttatctcaagccatgagtctggaaaaaccttcgatcgtgcggctctttgacgacctggcagagaagattcacaggcagtacgagactatcgggcttgactttacaattccgaagagttgcgtagaaatcgctgaactacttcagcagtcaaagaatccaagtattaaccagatactgctctctcccgagaaaattaaagagggcataaagaggcagcaagaaaaaaatgcggatgctctgcggaactacgagaatcttgtagacactctactggacggagttgaacagagaaacctcccgtggaagtttgaacatatcggcatagggttgctctcattgttgttaagggacgatcgtgttttacccctgagagccattagattctttgtcgagaatctgaaccatgacgcaatcgtcgtgagaaagatggccatttctgccgtggctggaatcctgaagcagctcaaacggacgcacaagaagctcaccatcaatccgtgtgaaataagtggctgtcccaaaccaacgcaaataatcgccggagatagaccagataaccattggctacactatgactctaagacaatcccacgtaccaaaaaagagtgggaaagtagttgtttcgtcgagaaaacccattgggggtactatacatggcctaagaacatggtcgtgtacgcaggcgttgaggagcaacctaaacttgggagatctcgagaggatatgactgaggctgagcagatcatcttcgaccacttttcggatcccaagttcgttgaacagctgataacattcttgagtctggaggacagaaagggaaaagacaagtttaaccctcggaggttctgcttatttaaaggcatattcagaaactttgacgacgcgtttctccctgttctgaaaccacatctcgagcatctggttgccgatagtcatgaaagcacacagcggtgtgtggcagagattattgctggattaattagaggatcaaaacattggacattcgagaaagttgagaagctgtgggagctgttgtgccctcttctgcgtacagcattgtcgaatattactgtggagacctacaacgactggggcgcatgcattgccacctcttgcgagtccagggaccccaggaaactccactggctgttcgagttgcttctggagagccccctgtctggtgaaggcggatccttcgttgacgcatgccgcctctacgtgctgcaaggcggtttggcccagcaggaatggagagtccccgagttgctccacaggctgttaaagtacctcgagcccaagttgacccaagtgtacaagaacgttagggaacggataggcagcgtgctgacctacatcttcatgattgatgtttctctgccgaatacgacccctactataagtccgcatgtgcccgagttcaccgctaggattttagaaaaactgaaacctctgatggatgtcgacgaggagattcagaaccacgtaatggaagaaaacgggatcggggaggaggacgaacgcactcagggaataaagttgctgaagacaattctgaagtggctgatggcaagtgccggaagatccttcagcacagccgttactgaacagctacagctgctgccactcttctttaagatagcccctgtcgagaacgacaactcttacgatgagttaaaacgagacgctaagctatgtcttagccttatgagccaaggcctcctttacccccaccaagtgccgctcgtgctccaggttctcaagcagactgctaggtcatctagttggcatgccagatacacagtgcttacttatctacagaccatggtgttctacaacttattcattttcctgaacaacgaagatgcagtgaaagacatccgttggctggttatttctctcttggaggacgaacagctcgaagtccgcgagatggcggctaccactctttctggcctgttgcagtgtaatttcctgaccatggatagccctatgcaaattcatttcgaacagctctgtaagacgaaattgccaaaaaagagaaaacgggatcctggttccgtgggcgataccatcccatcagcggaacttgtaaaaaggcatgcgggtgtgctgggactcggcgcatgtgtgctctcttccccttacgatgtacctacttggatgcctcagctcctgatgaatttgtctgcccatttgaatgatccacaacctattgaaatgactgtgaaaaagaccttatcgaatttcaggcgcacccaccacgataactggcaggaacacaagcaacagtttacagacgaccagttgctcgtactgacggatctcctcgtcagcccttgttactacgccta

SEQ ID NO: 181093 - DNA, 2964 bp, Artificial Sequence
  derived and/or modified sequence
atgggagagaacctcgcaaaaaagattatgttttttctgctgacgattaaactgatcctaaatcacatccttgacaacagcgaggatgatacaaaatctctgttcctgatcataaaaataataggggacctccttcagttccaaggatcccataagcatgagttcgactctcggtggaaatcgtttaatctcgtgaagaaatccatggagaacaggctgcacggtaagaaacagcatatcagagccctactgatagaccgcgttatgctgcagcacgagctccgcacattgaccgtcgaaggctgtgagtataaaaagattcatcaagatatgattcgcgatctgttgcggctctctacttccagttattctcaggttagaaacaaggcacaacagacattctttgccgctcttggggcatataacttctgttgtagagacattatcccactcgtgctggagttcttaaggccggaccggcagggagtgacgcaacagcagttcaagggagccctgtactgcctccttggtaaccattccggtgtgtgcctagccaatctgcacgactgggactgcattgtccagacctggcccgctattgtatcgagcggcctgtcccaggccatgtctctcgaaaagccgtctatcgtccgccttttcgacgacttggccgaaaagattcaccgccagtatgaaacaattgggctagatttcacaatccctaagtcatgtgtagagatagctgaactgctgcaacagtctaaaaacccatcaattaaccagatcttgctgtctcccgaaaagatcaaagagggaatcaagaggcaacaggaaaagaacgccgacgccctacggaattacgagaatctggtggacactttgctcgatggtgtcgaacaacgcaacttgccctggaaattcgagcatatcggcatcggcttactcagtctactgctccgggacgacagagtgctgccactgcgcgcaatccggttcttcgttgaaaacctgaaccacgatgccattgtcgtgcggaaaatggccatatcagcagtggctggaatcctgaaacagctgaaaaggacgcacaaaaaattgacgatcaatccctgcgaaatttctggatgccctaaacccactcagataattgcaggcgatcggccagataatcactggctgcattatgatagtaaaacgattccacggacaaaaaaagagtgggaatcctcctgcttcgtggaaaagacacattgggggtactacacatggcccaagaacatggtcgtgtatgcgggagttgaagagcagccaaagctaggtcgatccagagaagatatgacagaggccgagcagataatcttcgatcatttctcggatcctaaattcgttgagcagctcattacattcctctccttggaagaccgaaaagggaaggacaaatttaatccgagacgcttctgccttttcaaagggatcttccgcaactttgacgatgcgttcctgcctgttttgaagccacatttggaacatctggtggccgatagtcatgagagcactcagagatgcgtggctgagatcattgccggattgatacgcggatccaaacactggacatttgaaaaagttgagaagctgtgggagttactctgtccactcctcagaacagccctgtctaatatcacagtcgagacatacaacgactggggcgcttgtattgccacgtcttgcgagagtagggatcctcgcaaactgcattggttgtttgagctactcctggagtcgccattaagcggcgagggagggagtttcgtggatgcctgtcggctctatgtgctgcaaggtggcctggcgcagcaagagtggcgagtgccggaactgctgcaccgtctgctgaagtatctggagcccaagttgacacaggtttataaaaatgtacgtgaacggatcggctcagtcctgacatacatctttatgatcgacgtgagtcttcctaacaccacacctactattagccctcacgtgcccgaatttacagcccgaatcttagagaaactaaagccgctgatggatgtggacgaggagatccagaatcacgtgatggaagagaatggtataggagaggaggacgagcgcactcagggcattaagctccttaagactatcctaaaatggttaatggctagcgctggccgatcctttagcaccgccgttacagagcaattacagcttctgcctttattctttaagatagcccctgtggagaatgataactcctacgatgaactgaaaagggacgccaagctgtgtctgagcctaatgtcccaaggtctcctgtatccacaccaggtgcctttggtgttgcaggtgctgaagcagacagcaaggtcctcatcatggcacgcgaggtacactgttttaacgtacctgcagactatggtgttctacaacttgtttatcttcttaaataatgaggacgctgtgaaagatatcagatggctagtgatttcactgcttgaagatgagcagttggaagtgcgcgaaatggccgctacaacactgtcagggctgctgcaatgtaactttttaacaatggatagccctatgcagatacattttgaacagttgtgcaagacgaagctccccaagaaacgcaagagggatccaggtagtgtaggcgatacaatcccttcggcagagctggtgaagcgccacgccggagtgcttggtctgggcgcatgcgttttgagcagcccatacgacgtccctacttggatgccccaactgttaatgaacttatcagcacacctcaacgaccctcagcccatagagatgactgtgaaaaaaaccttgtctaatttcagaaggacacaccatgacaactggcaagaacacaaacaacagttcaccgatgatcagttgcttgttttgaccgacttacttgtgtccccttgttattatgcttag

SEQ ID NO: 181094 - DNA, 7099 bp, Artificial Sequence
  derived and/or modified sequence
ggtgggggccggggagggttcgggtgggagggggtggggggggtgtccctgggctcatggagccggccgagcgggcgggagtcggagagcccccggagccgggcgggcgtcccgagccgggcccgcggggcttcgtcccgcagaaggagatcgtctacaacaagctgctgccctacgcggagcggctagacgccgagtccgacttgcagctggcccagatcaaatgcaacctgggccgggccgtgcagctccaagagctgtggcccgggggcctcttctggaccaggaaactctccacatatattcgactttatgggagaaaatttagcaaagaagatcatgttctttttattaagttattgtatgagctggtatcaattccaaaactggaaatcagcatgatgcagggatttgcccgccttttgatcaacttgttaaagaaaaaggaacttctttcaagagctgatttggagttaccctggagaccactttatgacatggtagaaagaatattatattccaagacagagcacctaggattaaattggtttcctaattctgtagaaaatattctcaaaacactcgtgaaaagctgccgaccatattttccagcagatgccaccgctgagatgctagaagaatggcgacctttaatgtgcccttttgatgtaaccatgcaaaaggccatcacttattttgaaatatttcttcctacctcccttcctccagaacttcatcataaaggttttaaactttggtttgatgaattaattggcctttgggtttcagtgcaaaatctcccacaatgggaggggcaactagtaaatctctttgctcgattggctacagataatatagggtacatagattgggatccatatgtaccaaagatatttacaagaattctgagaagcttgaacctcccagtgggaagcagtcaagtgttagtcccaagatttttaacaaatgcttatgatataggacatgctgtaatatggatcaccgccatgatgggtggaccaagtaagctagtgcaaaaacacttagctggtttgtttaacagcatcacatctttttaccatccttcaaataatgggcgctggctgaacaagttaatgaaactacttcagcggttgccaaacagtgttgttagaagattgcatcgtgaaagatacaagaagccctcttggttaactcctgtgcctgatagccacaagcttactgatcaagatgttacagactttgtacaatgcattattcagcctgtcctcttggctatgtttagcaaaaccggtagtctagaagcagcccaggctttgcagaatcttgcactcatgagacctgaattggtaataccccctgtacttgaaagaacatatcctgcattagagacattaacagaacctcaccagctcacagctactttaagttgtgtaattggagtagcccgcagtttggtatcaggaggcagatggtttcctgaaggtcctacacatatgctacctctgttgatgagagcattgcctggggtggatccaaatgactttagtaaatgcatgatcacattccagttcatagcaacattttctactctggtgcctttagtagattgttcatctgtactacaagaaagaaatgacctcacagaagtggaacgagaactttgttcagccacagctgaatttgaggatttcgtcttacagtttatggacagatgttttggacttatagaaagtagcacattggagcaaacaagagaagagacagaaactgagaaaatgacacacttggagagtttggtcgaattaggtctgtcttctacgtttagtacaatcctcacccaatgttccaaagaaatatttatggtggcccttcagaaggtttttaatttttctacttcacatatatttgaaacaagagtagcaggtcgcatggtggcagacatgtgccgcgctgctgtaaagtgctgcccagaagaatctttgaagctctttgttccccactgctgcagtgttataactcagcttacaatgaatgatgatgtattaaatgatgaagagctagacaaggaattactatggaatcttcaacttttgtctgagattactcgagtggatggaaggaagttgcttctttatagggagcagcttgtaaagattctccaaagaaccctacatttaacctgtaagcagggttacactctgtcttgtaaccttttgcatcatcttctccgttctaccacacttatctaccctacagaatactgcagtgtgccaggtggctttgacaagcctccttctgaatactttcctatcaaggactggggcaaacccggggacttgtggaatctgggaatccagtggcatgttccttcttcagaagaagtgtcttttgccttttatcttttggactcctttcttcagcctgagctcgtcaaactccagcattgtggggatggaaaacttgaaatgtctagagatgatattctacagagtctgactatagtgcacaactgtttaattggctctggaaacctcctacctccgttgaaaggagagccagttactaacttagtaccaagtatggtgtccttggaagagacaaagttgtatactggacttgaatatgatctgtctcgagagaaccaccgagaagtaattgctacagttataaggaaacttcttaaccacatacttgataattcagaagatgatactaagtcattgtttcttattataaagattattggagaccttttacaattccaaggatctcacaagcatgaatttgactcccgatggaaaagcttcaacttagtaaagaaatcaatggaaaatcggctccatgggaaaaaacaacatatcagagcactgttgattgatagagtaatgttacagcatgagctacggacactaactgttgagggttgtgaatacaaaaagatacatcaagatatgatcagagatcttcttcgtttatctacaagttcatacagtcaggtgagaaataaggctcagcaaacattttttgctgccttgggagcatataacttctgttgcagagatatcattcccttggttttggagttcttaaggcctgatagacaaggtgttacacagcaacaattcaagggtgccttgtactgtctccttggaaatcacagtggtgtgtgcttggcaaaccttcatgattgggactgtattgtacagacgtggccagcgattgtttcttcagggcttagccaagcaatgtccctggaaaagccatcaatagtgagattgtttgatgatcttgcagaaaagattcataggcagtatgaaacaattggcttggacttcacaattccaaagtcatgtgttgaaatagcggaattacttcaacagtcaaaaaacccctctatcaaccagatattgcttagcccagaaaaaattaaggaaggaattaaacgccaacaggaaaagaatgccgatgccctaaggaactatgaaaatttggtagacaccttgctagatggtgtggagcaaagaaacctgccctggaaatttgaacatataggcattgggcttctgtctctactgctgagagatgaccgagtgttgcctcttcgtgccatacggttttttgttgagaatctcaaccatgatgcaattgtagttcgaaagatggctatctcagctgttgctggtatccttaaacagctaaaaagaacccacaaaaagctgaccattaacccctgtgaaatcagtggatgccctaaacccacccaaattattgctggtgataggcctgataatcattggttgcattatgacagcaaaactataccaagaactaaaaaagaatgggagtcaagttgctttgtggaaaaaactcactggggatactacacctggccaaagaatatggttgtttatgctggtgtggaagagcagcctaagcttggcagaagcagggaggatatgacagaggcagaacagattatatttgatcatttttctgatcctaaatttgttgagcagttaattacttttctatcattagaagacagaaaaggaaaagataagtttaatccacgacgtttttgcctctttaagggtatattcaggaattttgatgatgccttcctgccagttctgaagccccatttagaacatttggttgcagattcacatgaaagcacccagcgatgtgttgcagaaattatagctggtttaatcagaggttctaagcactggacatttgaaaaggtggagaagctttgggagcttctgtgccctctgcttagaacagcactgtccaatattaccgtagaaacttataatgactggggagcttgtatagcaacatcctgtgaaagcagagatccccggaaacttcactggctttttgaactgctgttggaatcaccattgagtggtgaaggaggatcctttgtagatgcatgtcgactttatgtactacaaggtggccttgcccagcaagaatggagagtgcctgaactattgcacagactactgaagtacttggaacccaaactcacccaggtttacaaaaatgtcagagaaagaataggaagtgtgctgacctacatattcatgatagatgtatctttgccaaataccacaccaaccatatcgcctcatgtccctgagtttactgctcgaattctggagaaattgaaacctctcatggatgtggatgaagaaattcagaaccatgttatggaagaaaatggaattggtgaagaagatgagcgaactcagggcattaaactcttgaaaaccatattgaaatggctgatggcaagtgcaggaagatccttttctacagcagttacagaacaacttcagcttctacctttgtttttcaagattgccccagtggaaaatgacaatagctacgatgaactgaaaagagatgcaaagttatgtttatcattaatgtctcaggggttgctttaccctcatcaagtgcctttggtacttcaggtgctaaaacaaacagcaagaagcagttcttggcatgcacgatacacagtactgacctacctccagaccatggtattttataacctctttattttcctaaacaatgaagatgcagttaaagatatcaggtggctggttataagtcttttggaggacgaacaactggaggttcgagaaatggctgctactaccttaagcggtctgctacagtgtaactttcttaccatggacagtcctatgcagattcattttgagcaactttgcaaaacaaaactacctaagaaaagaaagcgagaccctggttctgtaggagataccattccttctgcagagttggtcaaacgccatgctggggtgctaggacttggtgcatgtgttctttctagtccttacgatgttcccacctggatgccccagctcctcatgaatctcagtgcacatctaaatgatcctcagcctattgagatgactgtaaaaaaaaccttatccaatttccgaaggactcaccatgacaactggcaggaacataaacagcaattcactgatgaccaactgcttgttctcaccgatcttcttgtgtcaccatgctattatgcatagaaagatgactagtcctcacttcaggctcttttcatcaaaaattccacaccctcaggtaccatctgtggtggctctctgcaagttttaaaactgcctctgctgagctctcatcattttggtggtttctgtgttagatctcgttagtctgcattccacagcttctcagttgccatttgatttcccaacttgtccggaagtgtttccagaatactgatcactttttttttttgaggcatctgacaaagtcacaaagtctcagactagaaataattacccagtatgatcatggcatccaagaccagagtctcagaactcattaagaaacagtttacttggaatggagaatacccatctgtaatacaggtcctgtcatttcattcatctcaaattattttgaattcttcccaaatggctgctggatttaggtggtaataggggctgtgggccataaatctgaagccttgagaaccttgggtctggagagccatgaagagggaaggaaaagagggcaagtcctgaacctaaccaatgacctgatggattgctcgaccaagacacagaagtgaagtctgtgtctgtgcacttcccacagactggagtttttggtgctgaatagagccagttgctaaaaaattgggggtttggtgaagaaatctgattgttgtgtgtattcaatgtgtgattttaaaaataaacagcaacaacaataaaaaccctgactggctgttttttccctgtattctttacaactattttttgaccctctgaaaattattatacttcacctaaatggaagactgctgtgtttgtggaaattttgtaattttttaatttattttattctctctccctttttattttgcctgcagaatcgttgagagactaataaggcttaatatttaattgatttgtttaatatgttatataaatgtaaaagagtgtataaactgtagagatagcattggcaagacattgtacagatgcaaccttttacacaacatcattgtgtaatttgtaaagattcacgtgtagttctttattatagtgattttgggctttgtacccactgaatgccattttttgtgtttttaaattattttctttatcttgttacaaaaactgagatgtggggttttttttttttcagttcacttatcattagaatgtctgaacttttatgtaacatttttgtgtgcatctctcaatgctaacaccacatgtttgcctatgacaagtttatagagtgaaaggtatcttctgggttgaaataattcacaaattggtgaatgtcatcttgcaacacaccctgtacagtcttccttaaaggaacactacagtatatttttagtatctacatgctgaatgactgaatacagacctaagcacagcagtggtcctggtacagtatttaagtgtcggcatacacaggcgtaatccctgtataaagtagtgccaaactgatttcagttgtgtaactagtttaaaacccaataaatggattctttttaaca

SEQ ID NO: 181095 - DNA, 4475 bp, Artificial Sequence
  derived and/or modified sequence
atgggagaaaatttagcaaagaagatcatgttctttttattaactataaaattgatcctgaaccacatacttgataattcagaagatgatactaagtcattgtttcttattataaagattattggagaccttttacaattccaaggatctcacaagcatgaatttgactcccgatggaaaagcttcaacttagtaaagaaatcaatggaaaatcggctccatgggaaaaaacaacatatcagagcactgttgattgatagagtaatgttacagcatgagctacggacactaactgttgagggttgtgaatacaaaaagatacatcaagatatgatcagagatcttcttcgtttatctacaagttcatacagtcaggtgagaaataaggctcagcaaacattttttgctgccttgggagcatataacttctgttgcagagatatcattcccttggttttggagttcttaaggcctgatagacaaggtgttacacagcaacaattcaagggtgccttgtactgtctccttggaaatcacagtggtgtgtgcttggcaaaccttcatgattgggactgtattgtacagacgtggccagcgattgtttcttcagggcttagccaagcaatgtccctggaaaagccatcaatagtgagattgtttgatgatcttgcagaaaagattcataggcagtatgaaacaattggcttggacttcacaattccaaagtcatgtgttgaaatagcggaattacttcaacagtcaaaaaacccctctatcaaccagatattgcttagcccagaaaaaattaaggaaggaattaaacgccaacaggaaaagaatgccgatgccctaaggaactatgaaaatttggtagacaccttgctagatggtgtggagcaaagaaacctgccctggaaatttgaacatataggcattgggcttctgtctctactgctgagagatgaccgagtgttgcctcttcgtgccatacggttttttgttgagaatctcaaccatgatgcaattgtagttcgaaagatggctatctcagctgttgctggtatccttaaacagctaaaaagaacccacaaaaagctgaccattaacccctgtgaaatcagtggatgccctaaacccacccaaattattgctggtgataggcctgataatcattggttgcattatgacagcaaaactataccaagaactaaaaaagaatgggagtcaagttgctttgtggaaaaaactcactggggatactacacctggccaaagaatatggttgtttatgctggtgtggaagagcagcctaagcttggcagaagcagggaggatatgacagaggcagaacagattatatttgatcatttttctgatcctaaatttgttgagcagttaattacttttctatcattagaagacagaaaaggaaaagataagtttaatccacgacgtttttgcctctttaagggtatattcaggaattttgatgatgccttcctgccagttctgaagccccatttagaacatttggttgcagattcacatgaaagcacccagcgatgtgttgcagaaattatagctggtttaatcagaggttctaagcactggacatttgaaaaggtggagaagctttgggagcttctgtgccctctgcttagaacagcactgtccaatattaccgtagaaacttataatgactggggagcttgtatagcaacatcctgtgaaagcagagatccccggaaacttcactggctttttgaactgctgttggaatcaccattgagtggtgaaggaggatcctttgtagatgcatgtcgactttatgtactacaaggtggccttgcccagcaagaatggagagtgcctgaactattgcacagactactgaagtacttggaacccaaactcacccaggtttacaaaaatgtcagagaaagaataggaagtgtgctgacctacatattcatgatagatgtatctttgccaaataccacaccaaccatatcgcctcatgtccctgagtttactgctcgaattctggagaaattgaaacctctcatggatgtggatgaagaaattcagaaccatgttatggaagaaaatggaattggtgaagaagatgagcgaactcagggcattaaactcttgaaaaccatattgaaatggctgatggcaagtgcaggaagatccttttctacagcagttacagaacaacttcagcttctacctttgtttttcaagattgccccagtggaaaatgacaatagctacgatgaactgaaaagagatgcaaagttatgtttatcattaatgtctcaggggttgctttaccctcatcaagtgcctttggtacttcaggtgctaaaacaaacagcaagaagcagttcttggcatgcacgatacacagtactgacctacctccagaccatggtattttataacctctttattttcctaaacaatgaagatgcagttaaagatatcaggtggctggttataagtcttttggaggacgaacaactggaggttcgagaaatggctgctactaccttaagcggtctgctacagtgtaactttcttaccatggacagtcctatgcagattcattttgagcaactttgcaaaacaaaactacctaagaaaagaaagcgagaccctggttctgtaggagataccattccttctgcagagttggtcaaacgccatgctggggtgctaggacttggtgcatgtgttctttctagtccttacgatgttcccacctggatgccccagctcctcatgaatctcagtgcacatctaaatgatcctcagcctattgagatgactgtaaaaaaaaccttatccaatttccgaaggactcaccatgacaactggcaggaacataaacagcaattcactgatgaccaactgcttgttctcaccgatcttcttgtgtcaccatgctattatgcatagaaagatgactagtcctcacttcaggctcttttcatcaaaaattccacaccctcaggtaccatctgtggtggctctctgcaagttttaaaactgcctctgctgagctctcatcattttggtggtttctgtgttagatctcgttagtctgcattccacagcttctcagttgccatttgatttcccaacttgtccggaagtgtttccagaatactgatcactttttttttttgaggcatctgacaaagtcacaaagtctcagactagaaataattacccagtatgatcatggcatccaagaccagagtctcagaactcattaagaaacagtttacttggaatggagaatacccatctgtaatacaggtcctgtcatttcattcatctcaaattattttgaattcttcccaaatggctgctggatttaggtggtaataggggctgtgggccataaatctgaagccttgagaaccttgggtctggagagccatgaagagggaaggaaaagagggcaagtcctgaacctaaccaatgacctgatggattgctcgaccaagacacagaagtgaagtctgtgtctgtgcacttcccacagactggagtttttggtgctgaatagagccagttgctaaaaaattgggggtttggtgaagaaatctgattgttgtgtgtattcaatgtgtgattttaaaaataaacagcaacaacaataaaaaccctgactggctgttttttccctgtattctttacaactattttttgaccctctgaaaattattatacttcacctaaatggaagactgctgtgtttgtggaaattttgtaattttttaatttattttattctctctccctttttattttgcctgcagaatcgttgagagactaataaggcttaatatttaattgatttgtttaatatgttatataaatgtaaaagagtgtataaactgtagagatagcattggcaagacattgtacagatgcaaccttttacacaacatcattgtgtaatttgtaaagattcacgtgtagttctttattatagtgattttgggctttgtacccactgaatgccattttttgtgtttttaaattattttctttatcttgttacaaaaactgagatgtggggttttttttttttcagttcacttatcattagaatgtctgaacttttatgtaacatttttgtgtgcatctctcaatgctaacaccacatgtttgcctatgacaagtttatagagtgaaaggtatcttctgggttgaaataattcacaaattggtgaatgtcatcttgcaacacaccctgtacagtcttccttaaaggaacactacagtatatttttagtatctacatgctgaatgactgaatacagacctaagcacagcagtggtcctggtacagtatttaagtgtcggcatacacaggcgtaatccctgtataaagtagtgccaaactgatttcagttgtgtaactagtttaaaacccaataaatggattctttttaaca

SEQ ID NO: 181096 - DNA, 5532 bp, Artificial Sequence
  derived and/or modified sequence
atggagcccgccgagagagccggcgtgggcgagccccccgagcccggcggcagacccgagcccggccccagaggcttcgtgccccagaaggagatcgtgtacaacaagctgctgccctacgccgagagactggacgccgagagcgacctgcagctggcccagatcaagtgcaacctgggcagagccgtgcagctgcaggagctgtggcccggcggcctgttctggaccagaaagctgagcacctacatcagactgtacggcagaaagttcagcaaggaggaccacgtgctgttcatcaagctgctgtacgagctggtgagcatccccaagctggagatcagcatgatgcagggcttcgccagactgctgatcaacctgctgaagaagaaggagctgctgagcagagccgacctggagctgccctggagacccctgtacgacatggtggagagaatcctgtacagcaagaccgagcacctgggcctgaactggttccccaacagcgtggagaacatcctgaagaccctggtgaagagctgcagaccctacttccccgccgacgccaccgccgagatgctggaggagtggagacccctgatgtgccccttcgacgtgaccatgcagaaggccatcacctacttcgagatcttcctgcccaccagcctgccccccgagctgcaccacaagggcttcaagctgtggttcgacgagctgatcggcctgtgggtgagcgtgcagaacctgccccagtgggagggccagctggtgaacctgttcgccagactggccaccgacaacatcggctacatcgactgggacccctacgtgcccaagatcttcaccagaatcctgagaagcctgaacctgcccgtgggcagcagccaggtgctggtgcccagattcctgaccaacgcctacgacatcggccacgccgtgatctggatcaccgccatgatgggcggccccagcaagctggtgcagaagcacctggccggcctgttcaacagcatcaccagcttctaccaccccagcaacaacggcagatggctgaacaagctgatgaagctgctgcagagactgcccaacagcgtggtgagaagactgcacagagagagatacaagaagcccagctggctgacccccgtgcccgacagccacaagctgaccgaccaggacgtgaccgacttcgtgcagtgcatcatccagcccgtgctgctggccatgttcagcaagaccggcagcctggaggccgcccaggccctgcagaacctggccctgatgagacccgagctggtgatcccccccgtgctggagagaacctaccccgccctggagaccctgaccgagccccaccagctgaccgccaccctgagctgcgtgatcggcgtggccagaagcctggtgagcggcggcagatggttccccgagggccccacccacatgctgcccctgctgatgagagccctgcccggcgtggaccccaacgacttcagcaagtgcatgatcaccttccagttcatcgccaccttcagcaccctggtgcccctggtggactgcagcagcgtgctgcaggagagaaacgacctgaccgaggtggagagagagctgtgcagcgccaccgccgagttcgaggacttcgtgctgcagttcatggacagatgcttcggcctgatcgagagcagcaccctggagcagaccagagaggagaccgagaccgagaagatgacccacctggagagcctggtggagctgggcctgagcagcaccttcagcaccatcctgacccagtgcagcaaggagatcttcatggtggccctgcagaaggtgttcaacttcagcaccagccacatcttcgagaccagagtggccggcagaatggtggccgacatgtgcagagccgccgtgaagtgctgccccgaggagagcctgaagctgttcgtgccccactgctgcagcgtgatcacccagctgaccatgaacgacgacgtgctgaacgacgaggagctggacaaggagctgctgtggaacctgcagctgctgagcgagatcaccagagtggacggcagaaagctgctgctgtacagagagcagctggtgaagatcctgcagagaaccctgcacctgacctgcaagcagggctacaccctgagctgcaacctgctgcaccacctgctgagaagcaccaccctgatctaccccaccgagtactgcagcgtgcccggcggcttcgacaagccccccagcgagtacttccccatcaaggactggggcaagcccggcgacctgtggaacctgggcatccagtggcacgtgcccagcagcgaggaggtgagcttcgccttctacctgctggacagcttcctgcagcccgagctggtgaagctgcagcactgcggcgacggcaagctggagatgagcagagacgacatcctgcagagcctgaccatcgtgcacaactgcctgatcggcagcggcaacctgctgccccccctgaagggcgagcccgtgaccaacctggtgcccagcatggtgagcctggaggagaccaagctgtacaccggcctggagtacgacctgagcagagagaaccacagagaggtgatcgccaccgtgatcagaaagctgctgaaccacatcctggacaacagcgaggacgacaccaagagcctgttcctgatcatcaagatcatcggcgacctgctgcagttccagggcagccacaagcacgagttcgacagcagatggaagagcttcaacctggtgaagaagagcatggagaacagactgcacggcaagaagcagcacatcagagccctgctgatcgacagagtgatgctgcagcacgagctgagaaccctgaccgtggagggctgcgagtacaagaagatccaccaggacatgatcagagacctgctgagactgagcaccagcagctacagccaggtgagaaacaaggcccagcagaccttcttcgccgccctgggcgcctacaacttctgctgcagagacatcatccccctggtgctggagttcctgagacccgacagacagggcgtgacccagcagcagttcaagggcgccctgtactgcctgctgggcaaccacagcggcgtgtgcctggccaacctgcacgactgggactgcatcgtgcagacctggcccgccatcgtgagcagcggcctgagccaggccatgagcctggagaagcccagcatcgtgagactgttcgacgacctggccgagaagatccacagacagtacgagaccatcggcctggacttcaccatccccaagagctgcgtggagatcgccgagctgctgcagcagagcaagaaccccagcatcaaccagatcctgctgagccccgagaagatcaaggagggcatcaagagacagcaggagaagaacgccgacgccctgagaaactacgagaacctggtggacaccctgctggacggcgtggagcagagaaacctgccctggaagttcgagcacatcggcatcggcctgctgagcctgctgctgagagacgacagagtgctgcccctgagagccatcagattcttcgtggagaacctgaaccacgacgccatcgtggtgagaaagatggccatcagcgccgtggccggcatcctgaagcagctgaagagaacccacaagaagctgaccatcaacccctgcgagatcagcggctgccccaagcccacccagatcatcgccggcgacagacccgacaaccactggctgcactacgacagcaagaccatccccagaaccaagaaggagtgggagagcagctgcttcgtggagaagacccactggggctactacacctggcccaagaacatggtggtgtacgccggcgtggaggagcagcccaagctgggcagaagcagagaggacatgaccgaggccgagcagatcatcttcgaccacttcagcgaccccaagttcgtggagcagctgatcaccttcctgagcctggaggacagaaagggcaaggacaagttcaaccccagaagattctgcctgttcaagggcatcttcagaaacttcgacgacgccttcctgcccgtgctgaagccccacctggagcacctggtggccgacagccacgagagcacccagagatgcgtggccgagatcatcgccggcctgatcagaggcagcaagcactggaccttcgagaaggtggagaagctgtgggagctgctgtgccccctgctgagaaccgccctgagcaacatcaccgtggagacctacaacgactggggcgcctgcatcgccaccagctgcgagagcagagaccccagaaagctgcactggctgttcgagctgctgctggagagccccctgagcggcgagggcggcagcttcgtggacgcctgcagactgtacgtgctgcagggcggcctggcccagcaggagtggagagtgcccgagctgctgcacagactgctgaagtacctggagcccaagctgacccaggtgtacaagaacgtgagagagagaatcggcagcgtgctgacctacatcttcatgatcgacgtgagcctgcccaacaccacccccaccatcagcccccacgtgcccgagttcaccgccagaatcctggagaagctgaagcccctgatggacgtggacgaggagatccagaaccacgtgatggaggagaacggcatcggcgaggaggacgagagaacccagggcatcaagctgctgaagaccatcctgaagtggctgatggccagcgccggcagaagcttcagcaccgccgtgaccgagcagctgcagctgctgcccctgttcttcaagatcgcccccgtggagaacgacaacagctacgacgagctgaagagagacgccaagctgtgcctgagcctgatgagccagggcctgctgtacccccaccaggtgcccctggtgctgcaggtgctgaagcagaccgccagaagcagcagctggcacgccagatacaccgtgctgacctacctgcagaccatggtgttctacaacctgttcatcttcctgaacaacgaggacgccgtgaaggacatcagatggctggtgatcagcctgctggaggacgagcagctggaggtgagagagatggccgccaccaccctgagcggcctgctgcagtgcaacttcctgaccatggacagccccatgcagatccacttcgagcagctgtgcaagaccaagctgcccaagaagagaaagagagaccccggcagcgtgggcgacaccatccccagcgccgagctggtgaagagacacgccggcgtgctgggcctgggcgcctgcgtgctgagcagcccctacgacgtgcccacctggatgccccagctgctgatgaacctgagcgcccacctgaacgacccccagcccatcgagatgaccgtgaagaagaccctgagcaacttcagaagaacccaccacgacaactggcaggagcacaagcagcagttcaccgacgaccagctgctggtgctgaccgacctgctggtgagcccctgctactacgcctag

SEQ ID NO: 181097 - DNA, 2964 bp, Artificial Sequence
  derived and/or modified sequence
atgggcgagaacctggccaagaagatcatgttcttcctgctgaccatcaagctgatcctgaaccacatcctggacaacagcgaggacgacaccaagagcctgttcctgatcatcaagatcatcggcgacctgctgcagttccagggcagccacaagcacgagttcgacagcagatggaagagcttcaacctggtgaagaagagcatggagaacagactgcacggcaagaagcagcacatcagagccctgctgatcgacagagtgatgctgcagcacgagctgagaaccctgaccgtggagggctgcgagtacaagaagatccaccaggacatgatcagagacctgctgagactgagcaccagcagctacagccaggtgagaaacaaggcccagcagaccttcttcgccgccctgggcgcctacaacttctgctgcagagacatcatccccctggtgctggagttcctgagacccgacagacagggcgtgacccagcagcagttcaagggcgccctgtactgcctgctgggcaaccacagcggcgtgtgcctggccaacctgcacgactgggactgcatcgtgcagacctggcccgccatcgtgagcagcggcctgagccaggccatgagcctggagaagcccagcatcgtgagactgttcgacgacctggccgagaagatccacagacagtacgagaccatcggcctggacttcaccatccccaagagctgcgtggagatcgccgagctgctgcagcagagcaagaaccccagcatcaaccagatcctgctgagccccgagaagatcaaggagggcatcaagagacagcaggagaagaacgccgacgccctgagaaactacgagaacctggtggacaccctgctggacggcgtggagcagagaaacctgccctggaagttcgagcacatcggcatcggcctgctgagcctgctgctgagagacgacagagtgctgcccctgagagccatcagattcttcgtggagaacctgaaccacgacgccatcgtggtgagaaagatggccatcagcgccgtggccggcatcctgaagcagctgaagagaacccacaagaagctgaccatcaacccctgcgagatcagcggctgccccaagcccacccagatcatcgccggcgacagacccgacaaccactggctgcactacgacagcaagaccatccccagaaccaagaaggagtgggagagcagctgcttcgtggagaagacccactggggctactacacctggcccaagaacatggtggtgtacgccggcgtggaggagcagcccaagctgggcagaagcagagaggacatgaccgaggccgagcagatcatcttcgaccacttcagcgaccccaagttcgtggagcagctgatcaccttcctgagcctggaggacagaaagggcaaggacaagttcaaccccagaagattctgcctgttcaagggcatcttcagaaacttcgacgacgccttcctgcccgtgctgaagccccacctggagcacctggtggccgacagccacgagagcacccagagatgcgtggccgagatcatcgccggcctgatcagaggcagcaagcactggaccttcgagaaggtggagaagctgtgggagctgctgtgccccctgctgagaaccgccctgagcaacatcaccgtggagacctacaacgactggggcgcctgcatcgccaccagctgcgagagcagagaccccagaaagctgcactggctgttcgagctgctgctggagagccccctgagcggcgagggcggcagcttcgtggacgcctgcagactgtacgtgctgcagggcggcctggcccagcaggagtggagagtgcccgagctgctgcacagactgctgaagtacctggagcccaagctgacccaggtgtacaagaacgtgagagagagaatcggcagcgtgctgacctacatcttcatgatcgacgtgagcctgcccaacaccacccccaccatcagcccccacgtgcccgagttcaccgccagaatcctggagaagctgaagcccctgatggacgtggacgaggagatccagaaccacgtgatggaggagaacggcatcggcgaggaggacgagagaacccagggcatcaagctgctgaagaccatcctgaagtggctgatggccagcgccggcagaagcttcagcaccgccgtgaccgagcagctgcagctgctgcccctgttcttcaagatcgcccccgtggagaacgacaacagctacgacgagctgaagagagacgccaagctgtgcctgagcctgatgagccagggcctgctgtacccccaccaggtgcccctggtgctgcaggtgctgaagcagaccgccagaagcagcagctggcacgccagatacaccgtgctgacctacctgcagaccatggtgttctacaacctgttcatcttcctgaacaacgaggacgccgtgaaggacatcagatggctggtgatcagcctgctggaggacgagcagctggaggtgagagagatggccgccaccaccctgagcggcctgctgcagtgcaacttcctgaccatggacagccccatgcagatccacttcgagcagctgtgcaagaccaagctgcccaagaagagaaagagagaccccggcagcgtgggcgacaccatccccagcgccgagctggtgaagagacacgccggcgtgctgggcctgggcgcctgcgtgctgagcagcccctacgacgtgcccacctggatgccccagctgctgatgaacctgagcgcccacctgaacgacccccagcccatcgagatgaccgtgaagaagaccctgagcaacttcagaagaacccaccacgacaactggcaggagcacaagcagcagttcaccgacgaccagctgctggtgctgaccgacctgctggtgagcccctgctactacgcctag

SEQ ID NO: 181098 - protein, 1217 aa, Artificial Sequence
  derived and/or modified sequence
MKGMSHEPKSPSLGMLSTATRTTATVNPLTPSPLNGALVPSGSPATSSALSAQAAPSSSFAAALRKLAKQAEEPRGSSLSSESSPVSSPATNHSSPASTPKRVPMGPIIVPPGGHSVPSTPPVVTIAPTKTVNGVWRSESRQDAGSRSSSGGRERLIVEPPLPQEKAGGPAIPSHLLSTPYPFGLSPSSVVQDSRFPPLNLQRPVHHVVPPSTVTEDYLRSFRPYHTTDDLRMSSLPPLGLDPATAAAYYHPSYLAPHPFPHPAFRMDDSYCLSALRSPFYPIPTPGSLPPLHPSAMHLHLSGVRYPPELSHSSLAALHSERMSGLSAERLQMDEELRREREREREREREREADREREKEREREREKEREQEKEREREKERERELERQREQRAREKELLAAKALEPSFLPVAELHGLRGHATEERGKPSEQLTPTRAEKLKDAGLQAPKPVQHPLHPVPTPHHTVPSLISNHGIFSLPSSSAATALLIQRTNEEEKWLARQRRLRQEKEDRQSQVSEFRQQVLEQHLDMGRPPVPAEAEHRPESTTRPGPNRHEPGGRDPPQHFGGPPPLISPKPQLHAAPTALWNPVSLMDNTLETRRAESHSLHSHPAAFEPSRQAAVPLVKVERVFCPEKAEEGPRKREPAPLDKYQPPPPPPREGGSLEHQPFLPGPGPFLAELEKSTQTILGQQRASLPQAATFGELSGPLKPGSPYRPPVPRAPDPAYIYDEFLQQRRRLVSKLDLEERRRREAQEKGYYYDLDDSYDESDEEEVRAHLRCVAEQPPLKLDTSSEKLEFLQLFGLTTQQQKEELVAQKRRKRRRMLRERSPSPPTIQSKRQTPSPRLALSTRYSPDEMNNSPNFEEKKKFLTIFNLTHISAEKRKDKERLVEMLRAMKQKALSAAVADSLTNSPRDSPAVSLSEPATQQASLDVEKPVGVAASLSDIPKAAEPGKLEQVRPQELSRVQELAPASGEKARLSEAPGGKKSLSMLHYIRGAAPKDIPVPLSHSTNGKSKPWEPFVAEEFAHQFHESVLQSTQKALQKHKGSVAVLSAEQNHKVDTSVHYNIPELQSSSRAPPPQHNGQQEPPTARKGPPTQELDRDSEEEEEEDDEDGEDEEEVPKRKWQGIEAVFEAYQEHIEEQNLERQVLQTQCRRLEARHYSLSLTAEQLSHSVAELRSQKQKMVSERERLQAELDHLRKCLALPAMHWPRGYLKGYPR

SEQ ID NO: 181099 - protein, 1177 aa, Artificial Sequence
  derived and/or modified sequence
MWRWIRQQLGFDPPHQSDTRTIYVANRFPQNGLYTPQKFIDNRIISSKYTVWNFVPKNLFEQFRRVANFYFLIIFLVQLMIDTPTSPVTSGLPLFFVITVTAIKQGYEDWLRHNSDNEVNGAPVYVVRSGGLVKTRSKNIRVGDIVRIAKDEIFPADLVLLSSDRLDGSCHVTTASLDGETNLKTHVAVPETALLQTVANLDTLVAVIECQQPEADLYRFMGRMIITQQMEEIVRPLGPESLLLRGARLKNTKEIFGVAVYTGMETKMALNYKSKSQKRSAVEKSMNTFLIIYLVILISEAVISTILKYTWQAEEKWDEPWYNQKTEHQRNSSKILRFISDFLAFLVLYNFIIPISLYVTVEMQKFLGSFFIGWDLDLYHEESDQKAQVNTSDLNEELGQVEYVFTDKTGTLTENEMQFRECSINGMKYQEINGRLVPEGPTPDSSEGNLSYLSSLSHLNNLSHLTTSSSFRTSPENETELIKEHDLFFKAVSLCHTVQISNVQTDCTGDGPWQSNLAPSQLEYYASSPDEKALVEAAARIGIVFIGNSEETMEVKTLGKLERYKLLHILEFDSDRRRMSVIVQAPSGEKLLFAKGAESSILPKCIGGEIEKTRIHVDEFALKGLRTLCIAYRKFTSKEYEEIDKRIFEARTALQQREEKLAAVFQFIEKDLILLGATAVEDRLQDKVRETIEALRMAGIKVWVLTGDKHETAVSVSLSCGHFHRTMNILELINQKSDSECAEQLRQLARRITEDHVIQHGLVVDGTSLSLALREHEKLFMEVCRNCSAVLCCRMAPLQKAKVIRLIKISPEKPITLAVGDGANDVSMIQEAHVGIGIMGKEGRQAARNSDYAIARFKFLSKLLFVHGHFYYIRIATLVQYFFYKNVCFITPQFLYQFYCLFSQQTLYDSVYLTLYNICFTSLPILIYSLLEQHVDPHVLQNKPTLYRDISKNRLLSIKTFLYWTILGFSHAFIFFFGSYLLIGKDTSLLGNGQMFGNWTFGTLVFTVMVITVTVKMALETHFWTWINHLVTWGSIIFYFVFSLFYGGILWPFLGSQNMYFVFIQLLSSGSAWFAIILMVVTCLFLDIIKKVFDRHLHPTSTEKAQLTETNAGIKCLDSMCCFPEGEAACASVGRMLERVIGRCSPTHISRSWSASDPFYTNDRSILTLSTMDSSTC

SEQ ID NO: 181100 - DNA, 3534 bp, Artificial Sequence
  derived and/or modified sequence
atgtggcgctggatccgccagcagctcggattcgaccccccccaccagtcagacacccgcaccatttatgtggccaatcgttttccacagaatggtctttatacgcctcagaagtttatagacaaccgtattattagctccaagtatacggtctggaatttcgtccctaagaatctgttcgagcaatttcgacgagtggccaatttttactttctgatcatctttctcgtccagctgatgattgataccccaacaagtccagtcaccagtggcctgcctctcttcttcgtgatcactgttaccgccattaagcagggttacgaggattggcttaggcacaactcggataatgaagtcaatggggcccctgtgtacgtcgtgcgctccgggggtcttgttaaaacccggagcaagaacatcagagtgggtgatattgtacgcattgccaaggatgagatctttccagcagaccttgttctcctctcgtccgaccggttggacgggagttgtcacgtgacgactgcatctctggacggcgagactaaccttaaaactcatgtcgcggtgccggagaccgccctgctgcagaccgtggcgaatttggacaccctggtggccgtcatcgaatgtcagcagccagaggccgatctatacaggtttatggggagaatgatcattactcagcagatggaggaaatcgtccggcccctgggaccagaatctcttctgctgagaggcgccaggctgaaaaataccaaagaaatttttggcgttgcggtatatacagggatggagacaaagatggccctaaattacaagagtaagtctcagaaacggtcagccgtagagaaatctatgaataccttcttgatcatctaccttgttatccttattagcgaagccgtgatctctaccatcctgaaatacacctggcaggctgaagagaaatgggacgagccttggtacaatcaaaagaccgagcaccaaagaaattcatctaaaattctcagattcatcagcgacttcctggccttcttggtgctgtataactttatcatccccataagcctttatgtcaccgttgagatgcagaaattcctgggctccttttttatcggatgggatctggatctgtatcatgaggaatccgatcagaaagcccaggtcaacacctctgatctcaacgaggagttgggccaagtggagtacgtctttacagacaagacaggcacactcacagaaaacgaaatgcagttccgggaatgcagcatcaatggcatgaaatatcaggagattaacggacgcctggtgcctgagggcccaacaccagacagtagcgaagggaatcttagttacctgtctagtttgtcacacctgaacaacctttcacacttgactacttccagctcattccggaccagtcccgagaatgaaaccgaacttatcaaggagcatgatctgttttttaaggctgtcagcctgtgccatacagtccagatttcaaatgtccagacagattgcaccggcgatggtccctggcagagcaacttagcacccagtcagcttgagtattatgcctcatcccccgacgagaaggcgctggtcgaagctgctgcccgcattgggatcgtgtttattgggaactctgaggaaacgatggaggtaaaaactttgggcaagttggaacgttacaaactgttacatatcttggagtttgactcagatagaagacgaatgagtgttattgtacaggctcctagtggcgaaaagctgctgtttgccaagggggccgagtcttccatcctccctaaatgcattggaggcgaaattgagaaaacccggatccacgtggatgagttcgccttgaagggtctcagaaccttgtgtatcgcctaccgcaaattcacctctaaagagtacgaggagatagataaaaggattttcgaagctcgaacagccttgcaacaacgcgaggaaaaactagctgccgtgtttcagtttattgaaaaggacctcatactgctgggagctaccgccgtagaagataggcttcaagataaagtacgagagaccattgaagccctacgtatggcgggaataaaggtatgggtgctaaccggggataagcatgaaaccgccgtttctgtgtcgctgtcatgcggacatttccatcgaaccatgaacatccttgaattgattaaccaaaagagcgattccgaatgcgcagagcaactccgccagctggccaggagaatcactgaggaccatgtaatacagcatggtcttgtcgtagatggtacctctctgtctctcgcgctgagagaacatgaaaagctgttcatggaagtttgtcggaactgcagcgcagttctgtgctgcagaatggcccccctgcagaaagccaaggtgattaggctcatcaaaatttccccagagaaaccaataacactggccgtcggtgatggcgccaacgatgtatccatgatccaggaagcacacgtcgggattggtataatggggaaggagggccgacaggctgcacgaaattcagactatgcaattgcccggtttaaattcctttcaaagcttctgtttgtgcatgggcatttctactatattcggattgccacactcgttcagtacttcttctacaaaaatgtctgctttataaccccacagtttctctatcaattttactgcctctttagccagcagacgctgtatgactcggtgtatctcaccctttataatatatgctttacctcgcttcccatacttatctactctttgttggagcagcatgttgatccccatgtgctccagaataagcccacgctctatcgggacatctccaagaaccgtttgctaagcatcaaaacttttctttattggactatcctggggttcagccatgccttcatcttcttctttgggtcttacctactgattggcaaagatacctcattgctgggtaacggacagatgttcggtaactggacattcgggacgcttgtgtttacagtcatggtgatcactgtgaccgtaaagatggcacttgaaacacatttctggacctggattaaccacttggtcacctggggcagcattattttttatttcgtgttcagcttattctacggtggaatcctttggcccttcctgggctcgcaaaacatgtattttgtcttcatacagctgcttagttccggttccgcctggtttgcaattatactgatggtggtgacttgtctctttctggacattatcaagaaggtgttcgatcggcatctccatccgacttccactgaaaaggcacaactgaccgaaactaacgctggcatcaaatgtcttgactccatgtgctgctttccggagggcgaagccgcctgtgcctcggtgggccgaatgctcgaaagagtgattggccggtgcagcccaacccacatctctaggagctggtcggcctcagacccattttacactaacgatcgctccatcctgacattgagcactatggattcatctacctgttag

SEQ ID NO: 181101 - DNA, 3534 bp, Artificial Sequence
  derived and/or modified sequence
atgtggcgctggatccggcagcagctgggctttgatcctccccaccagagcgacaccaggaccatctacgtggccaaccgcttcccccagaatggcctgtacaccccccagaagttcatcgacaaccgcatcatcagcagcaagtacacagtgtggaactttgtgcccaagaacctgtttgagcagttccggcgggtggccaacttctacttcctgatcatcttcctggtgcagctgatgattgacacccccaccagccctgtgaccagcggcctgcccctcttcttcgtcatcaccgtgacagccatcaagcagggctatgaggactggctgcggcacaacagcgacaatgaggtgaatggagcccctgtgtatgtggtgcgcagcggcggcctggtgaagaccaggagcaagaacatccgggtgggggacatcgtgcgcatcgccaaggatgagatcttccctgctgacctggtgctgctgagcagtgaccggctggatggcagctgccacgtgaccacagccagcctggatggagagaccaacctgaagacccacgtggccgtgcctgagacagccctgctgcagacagtggccaacctggacaccctggtggccgtgattgagtgccagcagcctgaggccgacctgtaccgcttcatgggccgcatgatcatcacccagcagatggaggagatcgtgcggcccctgggccctgagagcctgctgctgcggggggcccggctgaagaacaccaaggagatcttcggcgtggccgtgtacacaggcatggagaccaagatggccctgaactacaagagcaagagccagaagaggtctgctgtggagaagtccatgaacaccttcctgatcatctacctggtgatcctgatcagcgaggccgtcatcagcaccatcctgaagtacacctggcaggccgaggagaagtgggatgagccctggtacaaccagaagacagagcaccagaggaacagcagcaagatcctgcgcttcatcagtgacttcctggccttcctggtgctgtacaacttcatcatccccatcagcctgtatgtgacagtggagatgcagaagttcctgggcagcttcttcatcggctgggacctggacctgtaccacgaggagagtgaccagaaggcccaggtgaacaccagtgacctgaatgaggagctgggccaggtggagtatgtgttcacagacaagacaggcaccctgacagaaaatgagatgcagttcagagaatgttccatcaatggcatgaagtaccaggagatcaatggccgcctggtgcctgagggccccaccccagacagcagcgagggcaacctgagctacctgagcagcctgagccacctgaacaacctgagccacctgaccaccagcagcagcttccgcaccagcccagaaaatgaaacagagctgatcaaggagcatgacctcttcttcaaggctgtgtccctgtgccacacagtgcagatcagcaatgtgcagacagactgcacaggagatggcccctggcagagcaacctggcccccagccagctggagtactatgccagcagcccagatgagaaggccctggtggaggccgccgccagaattggaattgtgttcatcggcaacagcgaggagaccatggaggtgaagaccctgggcaagctggagcgctacaagctgctgcacatcctggagtttgacagcgacagaagaaggatgtctgtcatcgtgcaggcccccagcggggagaagctgctgtttgccaagggagctgagagcagcatcctgcccaagtgcatcggcggggagattgagaagacccgcatccacgtggatgaatttgccctgaagggcctgcggaccctgtgcatcgcctacaggaagttcaccagcaaggagtatgaggagattgacaagaggatctttgaggccaggacagccctgcagcagcgggaggagaagctggccgctgtgttccagttcatcgagaaggacctgatcctgctgggcgccacagctgtggaggaccggctgcaggacaaggtgcgggagaccatcgaggccctgaggatggccggcatcaaggtgtgggtgctgaccggggacaagcatgaaacagctgtgtctgtgtccctgagctgtggccacttccacaggaccatgaacatcctggagctgatcaaccagaagagtgacagtgaatgtgccgagcagctgcggcagctggcccggcgcatcacagaggaccacgtgatccagcacggcctggtggtggatggcaccagcctgagcctggccctgcgggagcacgagaagctgttcatggaggtgtgcaggaactgcagcgctgtgctgtgctgcaggatggcccccctgcagaaggccaaggtgatccgcctcatcaagatcagccctgagaagcccatcaccctggccgtgggagatggagccaatgatgtgtccatgatccaggaggcccacgtgggcatcggcatcatgggcaaggagggccggcaggccgccaggaacagcgactatgccatcgcccgcttcaagttcctgagcaagctgctgtttgtgcacggccacttctactacatcagaattgccaccctggtgcagtacttcttctacaagaatgtgtgcttcatcaccccccagttcctgtaccagttctactgcctcttcagccagcagaccctgtatgacagcgtgtacctgaccctgtacaacatctgcttcaccagcctgcccatcctgatctacagcctgctggagcagcacgtggacccccacgtgctgcagaacaagcccaccctgtacagagacatcagcaagaaccggctgctgagcatcaagaccttcctgtactggaccatcctgggcttcagccacgccttcatcttcttcttcggcagctacctgctgattggcaaggacaccagcctgctgggcaatggccagatgtttggaaactggaccttcggcaccctggtgttcaccgtgatggtgatcaccgtgacagtgaagatggccctggagacccacttctggacctggatcaaccacctggtgacctggggcagcatcatcttctactttgtgttcagcctcttctacggcggcatcctgtggcccttcctgggcagccagaacatgtactttgtgttcatccagctgctgagcagcggcagcgcctggtttgccatcatcctgatggtggtgacctgcctcttcctggacatcatcaagaaggtgtttgacagacacctgcaccccaccagcacagagaaggcccagctgacagagaccaatgccggcatcaagtgcctggacagcatgtgctgcttccctgagggggaggccgcctgtgcctctgtgggccgcatgctggagcgggtgattggccgctgcagccccacccacatcagccgctcctggagcgccagtgaccccttctacaccaatgacaggagcatcctgaccctgagcaccatggacagcagcacctgctag

SEQ ID NO: 181102 - DNA, 3534 bp, Artificial Sequence
  derived and/or modified sequence
atgtggcggtggatccggcagcagctgggcttcgaccccccccaccaatccgacacgagaaccatctacgtggccaataggtttccccagaatgggctctacactccccagaaatttatagataataggattatatcatctaagtacaccgtctggaactttgtcccaaaaaacttattcgagcagtttagacgcgtcgctaacttctactttctcatcatcttcctggtgcagctgatgatcgacacaccaacttcacctgtgacatccggactgcctcttttttttgttataaccgtgactgctattaagcagggctacgaggactggctgaggcacaactccgacaatgaagtcaacggagcacccgtctatgttgtgaggagcgggggcctcgtgaagacaaggtcaaagaacattagagtgggcgacatcgttcgcatcgccaaggacgagatcttccccgcagacctcgtccttctgtcctccgaccgcctggatggttcttgtcatgtcaccaccgccagccttgacggtgaaaccaatctgaagacgcatgtcgcggttccggaaacggccctattacaaactgtcgccaacctcgacaccctggtggccgtcattgaatgtcagcagccagaagccgatctatacaggttcatggggagaatgattataacgcagcaaatggaggagattgtgcggccactggggcccgaatcactgttgctaaggggagctcgcttgaagaatacaaaggaaatcttcggggtcgccgtttacactggcatggagaccaagatggctctgaactacaagagcaagagtcagaagcgttctgctgtggagaagtcaatgaacacttttttgatcatctacctggtgatcttgatctccgaggcagtgatttccacaatcctgaagtacacgtggcaggcagaagaaaagtgggacgaaccctggtataatcagaagactgagcatcaacggaatagtagtaagatcctgcggttcatctccgattttctcgccttcctggtgctctataatttcatcatcccaatctcgctgtacgtgacagtggagatgcagaagtttcttggatccttcttcatcggctgggatcttgacctgtatcatgaggagtccgaccagaaggcacaggtgaatacttcagacctgaacgaagaattaggccaagtggagtacgtttttacggacaaaacagggaccctgactgagaacgaaatgcagtttagggaatgcagtatcaatggaatgaaataccaagaaatcaacgggagactcgtgccagagggccctactcccgactcgtcggagggcaacttatcgtatttgtctagtctctctcatctaaacaacttgtcccaccttacgacttcctcctcctttcgcacctccccagagaacgagactgaacttatcaaggagcacgaccttttctttaaggcggtgtcgctgtgtcatacggttcaaatttccaacgtgcaaaccgactgtactggcgatggcccatggcaatcaaatctggcgccctctcagctggaatactacgcgtccagtccagacgaaaaagcccttgtggaagccgctgcacgaatcggcattgtcttcattggaaactcggaagaaactatggaggttaaaaccctaggcaagctcgaacgctacaaacttttacatattctcgagttcgactctgacagaaggagaatgtctgtgatagtgcaggccccttcaggtgagaaactgctgtttgcaaaaggcgctgaatcctctattttgcctaagtgcatcggaggcgagatcgaaaaaacccggattcacgtcgatgagttcgctctgaagggactgaggaccctctgtatcgcgtacagaaagttcaccagcaaagagtacgaggagatagacaaaagaatctttgaggcacgtacggctttacagcagcgagaagagaagctggccgccgtctttcagtttatagagaaggacctgatcctcctgggcgccactgccgtggaggatcgactccaggataaggtacgggaaactatcgaggccttgcgtatggctggcatcaaggtgtgggtgttaaccggcgacaagcatgagacagccgtcagcgtgtccctgtcttgcgggcacttccatcgaaccatgaatattcttgagctgataaaccaaaagagcgattcagaatgcgctgagcagctgaggcagctggcccgccgtattacagaggaccacgtaatccaacacggccttgtcgtggacggtacgtccctgtccttggcgctgcgggagcacgagaagctcttcatggaggtgtgcagaaactgctccgcagtcctgtgctgccggatggctccgttgcagaaagcaaaggttatcagactgatcaagatcagccctgaaaagcccatcaccctagctgtgggcgatggggctaatgacgtcagcatgattcaggaggcccacgtcggcatcggaattatgggaaaggagggcagacaggctgccaggaactccgactacgccatcgcccgctttaagttccttagtaaactgttatttgtgcacgggcacttttattatatccgcattgccaccctggttcagtatttcttttacaagaacgtgtgtttcataaccccccagtttctttaccagttctattgcctgttctcacagcagacattgtatgactccgtgtatctgacactgtacaatatttgcttcacatcgctaccaatactgatttatagcctcttagagcagcatgtggaccctcacgtactccagaacaagcctactctgtatagagacatctccaagaaccggctgctgtccatcaagacgtttctgtactggaccattttgggcttttcccatgcctttatttttttcttcggtagctatctgcttataggcaaagacacaagcctgttgggaaacggccagatgttcggaaactggaccttcgggactttggtgttcacagtcatggtcattacagtaactgtgaagatggcgctcgagacccacttctggacctggatcaatcatctcgtgacctggggatctattatcttttatttcgtctttagcctcttctacgggggtatcttatggccattcttaggctctcaaaacatgtattttgtgttcatccaactgctcagttccggttccgcctggttcgcaatcatattaatggtggtaacctgtctgtttttggatatcatcaaaaaagtgtttgacagacacctgcatcctacaagcaccgagaaagctcagctaacggaaacgaatgccggaatcaagtgtttggacagtatgtgttgcttccctgagggtgaggcagcctgtgcctctgtcggacgtatgctggagcgggtcatcggccgatgttctcccactcatatctcacgtagttggtccgcatcagacccattctacacgaatgatcgaagcatcctaaccctgtcgacaatggattctagcacctgctag

SEQ ID NO: 181103 - DNA, 3534 bp, Artificial Sequence
  derived and/or modified sequence
atgtggaggtggatcaggcaacagttggggttcgatccccctcaccaatcggacacccgcacaatatacgtggcaaataggttcccccaaaacggactttacactccacagaagtttatagacaatagaatcattagttccaaatacacagtttggaacttcgtgccaaagaatctttttgaacagttccggagagtcgcaaatttctattttctgatcattttccttgttcaactgatgatcgacacgccaaccagtccagtgacctccggactgccactgttcttcgtaattactgtgaccgccataaagcaggggtacgaagactggctgcggcataactctgataacgaagtgaacggagccccagtgtatgtggtgagaagtggtggactcgtcaagactcggtcaaagaatattcgggtcggggatatagttcggattgctaaggatgagatctttccggctgatctagtcctgttgtcttccgaccgcctggacggaagttgccacgtgaccactgcaagtctggatggcgaaaccaacctgaagactcatgtggcggtccccgagaccgcgctgcttcagaccgtcgccaatctggacacattagtggcggtcattgagtgccaacagcctgaggccgatctgtatcgcttcatgggacgaatgatcattacccaacaaatggaagagattgttcggcctctcggacccgagagcttgctgcttagaggcgcacggctcaaaaacacaaaagagatcttcggcgttgctgtgtacacaggcatggaaactaagatggccctcaactataagagtaagagccaaaaaaggtcggcagtcgaaaagtcgatgaataccttcttgattatatacctcgtgatcctcatttctgaggctgtgatttccactattcttaaatacacatggcaggcagaggaaaagtgggatgagccctggtacaaccagaaaacagagcaccagagaaattcatcaaagatcctacggtttatctccgactttctagcatttctcgtcctgtacaattttattatccctatttccctttatgtcaccgtggagatgcagaaattcctgggaagtttcttcattgggtgggatcttgatctgtatcacgaagaatctgaccagaaggcccaggtgaatacctccgatttgaacgaggaattagggcaggtagaatatgtgtttaccgacaagacgggaacactcactgagaacgaaatgcagtttcgagagtgtagtattaatggcatgaaatatcaggagattaatggacggttagtgcccgaaggacccactccagatagctcagaaggcaacctttcttacttatcttctctgagccacttaaataatctgagtcacctcacgactagttcctcattcagaacaagtccggagaacgaaaccgagctcattaaggaacatgacctgtttttcaaagccgtcagcctgtgtcataccgtccagatctcgaacgtgcagacagactgtaccggagacggcccatggcaatctaacctagctccatctcagttagagtactacgcgagcagtcccgacgaaaaagccctggtggaggcagctgctagaattgggatcgtcttcatcggtaactccgaggaaactatggaagtcaagactctaggcaagctcgagaggtataaattacttcacattctcgaattcgattctgacagacggaggatgtccgtgattgtgcaggccccatccggggagaaattgctgttcgctaagggcgcagagtcaagcattctccccaagtgcatagggggtgaaatagagaaaaccagaattcatgtggatgagttcgcactgaagggcctgaggacgctgtgtatcgcataccgcaagttcacgagcaaggaatatgaggagatcgataagcggatattcgaagcacgtacagctcttcaacaaagggaggaaaagctggccgctgtattccagttcattgagaaggatttgatcctcttgggcgcaacggctgtggaggatcgcctccaggataaagtaagagaaaccatcgaagccctaagaatggccggtatcaaagtctgggttttgactggcgacaaacacgagactgcggtgtcggtgagcttatcttgcgggcatttccatcgtactatgaacatcctagagctcataaaccaaaagagtgactctgaatgcgctgaacagttgcgtcagctggccagacggatcacagaggatcatgtgatccagcacggattagttgttgacggcacatccctatcacttgccctcagggaacatgagaagctatttatggaagtctgtcgcaactgtagcgccgtgctttgttgcagaatggcacccctgcagaaagcaaaggttatccgccttatcaaaatcagccctgaaaaaccaataactctggcggtcggagacggagccaacgacgtctcaatgatccaggaggctcatgttggcatcggcattatgggcaaagagggacggcaggctgccaggaattcggactatgcaattgctcgatttaagtttctttccaaacttctattcgtccacggccatttttattatattagaattgctacgctcgtgcagtactttttctacaaaaatgtctgctttattacaccccagttcctgtaccaattttattgcctcttttcgcagcaaaccctctacgattcagtttacctcacgctctacaatatttgttttacaagtcttccaatactgatatacagtctcctcgaacagcatgtggatccacacgtgttacagaacaagccaactctttaccgagatataagtaagaacaggctactgagcatcaaaacctttctatattggaccattctgggattcagccacgctttcatattcttcttcgggagttacctcttaatcggtaaggatacgagcctccttggaaatggccaaatgttcggtaattggactttcggcaccctcgtctttactgtaatggtgatcacggtcacagtgaaaatggctctggaaacccatttctggacatggatcaatcatctcgtaacctggggatctattatcttttattttgtattttcactgttctatggaggcattctctggcctttcctgggctcacagaatatgtacttcgtatttatccagttactcagctccgggagtgcctggtttgctataatactgatggttgtgacctgtctgtttttggatatcatcaagaaggttttcgaccgccatctacacccgacatcaacagagaaagcccagttgactgaaaccaacgccggaattaaatgcctggactcaatgtgctgtttccctgaaggggaggcggcatgcgcctcagtcggccgtatgctggagcgagttatcggacgttgtagccccacccatataagccggtcatggtccgcatccgatcccttctacactaacgatagaagcatactgacgctgagtacaatggactcttctacctgctag

SEQ ID NO: 181104 - DNA, 7325 bp, Artificial Sequence
  derived and/or modified sequence
ggtcaataatgaaggtggctgcggcgcggcggcaggctcagctgcgccgggcgggggcggcgccggggccgcgcctgtaggactcggggccgacgccgcgggatggggacgcggcgcggggagtgaggcagtggcggcggcggcggtaagcggaacttcggcccgaggggctcgcccgctcccgcctctgtcttgtcggcctccacctgcagccccgcggcccccgcgccccgcgggacccggacggcgacgacgggggaatgtggcgctggatccggcagcagctgggttttgacccaccacatcagagtgacacaagaaccatctacgtagccaacaggtttcctcagaatggcctttacacacctcagaaatttatagataacaggatcatttcatctaagtacactgtgtggaattttgttccaaaaaatttatttgaacagttcagaagagtggcaaacttttattttcttattatatttttggttcagcttatgattgatacacctaccagtccagttaccagtggacttccattattctttgtgataacagtaactgccataaagcagggatatgaagattggttacggcataactcagataatgaagtaaatggagctcctgtttatgttgttcgaagtggtggccttgtaaaaactagatcaaaaaacattcgggtgggtgatattgttcgaatagccaaagatgaaatttttcctgcagacttggtgcttctgtcctcagatcgactggatggttcctgtcacgttacaactgctagtttggacggagaaactaacctgaagacacatgtggcagttccagaaacagcattattacaaacagttgccaatttggacactctagtagctgtaatagaatgccagcaaccagaagcagacttatacagattcatgggacgaatgatcataacccaacaaatggaagaaattgtaagacctctggggccggagagtctcctgcttcgtggagccagattaaaaaacacaaaagaaatttttggtgttgcggtatacactggaatggaaactaagatggcattaaattacaagagcaaatcacagaaacgatctgcagtagaaaagtcaatgaatacatttttgataatttatctagtaattcttatatctgaagctgtcatcagcactatcttgaagtatacatggcaagctgaagaaaaatgggatgaaccttggtataaccaaaaaacagaacatcaaagaaatagcagtaagattctgagatttatttcagacttccttgcttttttggttctctacaatttcatcattccaatttcattatatgtgacagtcgaaatgcagaaatttcttggatcattttttattggctgggatcttgatctgtatcatgaagaatcagatcagaaagctcaagtcaatacttccgatctgaatgaagagcttggacaggtagagtacgtgtttacagataaaactggtacactgacagaaaatgagatgcagtttcgggaatgttcaattaatggcatgaaataccaagaaattaatggtagacttgtacccgaaggaccaacaccagactcttcagaaggaaacttatcttatcttagtagtttatcccatcttaacaacttatcccatcttacaaccagttcctctttcagaaccagtcctgaaaatgaaactgaactaattaaagaacatgatctcttctttaaagcagtcagtctctgtcacactgtacagattagcaatgttcaaactgactgcactggtgatggtccctggcaatccaacctggcaccatcgcagttggagtactatgcatcttcaccagatgaaaaggctctagtagaagctgctgcaaggattggtattgtgtttattggcaattctgaagaaactatggaggttaaaactcttggaaaactggaacggtacaaactgcttcatattctggaatttgattcagatcgtaggagaatgagtgtaattgttcaggcaccttcaggtgagaagttattatttgctaaaggagctgagtcatcaattctccctaaatgtataggtggagaaatagaaaaaaccagaattcatgtagatgaatttgctttgaaagggctaagaactctgtgtatagcatatagaaaatttacatcaaaagagtatgaggaaatagataaacgcatatttgaagccaggactgccttgcagcagcgggaagagaaattggcagctgttttccagttcatagagaaagacctgatattacttggagccacagcagtagaagacagactacaagataaagttcgagaaactattgaagcattgagaatggctggtatcaaagtatgggtacttactggggataaacatgaaacagctgttagtgtgagtttatcatgtggccattttcatagaaccatgaacatccttgaacttataaaccagaaatcagacagcgagtgtgctgaacaattgaggcagcttgccagaagaattacagaggatcatgtgattcagcatgggctggtagtggatgggaccagcctatctcttgcactcagggagcatgaaaaactatttatggaagtttgcagaaattgttcagctgtattatgctgtcgtatggctccactgcagaaagcaaaagtaataagactaataaaaatatcacctgagaaacctataacattggctgttggtgatggtgctaatgacgtaagcatgatacaagaagcccatgttggcataggaatcatgggtaaagaaggaagacaggctgcaagaaacagtgactatgcaatagccagatttaagttcctctccaaattgctttttgttcatggtcatttttattatattagaatagctacccttgtacagtattttttttataagaatgtgtgctttatcacaccccagtttttatatcagttctactgtttgttttctcagcaaacattgtatgacagcgtgtacctgactttatacaatatttgttttacttccctacctattctgatatatagtcttttggaacagcatgtagaccctcatgtgttacaaaataagcccaccctttatcgagacattagtaaaaaccgcctcttaagtattaaaacatttctttattggaccatcctgggcttcagtcatgcctttattttcttttttggatcctatttactaatagggaaagatacatctctgcttggaaatggccagatgtttggaaactggacatttggcactttggtcttcacagtcatggttattacagtcacagtaaagatggctctggaaactcatttttggacttggatcaaccatctcgttacctggggatctattatattttattttgtattttccttgttttatggagggattctctggccatttttgggctcccagaatatgtattttgtgtttattcagctcctgtcaagtggttctgcttggtttgccataatcctcatggttgttacatgtctatttcttgatatcataaagaaggtctttgaccgacacctccaccctacaagtactgaaaaggcacagcttactgaaacaaatgcaggtatcaagtgcttggactccatgtgctgtttcccggaaggagaagcagcgtgtgcatctgttggaagaatgctggaacgagttataggaagatgtagtccaacccacatcagcagatcatggagtgcatcggatcctttctataccaacgacaggagcatcttgactctctccacaatggactcatctacttgttaaaggggcagtagtactttgtgggagccagttcacctcctttcctaaaattcagtgtgatcaccctgttaatggccacactagctctgaaattaatttccaaaatctttgtagtagttcatacccactcagagttataatggcaaacaaacagaaagcattagtacaagcccctcccaacacccttaatttgaatctgaacatgttaaaatttgagaataaagagacatttttcatctctttgtctggtttgtcccttgtgcttatgggactcctaatggcatttcagtctgttgctgaggccattatattttaatataaatgtagaaaaaagagagaaatcttagtaaagagtattttttagtattagcttgattattgactcttctatttaaatctgcttctgtaaattatgctgaaagtttgccttgagaactctatttttttattagagttatatttaaagcttttcatgggaaaagttaatgtgaatactgaggaattttggtccctcagtgacctgtgttgttaattcattaatgcattctgagttcacagagcaaattaggagaatcatttccaaccattatttactgcagtatggggagtaaatttataccaattcctctaactgtactgtaacacagcctgtaaagttagccatataaatgcaagggtatatcatatatacaaatcaggaatcaggtccgttcaccgaacttcaaattgatgtttactaatatttttgtgacagagtataaagaccctatagtgggtaaattagatactattagcatattattaatttaatgtctttatcattggatcttttgcatgctttaatctggttaacatatttaaatttgctttttttctctttacctgaaggctctgtgtatagtatttcatgacatcgttgtacagtttaactatatcaataaaaagtttggacagtatttaaatattgcaaatatgtttaattatacaaatcagaatagtatgggtaattaaatgaatacaaaaagaagagcctctttctgcagccgacttagacatgctcttccctttctataagctagattttagaataaagggtttcagttaataatcttattttcaggttatgtcatctaacttatagcaaactaccacaatacagtgagttctgccagtgtcccagtacaaggcatatttcaggtgtggctgtggaatgtaaaaatgctcaacttgtatcaggtaatgttagcaataaattaaatgctaagaatgattaatcgggtacatgttactgtaattaactcattgcacttcaaaacctaacttccatcctgaatttatcaagtagttcagtattgtcatttgtttttgttttattgaaaagtaatgttgtcttaagatttagaagtgattattagcttgagaactattacccagctctaagcaaataatgattgtatacatattaagataatggttaaatgcggttttaccaagttttcccttgaaaatgtaattcctttatggagatttattgtgcagccctaagcttccttcccatttcatgaatataaggcttctagaattggactggcaggggaaagaatggtagagacagaaattaagactttatccttgtttgcttgtaaactattattttcttgctaatgtaacatttgtctgttccagtgatgtaaggatattaagttattaagctaaatattaattttcaaaaatagtccttctttaacttagatatttcatagctggatttaggaagatctgttattctggaagtactaaaaagaataatacaacgtacaatgtctgcattcactaattcatgttccagaagaggaaataatgaagatatactcagtagagtactaggtgggaggatatggaaatttgctcataaaatctcttataaaacgtgcatataacaaaatgacacccagtaggcctgcattacatttacatgaccgtgtttatttgccatcaaataaactgagtactgacaccagacaaagactccaaagtcataaaatagcctatgaccaactgcagcaagacaggaggtcagctcgcctataatggtgcttaaagtgtgattgatgtaattttctgtactcaccatttgaagttagttaaggagaactttatttttttaaaaaaagtaaatggcaaccactagtgtgctcatcctgaactgttactccaaatccactccgtttttaaagcaaaattatcttgtgattttaagaaaagagttttctatttatttaagaaagtaacaatgcagtctgcaagctttcagtagttttctagtgctatattcatcctgtaaaactcttactacgtaaccagtaatcacaaggaaagtgtcccctttgcatatttctttaaaattctttctttggaaagtatgatgttgataattaacttacccttatctgccaaaaccagagcaaaatgctaaatacgttattgctaatcagtggtctcaaatcgatttgcctccctttgcctcgtctgagggctgtaagcctgaagatagtggcaagcaccaagtcagtttccaaaattgcccctcagctgctttaagtgactcagcaccctgcctcagcttcagcaggcgtaggctcaccctgggcggagcaaagtatgggccagggagaactacagctacgaagacctgctgtcgagttgagaaaaggggagaatttatggtctgaattttctaactgtcctctttcttgggtctaaagctcataatacacaaaggcttccagacctgagccacacccaggccctatcctgaacaggagactaaacagaggcaaatcaaccctaggaaatacttgcattctgccctacggttagtaccaggactgaggtcatttctactggaaaagattgtgagattgaacttatctgatcgcttgagactcctaataggcaggagtcaaggccactagaaaattgacagttaagagccaaaagtttttaaaatatgctactctgaaaaatctcgtgaaggctgtaggaaaagggagaatcttccatgttggtgtttttcctgtaaagatcagtttggggtatgatataagcaggtattaataaaaataacacaccaaagagttacgtaaaacatgttttattaattttggtccccacgtacagacattttatttctattttgaaatgagttatctattttcataaaagtaaaacactattaaagtgctgttttatgtgaaataacttgaatgttgttcctataaaaaatagatcataactcatgatatgtttgtaatcatggtaatttagatttttatgaggaatgagtatctggaaatattgtagcaatacttggtttaaaattttggacctgagacactgtggctgtctaatgtaatcctttaaaaattctctgcattgtcagtaaatgtagtatattattgtacagctactcataattttttaaagtttatgaagttatatttatcaaataaaaactttcctatataattaaaa

SEQ ID NO: 181105 - DNA, 3534 bp, Artificial Sequence
  derived and/or modified sequence
atgtggagatggatcagacagcagctgggcttcgaccccccccaccagagcgacaccagaaccatctacgtggccaacagattcccccagaacggcctgtacaccccccagaagttcatcgacaacagaatcatcagcagcaagtacaccgtgtggaacttcgtgcccaagaacctgttcgagcagttcagaagagtggccaacttctacttcctgatcatcttcctggtgcagctgatgatcgacacccccaccagccccgtgaccagcggcctgcccctgttcttcgtgatcaccgtgaccgccatcaagcagggctacgaggactggctgagacacaacagcgacaacgaggtgaacggcgcccccgtgtacgtggtgagaagcggcggcctggtgaagaccagaagcaagaacatcagagtgggcgacatcgtgagaatcgccaaggacgagatcttccccgccgacctggtgctgctgagcagcgacagactggacggcagctgccacgtgaccaccgccagcctggacggcgagaccaacctgaagacccacgtggccgtgcccgagaccgccctgctgcagaccgtggccaacctggacaccctggtggccgtgatcgagtgccagcagcccgaggccgacctgtacagattcatgggcagaatgatcatcacccagcagatggaggagatcgtgagacccctgggccccgagagcctgctgctgagaggcgccagactgaagaacaccaaggagatcttcggcgtggccgtgtacaccggcatggagaccaagatggccctgaactacaagagcaagagccagaagagaagcgccgtggagaagagcatgaacaccttcctgatcatctacctggtgatcctgatcagcgaggccgtgatcagcaccatcctgaagtacacctggcaggccgaggagaagtgggacgagccctggtacaaccagaagaccgagcaccagagaaacagcagcaagatcctgagattcatcagcgacttcctggccttcctggtgctgtacaacttcatcatccccatcagcctgtacgtgaccgtggagatgcagaagttcctgggcagcttcttcatcggctgggacctggacctgtaccacgaggagagcgaccagaaggcccaggtgaacaccagcgacctgaacgaggagctgggccaggtggagtacgtgttcaccgacaagaccggcaccctgaccgagaacgagatgcagttcagagagtgcagcatcaacggcatgaagtaccaggagatcaacggcagactggtgcccgagggccccacccccgacagcagcgagggcaacctgagctacctgagcagcctgagccacctgaacaacctgagccacctgaccaccagcagcagcttcagaaccagccccgagaacgagaccgagctgatcaaggagcacgacctgttcttcaaggccgtgagcctgtgccacaccgtgcagatcagcaacgtgcagaccgactgcaccggcgacggcccctggcagagcaacctggcccccagccagctggagtactacgccagcagccccgacgagaaggccctggtggaggccgccgccagaatcggcatcgtgttcatcggcaacagcgaggagaccatggaggtgaagaccctgggcaagctggagagatacaagctgctgcacatcctggagttcgacagcgacagaagaagaatgagcgtgatcgtgcaggcccccagcggcgagaagctgctgttcgccaagggcgccgagagcagcatcctgcccaagtgcatcggcggcgagatcgagaagaccagaatccacgtggacgagttcgccctgaagggcctgagaaccctgtgcatcgcctacagaaagttcaccagcaaggagtacgaggagatcgacaagagaatcttcgaggccagaaccgccctgcagcagagagaggagaagctggccgccgtgttccagttcatcgagaaggacctgatcctgctgggcgccaccgccgtggaggacagactgcaggacaaggtgagagagaccatcgaggccctgagaatggccggcatcaaggtgtgggtgctgaccggcgacaagcacgagaccgccgtgagcgtgagcctgagctgcggccacttccacagaaccatgaacatcctggagctgatcaaccagaagagcgacagcgagtgcgccgagcagctgagacagctggccagaagaatcaccgaggaccacgtgatccagcacggcctggtggtggacggcaccagcctgagcctggccctgagagagcacgagaagctgttcatggaggtgtgcagaaactgcagcgccgtgctgtgctgcagaatggcccccctgcagaaggccaaggtgatcagactgatcaagatcagccccgagaagcccatcaccctggccgtgggcgacggcgccaacgacgtgagcatgatccaggaggcccacgtgggcatcggcatcatgggcaaggagggcagacaggccgccagaaacagcgactacgccatcgccagattcaagttcctgagcaagctgctgttcgtgcacggccacttctactacatcagaatcgccaccctggtgcagtacttcttctacaagaacgtgtgcttcatcaccccccagttcctgtaccagttctactgcctgttcagccagcagaccctgtacgacagcgtgtacctgaccctgtacaacatctgcttcaccagcctgcccatcctgatctacagcctgctggagcagcacgtggacccccacgtgctgcagaacaagcccaccctgtacagagacatcagcaagaacagactgctgagcatcaagaccttcctgtactggaccatcctgggcttcagccacgccttcatcttcttcttcggcagctacctgctgatcggcaaggacaccagcctgctgggcaacggccagatgttcggcaactggaccttcggcaccctggtgttcaccgtgatggtgatcaccgtgaccgtgaagatggccctggagacccacttctggacctggatcaaccacctggtgacctggggcagcatcatcttctacttcgtgttcagcctgttctacggcggcatcctgtggcccttcctgggcagccagaacatgtacttcgtgttcatccagctgctgagcagcggcagcgcctggttcgccatcatcctgatggtggtgacctgcctgttcctggacatcatcaagaaggtgttcgacagacacctgcaccccaccagcaccgagaaggcccagctgaccgagaccaacgccggcatcaagtgcctggacagcatgtgctgcttccccgagggcgaggccgcctgcgccagcgtgggcagaatgctggagagagtgatcggcagatgcagccccacccacatcagcagaagctggagcgccagcgaccccttctacaccaacgacagaagcatcctgaccctgagcaccatggacagcagcacctgctag

SEQ ID NO: 181106 - protein, 761 aa, Artificial Sequence
  derived and/or modified sequence
MNWRFVELLYFLFIWGRISVQPSHQEPAGTDQHVSKEFDWLISDRGPFHHSRSYLSFVERHRQGFTTRYKIYREFARWKVRNTAIERRDLVRHPVPLMPEFQRSIRLLGRRPTTQQFIDTIIKKYGTHLLISATLGGEEALTMYMDKSRLDRKSGNATQSVEALHQLASSYFVDRDGTMRRLHEIQISTGAIKVTETRTGPLGCNSYDNLDSVSSVLLQSTESKLHLQGLQIIFPQYLQEKFVQSALSYIMCNGEGEYLCQNSQCRCQCAEEFPQCNCPITDIQIMEYTLANMAKSWAEAYKDLENSDEFKSFMKRLPSNHFLTIGSIHQHWGNDWDLQNRYKLLQSATEAQRQKIQRTARKLFGLSVRCRHNPNHQLPRERTIQQWLARVQSLLYCNENGFWGTFLESQRSCVCHGSTTLCQRPIPCVIGGNNSCAMCSLANISLCGSCNKGYKLYRGRCEPQNVDSERSEQFISFETDLDFQDLELKYLLQKMDSRLYVHTTFISNEIRLDTFFDPRWRKRMSLTLKSNKNRMDFIHMVIGMSMRICQMRNSSLDPMFFVYVNPFSGSHSEGWNMPFGEFGYPRWEKIRLQNSQCYNWTLLLGNRWKTFFETVHIYLRSRTRLPTLLRNETGQGPVDLSDPSKRQFYIKISDVQVFGYSLRFNADLLRSAVQQVNQSYTQGGQFYSSSSVMLLLLDIRDRINRLAPPVAPGKPQLDLFSCMLKHRLKLTNSEIIRVNHALDLYNTEILKQSDQMTAKLC

SEQ ID NO: 181107 - protein, 320 aa, Artificial Sequence
  derived and/or modified sequence
MNWRFVELLYFLFIWGRISVQPSHQEPAGTDQHVSKEFDWLISDRGPFHHSRSYLSFVERHRQGFTTRYKIYREFARWKVRNTAIERRDLVRHPVPLMPEFQRSIRLLGRRPTTQQFIDTIIKKYGTHLLISATLGGEEALTMYMDKSRLDRKSGNATQSVEALHQLASSYFVDRDGTMRRLHEIQISTGAIKVTETRTGPLGCNSYDNLDSVSSVLLQSTESKLHLQGLQIIFPQYLQEKFVQSALSYIMCNGEGEYLCQNSQCRCQCAEEFPQCNCPITDIQIMEYTLANMAKSWAEAYKDLENSGRESHSVPLHEWP

SEQ ID NO: 181108 - DNA, 2286 bp, Artificial Sequence
  derived and/or modified sequence
atgaactggagatttgtagaactcctgtattttctctttatttgggggcgaatctctgtacaaccaagccatcaagagcctgcggggaccgaccagcacgtgagcaaagagtttgactggttaatatcagacaggggtcccttccatcacagcaggtcttacttaagctttgtggaacggcaccgccagggctttactacacgctataaaatctaccgtgaatttgcaaggtggaaggtccgaaatacagccatcgagcggcgggaccttgtcaggcatccagtgcctctgatgcccgaatttcagcgctccatcagactgctgggaagaagaccaacgacccagcagttcattgatactatcataaaaaagtacgggacccacttgctcatcagcgccacactgggaggggaagaagcactgaccatgtatatggacaaaagtcggcttgatcgcaaatctggtaatgctactcaatctgtcgaagcccttcaccagctggccagctcttactttgttgacagagacggcacaatgcgtagactgcacgaaatccaaatcagtaccggcgctattaaggtgaccgagacccgcactggacccttagggtgcaacagttatgacaatctcgattccgtgagttcggttcttctacagtccaccgagtccaaactgcatcttcaaggccttcaaattatttttcctcagtatttacaggagaaatttgtccagtctgcactaagctacattatgtgtaacggagaaggggagtacttgtgtcaaaattcgcagtgcaggtgccaatgcgctgaggaattcccccagtgcaactgtcccataaccgatattcagatcatggaatatacattagctaatatggctaagagttgggcggaggcttataaagatcttgagaattcagatgagttcaaaagcttcatgaaacggctaccttccaaccattttctgacaattggctctatccaccaacactggggcaacgattgggacctccagaatcgctacaagctgctgcagagcgcaactgaggcccaacgccagaagattcagaggacagcccgcaaactcttcgggctaagtgttcgctgccgacacaaccctaaccatcagcttcccagggaaagaactatacaacagtggctagctagagtgcagagcctgctatattgtaatgaaaatggtttctggggcacattcctcgagtcgcagcggtcttgtgtgtgccatggatccactaccctctgtcaacgccccataccttgcgtgatcggtggaaataactcctgcgcaatgtgctcactggctaatatcagtctgtgtggaagctgcaacaaagggtataagctctatcgcggacgctgcgagccccagaacgttgactctgagagaagcgagcagtttatctcctttgagaccgatttagattttcaagatctggaactgaagtacttattgcagaaaatggatagccgtctgtacgttcacacaacattcatctccaatgaaatccggctggatacattctttgacccccggtggcgcaaaagaatgtccctgacgctgaaatctaacaaaaatagaatggattttatccacatggtgatcgggatgagtatgcgcatttgccagatgcgcaactcgtcccttgaccctatgttctttgtttatgtaaatcctttttctgggagtcactccgagggatggaatatgccctttggggagttcggatacccccggtgggaaaaaattagactccagaatagtcaatgctataactggacccttttgctcggaaataggtggaagacgttcttcgagactgtgcatatttatttacgctctcgcacgagactgccaacactactcaggaacgagactgggcagggtccagtggacctctcagacccctccaaacgccagttctatatcaaaattagcgacgtacaagtgttcggttactctcttaggttcaatgccgacttgctgcgtagcgctgttcagcaggtgaaccagagttacacacaaggcggccagttctattcttctagcagcgtgatgttacttctgttggacattagggacagaatcaacaggctggccccccccgtggccccaggaaaacctcagcttgacttgtttagctgcatgctgaaacacaggttgaaactcaccaacagcgaaataatacgggtaaaccacgccctggacctgtataacactgaaattcttaagcagagcgatcagatgactgctaaactctgttag

SEQ ID NO: 181109 - DNA, 963 bp, Artificial Sequence
  derived and/or modified sequence
atgaactggaggtttgtggagctactgtattttctgtttatttggggccgcatttctgttcaaccgtcacatcaggagcctgccggcactgatcagcacgtcagcaaggaattcgactggctgatcagtgatagggggcctttccaccacagtaggagttatctctccttcgtggagagacaccggcagggttttaccactcgatacaagatctacagagaattcgcacgctggaaggtcaggaatacggcaatagagcgaagggatctggttcggcaccccgtccccttgatgcccgaattccagcgctcaatccggctgctcggccgtcgccctactactcagcagttcattgatacaatcataaaaaagtatggaactcacttgctcatctctgctactctcggcggtgaggaagcccttactatgtacatggacaagagtcgcctggatcgcaaatccggaaacgctacacagtccgtcgaagcattgcatcagttagcttcctcatactttgtggaccgcgatgggacgatgcggcggttacacgagattcagatctctacaggggctattaaagtgaccgaaacacgcactggtcctctcgggtgcaactcatatgacaatctcgatagcgttagcagtgtcctcttgcaatccactgaatctaagctgcacctgcagggactccaaatcattttcccacagtacttgcaggagaagttcgtgcagagcgcgctttcatatattatgtgtaatggagagggagagtacctgtgccagaactctcagtgtagatgtcagtgtgcagaggagttccctcagtgcaattgtcccataacagatatccagatcatggaatacaccctggccaacatggcaaagtcctgggccgaagcctacaaggaccttgaaaactccggcagagaaagccactcagtgcctctgcacgaatggccctag

SEQ ID NO: 181110 - DNA, 2286 bp, Artificial Sequence
  derived and/or modified sequence
atgaactggagattcgtagaattgctatatttcttgttcatttggggtcggatttccgttcaaccaagtcaccaggagcctgctggtacagatcagcacgtgagcaaagagttcgactggttaatttcagacagaggccctttccatcacagccgaagctatctttcattcgtcgaacgtcatcgccaggggtttacaacgaggtataagatttaccgtgagttcgccaggtggaaagtaagaaataccgctattgagcgccgagacttggtccgtcatcccgtgccactcatgccagaatttcagcgatccatcagactgctgggtaggaggcctaccactcaacagtttatcgacaccatcataaagaagtacggtactcatttactgatatcagcgacattaggtggcgaggaagcgttaacaatgtatatggataagtccaggctggacaggaagtccggaaacgccacccagagcgtggaggctctgcatcaactggcctcctcctacttcgtggatagagacggtaccatgcgcagattacacgaaatccagataagcacgggggccattaaagtgacagaaactcgtacgggaccccttgggtgcaacagttatgacaacttggactccgtatcatctgtgctgcttcagagcaccgaatctaaactgcacttgcaaggcctgcagattatatttccccagtatcttcaggagaagttcgtccagagcgccctttcatatattatgtgtaatggcgaaggcgagtatctgtgtcagaacagccaatgcaggtgccagtgcgccgaagagttcccccagtgcaattgtccaattacagacattcagattatggagtacaccctggcaaacatggcaaagtcctgggcggaggcttataaggacctggaaaacagcgatgaatttaagagttttatgaagaggctcccttctaatcattttctaacaatcggcagcattcatcagcattgggggaacgattgggatctgcagaaccgatataagctgctgcagagcgccaccgaagctcagcggcagaaaattcagaggaccgcgcgaaaacttttcgggttaagtgttcggtgccgtcacaatccaaatcaccagctgccaagagaacgcacaatccagcagtggctggccagggtccagagcctgctctactgtaatgagaacggcttctggggcacatttcttgaatcgcagcgctcctgcgtctgccacggaagcactactctttgccagaggcctataccatgcgtcatcggaggaaacaattcttgtgccatgtgttccctcgcaaacattagtttgtgcggatcatgtaacaagggctataaattgtaccgcggccgatgcgaaccccaaaatgtagatagtgagcgttcagaacagttcatcagtttcgaaacagatctggacttccaggatctggagcttaaatatctgcttcaaaagatggatagccgcctatacgtccacacaacatttatttctaatgaaattcggctggacacattttttgaccctcggtggcggaagcgaatgtccctgacactaaagtctaacaaaaaccggatggatttcatccacatggtcatcggaatgagcatgaggatctgtcagatgcgcaattctagtttggatcccatgttcttcgtgtatgttaatcccttctcaggtagccacagtgagggctggaatatgcctttcggagaatttgggtatcccagatgggaaaagataagactgcagaactcccagtgctataattggaccctgctgctaggcaatcgatggaaaactttcttcgagacggtccacatatatctgagaagtagaacacgactacccaccttactgcggaacgagactgggcagggacccgtggacttaagtgatccaagcaagagacagttctatatcaaaataagcgacgtgcaagtgttcgggtacagcctaaggttcaatgctgacctactccggagcgctgtacagcaggtcaatcagtcgtacacccaaggaggacaattttatagtagttcttcagtaatgctgctcctgctggacatcagagaccggattaatcggctggcacctcccgttgctcctggaaaaccacagctggatctgttctcatgcatgcttaaacaccgcctcaagcttactaacagcgagattatcagagtgaaccacgcacttgacctctacaacacagagattcttaagcagtctgaccagatgaccgcaaaactgtgctag

SEQ ID NO: 181111 - DNA, 2286 bp, Artificial Sequence
  derived and/or modified sequence
atgaactggaggtttgtggagctgctgtacttcctgttcatctggggccgcatctctgtgcagcccagccaccaggagcccgccggcacagaccagcacgtgtccaaggagtttgactggctgatcagtgaccggggccccttccaccacagccgcagctacctgagctttgtggagcggcaccggcagggcttcaccacccgctacaagatctaccgggagtttgcccgctggaaggtgaggaacacagccattgaaagaagagacctggtgcgccaccctgtgcccctgatgcctgagttccagaggagcatccggctgctgggccggcggcccaccacccagcagttcatcgacaccatcatcaagaagtatggcacccacctgctgatcagcgccaccctgggcggggaggaggccctgaccatgtacatggacaagagccggctggacaggaagtctggaaatgccacccagagcgtggaggccctgcaccagctggccagcagctactttgtggacagagatggcaccatgaggcggctgcacgagatccagatcagcactggagccatcaaggtgacagagaccaggacaggccccctgggctgcaacagctatgacaacctggacagcgtgtcctctgtgctgctgcagagcacagagagcaagctgcacctgcagggcctgcagatcatcttcccccagtacctgcaggagaagtttgtgcagagcgccctgagctacatcatgtgcaatggagagggggagtacctgtgccagaacagccagtgccgctgccagtgtgccgaggagttcccccagtgcaactgccccatcacagacatccagatcatggagtacaccctggccaacatggccaagtcctgggccgaggcctacaaggacctggagaacagtgatgagttcaagagcttcatgaagaggctgcccagcaaccacttcctgaccatcggcagcatccaccagcactggggcaatgactgggacctgcagaaccgctacaagctgctgcagagcgccacagaggcccagaggcagaagatccagaggacagccaggaagctgtttggcctgtctgtgcgctgccgccacaaccccaaccaccagctgccccgggagaggaccatccagcagtggctggcccgggtgcagagcctgctgtactgcaatgaaaatggcttctggggcaccttcctggagagccagaggagctgtgtgtgccacggcagcaccaccctgtgccagaggcccatcccctgcgtcatcggcggcaacaacagctgtgccatgtgcagcctggccaacatcagcctgtgtggcagctgcaacaagggctacaagctgtaccggggccgctgtgagccccagaatgtggacagcgagaggtctgagcagttcatcagctttgaaacagacctggacttccaggacctggagctgaagtacctgctgcagaagatggacagccggctgtatgtgcacaccaccttcatcagcaatgagatccggctggacaccttctttgacccccgctggaggaagaggatgagcctgaccctgaagagcaacaagaacaggatggacttcatccacatggtgattggcatgtccatgaggatctgccagatgaggaacagcagcctggaccccatgttctttgtgtatgtgaaccccttcagcggcagccacagcgagggctggaacatgccctttggagaatttggctacccccgctgggagaagatccggctgcagaacagccagtgctacaactggaccctgctgctgggcaaccgctggaagaccttctttgagaccgtgcacatctacctgcggagcaggacccggctgcccaccctgctgagaaatgaaacaggccagggccctgtggacctgagtgaccccagcaagaggcagttctacatcaagatcagtgatgtgcaggtgtttggctacagcctgcgcttcaatgctgacctgctgcggtctgctgtgcagcaggtgaaccagagctacacccagggcggccagttctacagcagcagctctgtgatgctgctgctgctggacatccgggaccgcatcaaccggctggcccctcctgtggcccctgggaagccccagctggacctcttcagctgcatgctgaagcaccggctgaagctgaccaacagcgagatcatccgggtgaaccacgccctggacctgtacaacacagagatcctgaagcagagcgaccagatgacagccaagctgtgctag

SEQ ID NO: 181112 - DNA, 963 bp, Artificial Sequence
  derived and/or modified sequence
atgaactggaggtttgtggagctgctgtacttcctgttcatctggggccgcatctctgtgcagcccagccaccaggagcccgccggcacagaccagcacgtgtccaaggagtttgactggctgatcagtgaccggggccccttccaccacagccgcagctacctgagctttgtggagcggcaccggcagggcttcaccacccgctacaagatctaccgggagtttgcccgctggaaggtgaggaacacagccattgaaagaagagacctggtgcgccaccctgtgcccctgatgcctgagttccagaggagcatccggctgctgggccggcggcccaccacccagcagttcatcgacaccatcatcaagaagtatggcacccacctgctgatcagcgccaccctgggcggggaggaggccctgaccatgtacatggacaagagccggctggacaggaagtctggaaatgccacccagagcgtggaggccctgcaccagctggccagcagctactttgtggacagagatggcaccatgaggcggctgcacgagatccagatcagcactggagccatcaaggtgacagagaccaggacaggccccctgggctgcaacagctatgacaacctggacagcgtgtcctctgtgctgctgcagagcacagagagcaagctgcacctgcagggcctgcagatcatcttcccccagtacctgcaggagaagtttgtgcagagcgccctgagctacatcatgtgcaatggagagggggagtacctgtgccagaacagccagtgccgctgccagtgtgccgaggagttcccccagtgcaactgccccatcacagacatccagatcatggagtacaccctggccaacatggccaagtcctgggccgaggcctacaaggacctggagaacagcggccgggagagccacagcgtgcccctgcacgagtggccctag

SEQ ID NO: 181113 - DNA, 2286 bp, Artificial Sequence
  derived and/or modified sequence
atgaactggcggttcgtggagctgctgtacttcctgttcatctggggcaggatcagcgtgcagcctagccaccaggagcccgccggtaccgatcagcatgtgagcaaggaattcgactggttgatatccgatcgtggtccattccaccatagccgcagctacttatcatttgtggaaaggcaccgacagggattcacaacacggtacaagatttatcgagagtttgccagatggaaggtacggaataccgccattgaaaggcgggacctggtgaggcatccagttccccttatgcccgaattccaacggtccattaggctgctgggccgccggcccactactcagcagtttatcgacaccatcatcaaaaagtacgggacacacctgttgatcagcgccacattaggtggagaggaggcactgacgatgtatatggacaagagtcgccttgatcggaaatccggtaacgcaacccagtctgtcgaagctttacaccagttagcttcaagttattttgtcgatcgcgacgggaccatgcgccggcttcatgagatccagatctccaccggagccataaaggtaacggagacaagaactggacctctggggtgtaacagctatgacaatctagatagcgtgtcatcagtgctcttacagtctacagagagtaagttgcacctgcagggcctgcaaatcattttcccgcagtatctccaagaaaaatttgtacagtcagccctctcttatatcatgtgtaacggggagggggagtatctgtgccagaatagccaatgcagatgccagtgcgccgaggagttcccgcagtgcaattgcccaatcacagatatccagatcatggaatacactctagcaaatatggcgaagtcttgggctgaggcttacaaggatctcgaaaactccgacgaatttaaatcttttatgaaacggctgccttcaaatcactttctgacaattggctcaatacaccagcactggggaaacgactgggacttgcagaacaggtacaagctgctccagagcgctactgaagcacagcgacagaagatccagagaaccgcccggaagttatttggcctctccgtgcgctgtcggcataaccccaaccaccaactcccgcgggagcgaactatccagcagtggcttgctcgggttcagtctctgctctattgtaacgagaatggtttctggggaactttcctggaaagccagcggtcatgtgtttgccacgggtccacaacattatgccagaggcctatcccctgtgtgatcggtggaaacaactcctgtgctatgtgctcactggccaatatatctctgtgtggaagttgtaacaaagggtacaagttgtacagaggaaggtgcgaaccccagaacgtggacagtgaacggtccgaacagttcatcagcttcgagaccgacctcgattttcaagatttggagctgaaatacctcttgcagaagatggattccagactttacgttcatacaacctttatctcaaatgagatccgactggacactttctttgacccgaggtggcgaaagcggatgtctctgactctgaaatccaataaaaatcggatggactttattcatatggtgatcgggatgtccatgaggatctgtcaaatgcgcaacagcagcctcgaccctatgttcttcgtctacgttaatcccttcagcgggtcccactctgagggctggaatatgccctttggagagtttgggtatccacgttgggaaaaaattcggctgcagaacagccagtgctataattggacactcctcctcggaaaccgttggaaaactttcttcgagactgtgcacatctacctgagaagcaggactcgactgcccactctgctgagaaatgaaaccggccaaggtccggtcgatttgagtgacccttctaagagacagttttacattaagatttcggatgtgcaagtgttcgggtacagcttgcggtttaacgcagatcttctccgcagcgcggtccaacaagtcaatcagagctatacacaaggaggacagttttactcatcctcctcagtgatgctgctgctattggatatccgcgacaggattaacaggctagcaccccctgtggcccccgggaagccgcagctggatttatttagctgcatgctgaaacaccgccttaagttgacaaattcagagataattcgcgtaaaccacgccttggatctatacaataccgaaatcctcaaacaaagtgatcaaatgacagccaaactctgctag

SEQ ID NO: 181114 - DNA, 963 bp, Artificial Sequence
  derived and/or modified sequence
atgaactggcggttcgtggagctgctgtacttcctgttcatctggggaaggatttccgtgcagccatcccaccaggagccagctggcaccgatcagcacgtgtccaaggagtttgattggctaatctctgataggggtccattccatcacagtaggagctatctgtccttcgtcgaacgacaccgccagggatttaccacccggtataaaatttaccgcgagttcgccagatggaaagttaggaacactgccatcgaacggcgcgacctggttcgccatccagtacccctgatgcccgaatttcagcgtagtataaggctcctggggcgacgacccacaacacagcagtttatcgacactatcatcaaaaagtacgggactcacttacttatttccgctaccctaggcggagaagaagcactgaccatgtacatggacaaaagtcggctggaccggaagtcaggcaatgccactcaatccgtggaggcactccaccagctggcatcttcatactttgtcgaccgcgatggcactatgaggcgactgcacgagatccagatctccacaggggcaatcaaagttaccgagacgcggactggccctctcggctgcaattcttatgacaaccttgactcagtcagcagtgtcttgctgcaaagtacggaatcgaagcttcacctgcaaggtctccagatcatctttccccagtatctgcaagagaagtttgtgcagtctgcactgtcctatatcatgtgcaacggagagggggaatatttgtgccagaatagccagtgcaggtgccaatgtgctgaggaattcccacagtgcaattgcccgatcactgatattcaaataatggaatatacattggcaaacatggcaaaatcttgggcagaggcctataaagacttggagaatagtggacgtgagtctcattccgtgccgctgcatgagtggccctag

SEQ ID NO: 181115 - DNA, 2286 bp, Artificial Sequence
  derived and/or modified sequence
atgaactggcggttcgtggagctgctgtacttcctgttcatctggggaaggattagcgttcagccttcacaccaagagcctgcaggaactgaccagcacgtctcgaaggagttcgattggctgatttccgaccgcgggcctttccatcactcgcgcagctatctgtcttttgtggagcgacacagacaagggttcacaaccagatacaaaatctatcgggagttcgcaaggtggaaggtcaggaatacggcaatcgagcgaagagatttggtccgacatcccgtgcccctgatgcctgaattccaaagatccattagattgctgggcagaagacccaccacacagcaatttattgacacaattattaagaagtatggaacccacctattaatatccgctaccctggggggcgaggaggccttgactatgtacatggacaaatcccgactggacaggaagagtgggaacgccacacagtctgtagaggctttgcatcagctcgcctccagctacttcgtggatcgcgacggcacaatgcgcaggctccatgaaatacagatctcaactggggcaattaaagtcaccgagaccagaaccgggccattaggttgcaatagctacgacaatctcgactctgtgtctagcgtgttgctgcagtcgacagagtcaaaactccatttacagggactccaaatcatctttcctcagtatctgcaggaaaagtttgtgcaatccgccctttcgtacatcatgtgtaatggcgaaggagagtacctctgccaaaatagccagtgcagatgccaatgtgctgaggagttcccccaatgtaactgtccaattaccgacattcagatcatggaatacactctcgccaatatggctaagagctgggccgaggcctataaggatctggagaatagcgacgagttcaaaagcttcatgaaacggctccctagcaaccattttttgacaataggttccatccaccagcactggggcaatgactgggatctgcagaatcggtacaagctgctccaatccgctactgaggcacagcggcagaagatccaacgaacagcaagaaagctttttggtctctctgtgcgttgcaggcacaaccctaaccaccagctgccacgcgagcgcaccatacagcagtggcttgcccgtgttcagagccttctgtactgtaatgaaaatggcttttggggcacgtttctggagtcccagagaagctgtgtgtgccatggttctaccactctgtgccagcgccctataccatgcgtgattgggggaaacaactcttgtgctatgtgtagcttagcaaatattagcctttgcgggtcatgtaacaagggttacaaactgtaccgaggtcgatgtgagccccagaacgtggacagcgagaggagcgaacagttcatcagctttgaaaccgacctggatttccaagatctagagcttaaataccttctgcaaaaaatggactctcgactgtacgtccacaccacgtttatcagcaatgaaatacgactagatactttcttcgacccacggtggagaaagcggatgtcactgaccctgaagagcaacaaaaacaggatggatttcatccacatggttattggcatgagtatgcgcatttgccaaatgcggaattcaagcctggacccgatgtttttcgtttacgtgaaccccttctctggctcacactctgaggggtggaatatgccttttggcgagttcggatacccccgttgggagaagatacggctgcagaacagtcagtgctataattggacactgcttcttggcaatagatggaaaactttctttgagaccgtgcacatatacttgagaagccggacacggctcccaacactgttacgaaacgaaactggccagggacccgtggacctgtcagacccttcgaagagacaattctacattaagatctccgacgtccaagtttttggctactctcttcggtttaacgccgacctcctacggagcgcggttcagcaggttaaccagagctatacccagggcggccagttctatagtagctcaagcgtgatgctgctcctcctcgacatcagagaccgcatcaatagactcgccccacctgtggcccccggaaagccccagctggatctgttctcctgcatgcttaagcacagattaaagcttaccaacagtgagatcattagagtcaaccacgctttggacctctataacaccgagatactgaaacagtccgatcaaatgacagctaaattgtgttag

SEQ ID NO: 181116 - DNA, 2286 bp, Artificial Sequence
  derived and/or modified sequence
atgaattggcgctttgtggagctcttatatttcctgttcatttggggacgtatctctgtccagccaagtcaccaggaacctgctggaactgaccagcacgtttccaaagagttcgactggttaatctctgatagaggcccttttcaccacagtcggagctacctgtcattcgttgagaggcacagacagggttttaccacacgctataaaatttatagagagttcgcccgttggaaggtgagaaatacggccatcgagagaagggacctggtgcgccacccagtcccgctgatgcccgaatttcagcgaagcatccgcttattggggagacgcccaacaacccagcagttcatcgacaccattatcaaaaaatatggaacccatctgctgatctctgccaccctggggggagaagaagccttaaccatgtatatggataaatctcgactcgataggaagagtggaaacgcaacacagtctgtggaggctttacatcaactcgcctccagttactttgtggacagagatgggaccatgaggagattacacgaaattcaaatctcaactggtgccattaaggtgacagagacgcggacaggcccactggggtgcaactcctatgacaacttagacagtgtgagctcagtactcctgcagtccacggaaagcaagctgcacctccagggcctacagatcatctttcctcagtatctgcaagaaaagttcgtgcaatccgcactgtcctacattatgtgtaacggggagggggagtatttgtgtcagaattctcaatgtcgttgccagtgcgcagaggagttcccccaatgcaactgccctatcaccgacatccaaattatggaatatacgttggccaatatggcaaaaagctgggctgaagcttacaaggacctggaaaatagcgatgagtttaaatcgtttatgaaacgactcccctctaatcatttcctgacaataggatccatccatcagcactggggaaatgactgggatctgcagaaccgctacaaactcctgcaaagcgcaactgaagcacaacgacagaaaatacagcgcaccgccaggaagctctttggcctcagcgtacgatgccgccacaatcccaatcaccagttgccaagagagaggacaatccagcaatggctcgcaagggtacagtcacttctgtactgcaacgagaacggattctggggcactttcttggagagccagcgatcctgtgtgtgccacggcagtacaacactgtgtcagcgtcccattccttgcgtaattgggggaaacaattcatgcgctatgtgctctttggcgaatatctctctgtgtggttcctgcaacaaaggatacaagctctacaggggaagatgtgaaccacagaacgtggatagcgagaggtcggagcagtttatcagttttgagactgatctggactttcaagacctcgaacttaagtacctgctacaaaagatggactctcggttgtacgtgcatacaacttttattagcaatgaaattagactggacacctttttcgacccacgctggcgcaaacgtatgtccctgacccttaagtctaataagaacagaatggacttcatccacatggtcatcggtatgtcaatgagaatctgccagatgaggaattccagcctggatccaatgtttttcgtgtacgtcaacccttttagtggtagccatagcgaaggttggaacatgccctttggggaattcggctaccctcggtgggaaaagattaggctccagaattcccagtgttacaactggactctgctattgggcaaccgctggaaaacctttttcgaaaccgtccacatctacctgcggagccgcacccgcctgccaacgttacttcggaatgaaacaggacaaggacccgtggatctgtctgatcctagtaagaggcaattctacattaagattagcgatgttcaggtcttcggatatagtctgagattcaacgccgacttgcttcgcagcgcggttcagcaagtcaaccagtcttacactcagggtggtcagttttatagtagctcctctgtgatgcttttactgctggacatccgggatcgaattaaccggttagccccaccagtggcacctggaaagcctcagctggaccttttctcctgcatgttgaaacataggctgaaactgaccaactccgagataattagggtaaaccatgcactcgatctgtataacaccgagatcctaaagcagtcagaccaaatgacagcaaagctatgctag

SEQ ID NO: 181117 - DNA, 963 bp, Artificial Sequence
  derived and/or modified sequence
atgaattggaggtttgtcgagctactgtacttcctatttatttggggtcgcatcagtgtgcagccctcccatcaggagccagccggtaccgaccagcacgtcagtaaggaattcgactggcttatctccgataggggccctttccaccacagtcgatcttacctcagtttcgtggaacgccaccgccagggatttaccactcgatacaagatctatagggagttcgcaaggtggaaggtgaggaatacagctatcgaacggcgagacttggtaaggcatcccgtccccctgatgccagagttccagcgctcaattaggcttctgggcaggagaccaacgacacagcaatttatcgataccataataaaaaagtatggcacacatctactgatatctgccacactgggtggcgaggaagccctgactatgtacatggataaaagtaggctggaccgaaagagtggtaacgccacccagtccgtcgaagcactgcaccagctcgcgtcttcctactttgtcgatagagacggcactatgcgcaggcttcacgagatacagatatccacaggggctatcaaggtaacagaaacgcggacaggcccactcggctgcaacagttacgacaaccttgacagcgttagctccgtgctgttgcaaagcactgagtctaagctgcacctgcaaggcctccaaattattttcccacaatatcttcaagagaagttcgtgcagagcgccctgagttatatcatgtgcaacggcgagggtgagtacctttgccaaaactcacagtgtaggtgtcagtgcgccgaagagtttcctcagtgtaactgtccaattactgatatccagattatggagtacactctggccaacatggcaaaatcctgggcagaggcctataaagacctcgagaactccggtagagagtcccattcagttcctctccacgagtggccatag

SEQ ID NO: 181118 - DNA, 2286 bp, Artificial Sequence
  derived and/or modified sequence
atgaattggagattcgtggagctgctttatttcctgttcatatggggaagaatcagtgtccagccttcccaccaagaacctgccggaacagatcaacatgtgtctaaagagtttgattggctcatttccgaccgcggacccttccatcactctcggagctatctctccttcgtggaacgccatagacagggctttaccactcggtataagatctatagggaattcgccagatggaaagtacgcaatacagcaatagagaggcgggatttggtacggcaccctgtccctctgatgcctgaattccagagatcaattcggttattgggcagacgacccaccacccagcagttcatcgacaccattatcaaaaagtacggaacgcacctgctgattagcgctacccttggcggtgaagaggctctgacgatgtatatggacaaaagccggctagataggaaatctgggaatgccactcagagcgtggaagctctgcaccagctggcttcgtcttatttcgtagaccgggacggtaccatgaggcggttacatgagatccagatctcgacgggagccataaaggttactgagaccagaacaggaccacttggctgtaactcctatgataatctcgactccgtgtcctccgtgttgctccagtcaaccgaaagcaaactccacctgcaggggttgcagattatttttccccaatatttgcaggagaagttcgttcaaagcgccttatcctacattatgtgcaacggcgagggagaatacctctgccaaaactcccagtgccggtgccagtgtgcggaagaattccctcaatgcaactgccccattaccgatattcagatcatggagtacactctcgccaacatggctaaatcttgggccgaagcttacaaggatctggagaatagcgacgaattcaagagctttatgaagcgcttgccaagcaatcatttcttaactatcggctcaatccaccagcattggggcaatgattgggatctccagaatcggtataagctgttacagagcgccactgaggcccagcgccaaaagattcagcgaaccgccaggaagctcttcggactatcagtccggtgccgccataacccaaatcaccagctccccagggagcggacaatccagcagtggctcgcccgagttcagagcctgctttactgcaatgagaacgggttctggggcaccttccttgaatctcagcgaagctgtgtgtgtcatggatctaccacgctgtgccagagaccgataccatgtgtgatcggcggtaacaacagttgtgcaatgtgttccctggccaatatctccctctgtggatcctgtaataaagggtacaaactgtatcggggtcgttgtgaaccgcagaacgtggacagtgaaaggagtgaacagtttatatctttcgagaccgatttggattttcaggatcttgaactgaagtatctccttcaaaaaatggattcccgactgtatgtccatactactttcattagtaacgaaatccgacttgacaccttttttgatcccagatggcgtaaaaggatgagtctgaccctgaaatctaacaaaaaccgaatggatttcatccatatggttattggcatgagtatgcggatctgccagatgcgtaactcttccctcgacccaatgttcttcgtgtatgtgaaccctttcagcggcagtcattccgagggttggaatatgccattcggtgagtttggctacccccgatgggagaaaatccgccttcagaatagccaatgctacaactggactctgcttctgggcaataggtggaagacattttttgagaccgtccacatttacttaagaagccgcacccgcttaccaaccctcttgcgcaatgaaacaggccagggccctgttgacctgtctgatcccagcaaaagacagttctatataaagatctccgacgtacaagtgttcggatatagtctgcggttcaacgccgacttgttgagatcagccgtgcaacaagttaatcagtcctatactcagggtggacagttctatagcagcagcagcgtgatgcttttactcctggacatccgtgaccggatcaataggctggcccctcctgtggccccaggtaagccacagctggatctgttctcttgtatgctgaaacatcgcctaaaactgaccaattctgagattatcagggtgaaccacgcgcttgatctgtacaacacagaaattctgaagcaaagcgaccaaatgacagccaagctttgctag

SEQ ID NO: 181119 - DNA, 2286 bp, Artificial Sequence
  derived and/or modified sequence
atgaactggagattcgtggagctgctgtacttcctgttcatctggggcagaatcagcgtgcagcccagccaccaggagcccgccggcaccgaccagcacgtgagcaaggagttcgactggctgatcagcgacagaggccccttccaccacagcagaagctacctgagcttcgtggagagacacagacagggcttcaccaccagatacaagatctacagagagttcgccagatggaaggtgagaaacaccgccatcgagagaagagacctggtgagacaccccgtgcccctgatgcccgagttccagagaagcatcagactgctgggcagaagacccaccacccagcagttcatcgacaccatcatcaagaagtacggcacccacctgctgatcagcgccaccctgggcggcgaggaggccctgaccatgtacatggacaagagcagactggacagaaagagcggcaacgccacccagagcgtggaggccctgcaccagctggccagcagctacttcgtggacagagacggcaccatgagaagactgcacgagatccagatcagcaccggcgccatcaaggtgaccgagaccagaaccggccccctgggctgcaacagctacgacaacctggacagcgtgagcagcgtgctgctgcagagcaccgagagcaagctgcacctgcagggcctgcagatcatcttcccccagtacctgcaggagaagttcgtgcagagcgccctgagctacatcatgtgcaacggcgagggcgagtacctgtgccagaacagccagtgcagatgccagtgcgccgaggagttcccccagtgcaactgccccatcaccgacatccagatcatggagtacaccctggccaacatggccaagagctgggccgaggcctacaaggacctggagaacagcgacgagttcaagagcttcatgaagagactgcccagcaaccacttcctgaccatcggcagcatccaccagcactggggcaacgactgggacctgcagaacagatacaagctgctgcagagcgccaccgaggcccagagacagaagatccagagaaccgccagaaagctgttcggcctgagcgtgagatgcagacacaaccccaaccaccagctgcccagagagagaaccatccagcagtggctggccagagtgcagagcctgctgtactgcaacgagaacggcttctggggcaccttcctggagagccagagaagctgcgtgtgccacggcagcaccaccctgtgccagagacccatcccctgcgtgatcggcggcaacaacagctgcgccatgtgcagcctggccaacatcagcctgtgcggcagctgcaacaagggctacaagctgtacagaggcagatgcgagccccagaacgtggacagcgagagaagcgagcagttcatcagcttcgagaccgacctggacttccaggacctggagctgaagtacctgctgcagaagatggacagcagactgtacgtgcacaccaccttcatcagcaacgagatcagactggacaccttcttcgaccccagatggagaaagagaatgagcctgaccctgaagagcaacaagaacagaatggacttcatccacatggtgatcggcatgagcatgagaatctgccagatgagaaacagcagcctggaccccatgttcttcgtgtacgtgaaccccttcagcggcagccacagcgagggctggaacatgcccttcggcgagttcggctaccccagatgggagaagatcagactgcagaacagccagtgctacaactggaccctgctgctgggcaacagatggaagaccttcttcgagaccgtgcacatctacctgagaagcagaaccagactgcccaccctgctgagaaacgagaccggccagggccccgtggacctgagcgaccccagcaagagacagttctacatcaagatcagcgacgtgcaggtgttcggctacagcctgagattcaacgccgacctgctgagaagcgccgtgcagcaggtgaaccagagctacacccagggcggccagttctacagcagcagcagcgtgatgctgctgctgctggacatcagagacagaatcaacagactggccccccccgtggcccccggcaagccccagctggacctgttcagctgcatgctgaagcacagactgaagctgaccaacagcgagatcatcagagtgaaccacgccctggacctgtacaacaccgagatcctgaagcagagcgaccagatgaccgccaagctgtgctag

SEQ ID NO: 181120 - DNA, 963 bp, Artificial Sequence
  derived and/or modified sequence
atgaactggagattcgtggagctgctgtacttcctgttcatctggggcagaatcagcgtgcagcccagccaccaggagcccgccggcaccgaccagcacgtgagcaaggagttcgactggctgatcagcgacagaggccccttccaccacagcagaagctacctgagcttcgtggagagacacagacagggcttcaccaccagatacaagatctacagagagttcgccagatggaaggtgagaaacaccgccatcgagagaagagacctggtgagacaccccgtgcccctgatgcccgagttccagagaagcatcagactgctgggcagaagacccaccacccagcagttcatcgacaccatcatcaagaagtacggcacccacctgctgatcagcgccaccctgggcggcgaggaggccctgaccatgtacatggacaagagcagactggacagaaagagcggcaacgccacccagagcgtggaggccctgcaccagctggccagcagctacttcgtggacagagacggcaccatgagaagactgcacgagatccagatcagcaccggcgccatcaaggtgaccgagaccagaaccggccccctgggctgcaacagctacgacaacctggacagcgtgagcagcgtgctgctgcagagcaccgagagcaagctgcacctgcagggcctgcagatcatcttcccccagtacctgcaggagaagttcgtgcagagcgccctgagctacatcatgtgcaacggcgagggcgagtacctgtgccagaacagccagtgcagatgccagtgcgccgaggagttcccccagtgcaactgccccatcaccgacatccagatcatggagtacaccctggccaacatggccaagagctgggccgaggcctacaaggacctggagaacagcggcagagagagccacagcgtgcccctgcacgagtggccctag

SEQ ID NO: 181121 - DNA, 3196 bp, Artificial Sequence
  derived and/or modified sequence
cgcggcgcacttggacttccctctccattcgccagccgcctcgctcccggaccccacggctgcaaactgatctggcgcgcggggaggaggagagcgcaggcgagcgaacccgcgagagagggagagagcgagcgagcaacagcgagagcgagagcgagagagccgggaggcagagggagtagtgaccgccttccggagccgggattcatgcctgtcctcgggaccagcgaaggggactttacggctgagtatgagccaggctgctaggagccaggtacccccacgcctgcagtccccgcgccgtgcccggaatgcgagctgcacgcagggctctcccaagttcccaccgagccgaataaaaagcgtcctcccgcagctctccgccaaagacggacattgactccaggactccacagaatggagcaagaatgagaggaaaaaggccggcagaaaagcatgaactggaggtttgttgagctcctctacttcctgtttatatggggccgtatctcagtgcagccctcccaccaggaaccagctgggacagaccaacatgtctccaaggaatttgattggctcatttcagacagggggcctttccaccactccaggagctacctatcctttgtggaaagacaccgtcaaggatttacaaccagatataaaatatacagggagtttgcccgttggaaggtgaggaacacagccatcgagaggagagatctggtccgccatccagtgcccctcatgccggagtttcaaaggagcatccgcctgcttggcaggagacctaccactcagcagttcatcgataccatcatcaaaaagtacggcacccacctgctcatctcagccacattgggaggggaggaggctttgaccatgtatatggacaaaagtcgcctcgacaggaagtcagggaatgccactcaaagtgttgaagctctgcaccagctcgcatcatcctactttgttgaccgtgatggtaccatgaggaggcttcatgagatccagatatcaactggagcaatcaaggtcacagagacacgcactgggcctctgggctgtaacagctatgacaatctggactctgtgagttccgtccttctgcaaagcacggagagcaaactgcaccttcaaggtcttcagataatctttcctcagtatctgcaagagaagtttgtccagtcggccttgagctatatcatgtgcaatggggagggggagtacctgtgccagaacagccagtgtcgctgccaatgtgccgaggagtttccgcagtgcaactgccccatcacggacatccagatcatggagtacacgctggccaacatggccaagtcttgggccgaagcttataaggacctggagaattcagatgagtttaaatcatttatgaagcgcctccccagcaaccacttcctgaccatcggaagcatccatcagcactggggcaatgactgggacctgcagaaccgctacaagctcctgcagagtgccacggaggcacagagacaaaagatccaacgcactgcccgcaagcttttcggcctcagtgtacgctgtcgccacaatcccaaccaccagctgcctagagagaggacaattcagcagtggcttgcaagggtccagtcactcctctactgtaatgagaatgggttttggggaaccttcctggagagccagcggagctgcgtgtgccacggcagcaccacgctgtgccagcgccccatcccctgcgtgataggcgggaacaacagctgcgccatgtgcagcctggccaacatctccctctgcggctcctgcaacaagggctacaagctgtatcgaggccgctgtgaaccacagaacgtggactcggagcggagcgagcagttcatcagctttgagactgacctggacttccaggacctggagctgaagtacctgctgcagaagatggactcacgcctctacgtccacaccaccttcatcagcaacgagatccgcctcgacaccttctttgaccctcggtggcgcaagcgcatgtccctcactctcaagagcaacaagaaccgcatggacttcatccacatggtgatcggcatgtccatgcgcatctgccagatgcgcaacagcagcctggaccccatgttctttgtctatgtcaacccctttagcgggagccattcggagggctggaacatgcccttcggggaatttggctacccacgctgggagaagatccgtctccaaaacagccagtgctacaactggactcttttgctgggcaatcggtggaaaacatttttcgagacggtccacatctacctacgtagtcggactcggctacctaccctactgcgaaatgagactggccagggccccgtggacctgtcggatccctccaagaggcagttctacatcaagatctcagacgtgcaggtgtttgggtatagcctgaggttcaacgccgacctcctgcgcagtgcagtgcagcaggtcaaccagtcctacacacagggcggccagttctattcctcttcgtcagtgatgctcctcttgttggatattcgggaccgaattaatcgcctggcccctcctgtggccccggggaaaccccagctggacttgttctcctgtatgctgaaacaccgcctgaaactgaccaacagcgagatcatcagggtgaaccacgccttggacctgtacaacacggagatcctcaaacagtcggaccagatgacagccaaactctgctaacccgggactccttgccatggacttttcctgttgttgtacacacacaacagaacaaaatgaagcaaaacaaaacaaaaaaacccacaaaaatttgtaaaatgtaattaatattcaaagaaaaggaggaaaatcttcatttgttggaaatgaaaacgttctagcaactgtataaaagcgttgggcatgtttgttatttctatactcactctgtcatgaagaagggtctcagccttttgtggagcattgagggagttgcttcttaggcctcaggtgctgtattgggggagaagggagaaagcatatgcaatgaattgtaaagatctctgctgtgcaggtgctaagattaaacactaaaaagaaagagagatatatgtaatgtacaactgacactgccatttttcctttttggaggaaatggacatagataaagaagatatttcttcggttaagattt

SEQ ID NO: 181122 - DNA, 1645 bp, Artificial Sequence
  derived and/or modified sequence
cgcctcgctcccggaccccacggctgcaaactgatctggcgcgcggggaggaggagagcgcaggcgagcgaacccgcgagagagggagagagcgagcgagcaacagcgagagcgagagcgagagagccgggaggcagagggagtagtgaccgccttccggagccgggattcatgcctgtcctcgggaccagcgaaggggactttacggctgagtatgagccaggctgctaggagccaggtacccccacgcctgcagtccccgcgccgtgcccggaatgcgagctgcacgcagggctctcccaagttcccaccgagccgaataaaaagcgtcctcccgcagctctccgccaaagacggacattgactccaggtaaggcggcgccgaatggagcaagaatgagaggaaaaaggccggcagaaaagcatgaactggaggtttgttgagctcctctacttcctgtttatatggggccgtatctcagtgcagccctcccaccaggaaccagctgggacagaccaacatgtctccaaggaatttgattggctcatttcagacagggggcctttccaccactccaggagctacctatcctttgtggaaagacaccgtcaaggatttacaaccagatataaaatatacagggagtttgcccgttggaaggtgaggaacacagccatcgagaggagagatctggtccgccatccagtgcccctcatgccggagtttcaaaggagcatccgcctgcttggcaggagacctaccactcagcagttcatcgataccatcatcaaaaagtacggcacccacctgctcatctcagccacattgggaggggaggaggctttgaccatgtatatggacaaaagtcgcctcgacaggaagtcagggaatgccactcaaagtgttgaagctctgcaccagctcgcatcatcctactttgttgaccgtgatggtaccatgaggaggcttcatgagatccagatatcaactggagcaatcaaggtcacagagacacgcactgggcctctgggctgtaacagctatgacaatctggactctgtgagttccgtccttctgcaaagcacggagagcaaactgcaccttcaaggtcttcagataatctttcctcagtatctgcaagagaagtttgtccagtcggccttgagctatatcatgtgcaatggggagggggagtacctgtgccagaacagccagtgtcgctgccaatgtgccgaggagtttccgcagtgcaactgccccatcacggacatccagatcatggagtacacgctggccaacatggccaagtcttgggccgaagcttataaggacctggagaattcaggtagagagtctcactcagtgccactgcatgagtggccttgagccaagtctgaaagggagctaatctaactggaattaggactgctgcaagggaaagttcagtgaccctgaccctttcactttggagtgtccagatgcaagtataatagctgtcacagagcaggcactcaataaatctcaactgaataaaattaatgaatagcataatccagtttgtggtcatatgatgtattgtttctgtcgtacccagaagacagaaagaataaatctgcataggaagcctctggagagggaagagtc

SEQ ID NO: 181123 - DNA, 3207 bp, Artificial Sequence
  derived and/or modified sequence
ggagaccgcggcgcacttggacttccctctccattcgccagccgcctcgctcccggaccccacggctgcaaactgatctggcgcgcggggaggaggagagcgcaggcgagcgaacccgcgagagagggagagagcgagcgagcaacagcgagagcgagagcgagagagccgggaggcagagggagtagtgaccgccttccggagccgggattcatgcctgtcctcgggaccagcgaaggggactttacggctgagtatgagccaggctgctaggagccaggtacccccacgcctgcagtccccgcgccgtgcccggaatgcgagctgcacgcagggctctcccaagttcccaccgagccgaataaaaagcgtcctcccgcagctctccgccaaagacggacattgactccaggtaaggcggcgccgaatggagcaagaatgagaggaaaaaggccggcagaaaagcatgaactggaggtttgttgagctcctctacttcctgtttatatggggccgtatctcagtgcagccctcccaccaggaaccagctgggacagaccaacatgtctccaaggaatttgattggctcatttcagacagggggcctttccaccactccaggagctacctatcctttgtggaaagacaccgtcaaggatttacaaccagatataaaatatacagggagtttgcccgttggaaggtgaggaacacagccatcgagaggagagatctggtccgccatccagtgcccctcatgccggagtttcaaaggagcatccgcctgcttggcaggagacctaccactcagcagttcatcgataccatcatcaaaaagtacggcacccacctgctcatctcagccacattgggaggggaggaggctttgaccatgtatatggacaaaagtcgcctcgacaggaagtcagggaatgccactcaaagtgttgaagctctgcaccagctcgcatcatcctactttgttgaccgtgatggtaccatgaggaggcttcatgagatccagatatcaactggagcaatcaaggtcacagagacacgcactgggcctctgggctgtaacagctatgacaatctggactctgtgagttccgtccttctgcaaagcacggagagcaaactgcaccttcaaggtcttcagataatctttcctcagtatctgcaagagaagtttgtccagtcggccttgagctatatcatgtgcaatggggagggggagtacctgtgccagaacagccagtgtcgctgccaatgtgccgaggagtttccgcagtgcaactgccccatcacggacatccagatcatggagtacacgctggccaacatggccaagtcttgggccgaagcttataaggacctggagaattcagatgagtttaaatcatttatgaagcgcctccccagcaaccacttcctgaccatcggaagcatccatcagcactggggcaatgactgggacctgcagaaccgctacaagctcctgcagagtgccacggaggcacagagacaaaagatccaacgcactgcccgcaagcttttcggcctcagtgtacgctgtcgccacaatcccaaccaccagctgcctagagagaggacaattcagcagtggcttgcaagggtccagtcactcctctactgtaatgagaatgggttttggggaaccttcctggagagccagcggagctgcgtgtgccacggcagcaccacgctgtgccagcgccccatcccctgcgtgataggcgggaacaacagctgcgccatgtgcagcctggccaacatctccctctgcggctcctgcaacaagggctacaagctgtatcgaggccgctgtgaaccacagaacgtggactcggagcggagcgagcagttcatcagctttgagactgacctggacttccaggacctggagctgaagtacctgctgcagaagatggactcacgcctctacgtccacaccaccttcatcagcaacgagatccgcctcgacaccttctttgaccctcggtggcgcaagcgcatgtccctcactctcaagagcaacaagaaccgcatggacttcatccacatggtgatcggcatgtccatgcgcatctgccagatgcgcaacagcagcctggaccccatgttctttgtctatgtcaacccctttagcgggagccattcggagggctggaacatgcccttcggggaatttggctacccacgctgggagaagatccgtctccaaaacagccagtgctacaactggactcttttgctgggcaatcggtggaaaacatttttcgagacggtccacatctacctacgtagtcggactcggctacctaccctactgcgaaatgagactggccagggccccgtggacctgtcggatccctccaagaggcagttctacatcaagatctcagacgtgcaggtgtttgggtatagcctgaggttcaacgccgacctcctgcgcagtgcagtgcagcaggtcaaccagtcctacacacagggcggccagttctattcctcttcgtcagtgatgctcctcttgttggatattcgggaccgaattaatcgcctggcccctcctgtggccccggggaaaccccagctggacttgttctcctgtatgctgaaacaccgcctgaaactgaccaacagcgagatcatcagggtgaaccacgccttggacctgtacaacacggagatcctcaaacagtcggaccagatgacagccaaactctgctaacccgggactccttgccatggacttttcctgttgttgtacacacacaacagaacaaaatgaagcaaaacaaaacaaaaaaacccacaaaaatttgtaaaatgtaattaatattcaaagaaaaggaggaaaatcttcatttgttggaaatgaaaacgttctagcaactgtataaaagcgttgggcatgtttgttatttctatactcactctgtcatgaagaagggtctcagccttttgtggagcattgagggagttgcttcttaggcctcaggtgctgtattgggggagaagggagaaagcatatgcaatgaattgtaaagatctctgctgtgcaggtgctaagattaaacactaaaaagaaagagagatatatgtaatgtacaactgacactgccatttttcctttttggaggaaatggacatagataaagaagatatttcttcggttaagattta

SEQ ID NO: 181124 - protein, 255 aa, Artificial Sequence
  derived and/or modified sequence
MVMSSYMVNSKYVDPKFPPCEEYLQGGYLGEQGADYYGGGAQGADFQPPGLYPRPDFGEQPFGGSGPGPGSALPARGHGQEPGGPGGHYAAPGEPCPAPPAPPPAPLPGARAYSQSDPKQPPSGTALKQPAVVYPWMKKVHVNSVNPNYTGGEPKRSRTAYTRQQVLELEKEFHFNRYLTRRRRIEIAHTLCLSERQIKIWFQNRRMKWKKDHKLPNTKGRSSSSSSSSSCSSSVAPSQHLQPMAKDHHTDLTTL

SEQ ID NO: 181125 - DNA, 1298 bp, Artificial Sequence
  derived and/or modified sequence
cattaatatctggcaggggctctcaaatgtgccatagcaagctacttgattacacgtatgttatttagttaaatttgtgaaaattatgagatgctcaccaacccggtgataaacttgctccctcgccattggctggcctggtcacatggctgcccaactttattcagttgacagcaagtaggagggccctatggaaggagaaaaaaagacaacacgagaaaaattagtattttctaccttctgaaattaatggtcatgagttcgtatatggtgaactccaagtatgtggaccccaagttccctccgtgcgaggagtatttgcagggcggctacctaggcgagcagggcgccgactactacggcggcggcgcgcagggcgcagacttccagcccccggggctctacccacggcccgacttcggtgagcagcctttcggaggcagcggccccgggcctggctcggcgctgcctgcgcggggtcacggacaagagccaggcggccccggcggtcactacgccgctccaggagagccttgcccagctcccccggcgcctccgccggcgcccctgcctggcgcccgggcctacagtcagtccgaccccaagcagccgccctccgggacggcactcaagcagccggccgtggtctacccctggatgaagaaggtgcacgtgaattcggtgaaccccaactacaccggtggggaacccaagcggtcccgaacggcctacacccggcagcaagtcctagaactggaaaaagaatttcattttaacaggtatctgacaaggcgccgtcggattgaaatcgctcacaccctgtgtctgtcggagcgccagatcaagatctggttccagaaccggaggatgaagtggaaaaaagatcataagctgcccaacactaaaggcaggtcatcgtcctcatcttcctcctcatcttgctcctcctcagtcgcccccagccagcatttacagccgatggccaaagaccaccacacggacctgacgaccttatagaagtggggaccctgggcccatctctccctgcgcaccaggctgagccgaagctgcgggggcaggccgggcctgctgtcacctcgctgggctctaaggtactgtggggtggacctgggacaagcaggccgccctcggactaggttagcatcctgcccgagggcagccccctccctagagcgggatggggatgggagggggggcgggattctctctctaagtatattatatggcaggagctactgagaacataaaatcttggcgagtcattaaacttatgaaaa

SEQ ID NO: 181126 - DNA, 768 bp, Artificial Sequence
  derived and/or modified sequence
atggttatgtcatcttacatggttaatagcaagtacgtggaccccaagttcccaccctgtgaggaatatctccagggcgggtatctgggggagcagggagctgactactacggcggcggagcccaaggcgctgacttccagcctccagggctgtacccaaggcccgattttggcgaacagcctttcggaggctcaggacctggcccaggttcagccctgcccgcccgcgggcacggccaggagcccgggggccccgggggtcactacgccgcccctggcgaaccatgtcctgccccaccagccccgccgcccgcgcccctgcctggtgccagagcttattctcagtcagacccaaagcagccaccatccggcaccgcccttaagcaaccagccgttgtttatccctggatgaaaaaggtccacgtgaacagtgtcaaccccaactacacgggaggagaaccaaaaaggtccagaactgcttacactcgtcaacaggtgttggagcttgagaaggagttccattttaatcgttacttaacccggcggaggaggattgagatagcacatacgctgtgcctatcagaacggcagatcaagatatggttccagaaccgcagaatgaaatggaaaaaagatcacaagctcccaaacactaaaggacgatctagctcatccagcagttcaagctcctgcagctcaagcgtggcgccctcacagcatctccaaccaatggcaaaggaccaccatacagatctgacgactctctag

SEQ ID NO: 181127 - DNA, 1464 bp, Artificial Sequence
  derived and/or modified sequence
ataggaggattcattctcccttgagctgtgcctacttggtgtcggggggcgggggttgcattcagctgggggtgagtggaagggccacggaaggttggcaaaatcagtggcagacaaaagctgggattacctgaggggaatggggtgctggggactggaactacattaatatctggcaggggctctcaaatgtgccatagcaagctacttgattacacgtatgttatttagttaaatttgtgaaaattatgagatgctcaccaacccggtgataaacttgctccctcgccattggctggcctggtcacatggctgcccaactttattcagttgacagcaagtaggagggccctatggaaggagaaaaaaagacaacacgagaaaaattagtattttctaccttctgaaattaatggtcatgagttcgtatatggtgaactccaagtatgtggaccccaagttccctccgtgcgaggagtatttgcagggcggctacctaggcgagcagggcgccgactactacggcggcggcgcgcagggcgcagacttccagcccccggggctctacccacggcccgacttcggtgagcagcctttcggaggcagcggccccgggcctggctcggcgctgcctgcgcggggtcacggacaagagccaggcggccccggcggtcactacgccgctccaggagagccttgcccagctcccccggcgcctccgccggcgcccctgcctggcgcccgggcctacagtcagtccgaccccaagcagccgccctccgggacggcactcaagcagccggccgtggtctacccctggatgaagaaggtgcacgtgaattcggtgaaccccaactacaccggtggggaacccaagcggtcccgaacggcctacacccggcagcaagtcctagaactggaaaaagaatttcattttaacaggtatctgacaaggcgccgtcggattgaaatcgctcacaccctgtgtctgtcggagcgccagatcaagatctggttccagaaccggaggatgaagtggaaaaaagatcataagctgcccaacactaaaggcaggtcatcgtcctcatcttcctcctcatcttgctcctcctcagtcgcccccagccagcatttacagccgatggccaaagaccaccacacggacctgacgaccttatagaagtggggaccctgggcccatctctccctgcgcaccaggctgagccgaagctgcgggggcaggccgggcctgctgtcacctcgctgggctctaaggtactgtggggtggacctgggacaagcaggccgccctcggactaggttagcatcctgcccgagggcagccccctccctagagcgggatggggatgggagggggggcgggattctctctctaagtatattatatggcaggagctactgagaacataaaatcttggcgagtcattaaacttatgaaaatca

SEQ ID NO: 181128 - DNA, 768 bp, Artificial Sequence
  derived and/or modified sequence
atggtgatgagcagctacatggtgaacagcaaatatgtggaccccaagttccccccctgtgaggagtacctgcagggcggctacctgggggagcagggcgctgactactatggaggaggagcccagggcgctgacttccagcccccaggcctgtaccccaggccagactttggagagcagccctttggaggcagcggccctggccctggcagcgccctgcctgcccggggccacggccaggagcccggcggccctgggggccactacgccgcccctggagagccctgcccagcccccccagcccctcctccagcccccctgcccggggcccgggcctacagccagagcgaccccaagcagcccccatctggaacagccctgaagcagcctgctgtggtgtacccctggatgaagaaggtgcacgtgaacagcgtgaaccccaactacacaggaggagagcccaagaggagcaggacagcctacacccggcagcaggtgctggagctggagaaggagttccacttcaaccgctacctgaccaggagaagaagaattgaaattgcccacaccctgtgcctgtctgagcggcagatcaagatctggttccagaacagaaggatgaagtggaagaaggaccacaagctgcccaacaccaagggccgcagcagcagcagcagcagcagcagcagctgcagcagctctgtggcccccagccagcacctgcagcccatggccaaggaccaccacacagacctgaccaccctgtag

SEQ ID NO: 181129 - DNA, 768 bp, Artificial Sequence
  derived and/or modified sequence
atggtgatgagcagctacatggtgaacagcaagtacgtggaccccaagtttccaccttgcgaggagtatctgcagggcgggtatctcggagagcaaggcgccgattactacggcggcggtgctcaaggcgcagacttccagcccccgggattatacccccgccccgactttggggaacagccttttggtggcagcggaccaggacctggttctgcactccctgccaggggccatgggcaagaaccaggtggacccgggggacactacgctgctccaggcgaaccatgccctgctcccccagccccaccccccgcaccactgcccggcgctcgcgcctattctcagtctgaccccaagcagcccccttccggaacagccctgaagcaacccgcagtcgtgtatccttggatgaaaaaggtccatgtaaactctgtgaatccaaactacacaggtggcgaacctaagaggtctcggacagcctacacgcgtcaacaagtgttagagctagagaaggagttccacttcaaccggtacctcacacgcagacggcgaattgagatagctcacactctgtgcctgtccgagaggcagataaaaatctggtttcaaaaccggaggatgaagtggaagaaagatcacaaactgccaaataccaagggccggagttcctcttcttcatctagcagttcttgctcttcgagcgtggctcccagtcagcacctgcaaccgatggccaaagaccaccacaccgacttgaccacattgtag

SEQ ID NO: 181130 - DNA, 768 bp, Artificial Sequence
  derived and/or modified sequence
atggtgatgtcctcgtacatggtgaattcaaaatacgtagaccccaagtttcctccctgtgaggagtacctgcagggtggctatctgggggagcagggggcagattactacgggggtggggcacagggcgctgacttccaaccaccaggcctgtatcctagacccgattttggcgagcagcctttcggaggcagcggacccggacctgggagcgccctgcctgcaagggggcacggccaggaacctggcggtccaggagggcattatgccgctccgggagaaccctgtcctgcaccccctgcacctcctcctgccccactccccggtgccagggcgtattcgcagtcagaccccaaacagcctccatccgggacagctctgaagcagccggcagtagtgtatccatggatgaagaaggttcacgttaactcggtgaatcccaactacacaggcggtgagccaaaacgctccaggactgcttacactcgccagcaggttttggaactggagaaggaattccattttaaccgctatttgactcggaggcgaagaattgagatcgcccacaccctctgcctcagcgagagacagataaagatttggtttcaaaacagaagaatgaaatggaaaaaggatcataaattgccgaacacaaagggacgtagcagctcctcgagctcttcctcttcctgcagtagcagcgtcgccccttcacaacatctgcaacccatggcgaaagaccaccataccgatctcaccaccctgtag

SEQ ID NO: 181131 - DNA, 768 bp, Artificial Sequence
  derived and/or modified sequence
atggtgatgagcagctacatggtgaacagcaagtacgtggaccccaagttccccccctgcgaggagtacctgcagggcggctacctgggcgagcagggcgccgactactacggcggcggcgcccagggcgccgacttccagccccccggcctgtaccccagacccgacttcggcgagcagcccttcggcggcagcggccccggccccggcagcgccctgcccgccagaggccacggccaggagcccggcggccccggcggccactacgccgcccccggcgagccctgccccgccccccccgcccccccccccgcccccctgcccggcgccagagcctacagccagagcgaccccaagcagccccccagcggcaccgccctgaagcagcccgccgtggtgtacccctggatgaagaaggtgcacgtgaacagcgtgaaccccaactacaccggcggcgagcccaagagaagcagaaccgcctacaccagacagcaggtgctggagctggagaaggagttccacttcaacagatacctgaccagaagaagaagaatcgagatcgcccacaccctgtgcctgagcgagagacagatcaagatctggttccagaacagaagaatgaagtggaagaaggaccacaagctgcccaacaccaagggcagaagcagcagcagcagcagcagcagcagctgcagcagcagcgtggcccccagccagcacctgcagcccatggccaaggaccaccacaccgacctgaccaccctgtag

SEQ ID NO: 181132 - protein, 786 aa, Artificial Sequence
  derived and/or modified sequence
MVHFCGLLTLHREPVPLKSISVSVNIYEFVAGVSATLNYENEEKVPLEAFFVFPMDEDSAVYSFEALVDGKKIVAELQDKMKARTNYEKAISQGHQAFLLEGDSSSRDVFSCNVGNLQPGSKAAVTLKYVQELPLEADGALRFVLPAVLNPRYQFSGSSKDSCLNVKTPIVPVEDLPYTLSMVATIDSQHGIEKVQSNCPLSPTEYLGEDKTSAQVSLAAGHKFDRDVELLIYYNEVHTPSVVLEMGMPNMKPGHLMGDPSAMVSFYPNIPEDQPSNTCGEFIFLMDRSGSMQSPMSSQDTSQLRIQAAKETLILLLKSLPIGCYFNIYGFGSSYEACFPESVKYTQQTMEEALGRVKLMQADLGGTEILAPLQNIYRGPSIPGHPLQLFVFTDGEVTDTFSVIKEVRINRQKHRCFSFGIGEGTSTSLIKGIARASGGTSEFITGKDRMQSKALRTLKRSLQPVVEDVSLSWHLPPGLSAKMLSPEQTVIFRGQRLISYAQLTGRMPAAETTGEVCLKYTLQGKTFEDKVTFPLQPKPDVNLTIHRLAAKSLLQTKDMGLRETPASDKKDALNLSLESGVISSFTAFIAINKELNKPVQGPLAHRDVPRPILLGASAPLKIKCQSGFRKALHSDRPPSASQPRGELMCYKAKTFQMDDYSLCGLISHKDQHSPGFGENHLVQLIYHQNANGSWDLNEDLAKILGMSLEEIMAAQPAELVDSSGWATILAVIWLHSNGKDLKCEWELLERKAVAWMRAHAGSTMPSVVKAAITFLKSSVDPAIFAF

SEQ ID NO: 181133 - protein, 185 aa, Artificial Sequence
  derived and/or modified sequence
MGPERHLSGAPARMATVVLGGDTMGPERIFPNQTEELGHQGPSEGTGDWSSEEPEEEQEETGSGPAGYSYQPLNQDPEQEEVELAPVGDGDVVADIQDRIQALGLHLPDPPLESEDEDEEGATALNNHSSIPMDPEHVELVKRTMAGVSLPAPGVPAWAREISDAQWEDVVQKALQARQASPAWK

SEQ ID NO: 181134 - DNA, 558 bp, Artificial Sequence
  derived and/or modified sequence
atggggcctgagcgacacctcagcggtgcgccagctcgaatggcaaccgtcgtcctcggtggagataccatgggacccgagagaatttttcctaaccagacagaagagctggggcatcaggggcccagtgagggtaccggggattggtcctctgaggaacctgaagaggagcaggaggagaccggttcaggacctgcaggctactcttatcagccactcaatcaagatcctgagcaggaggaggtggagcttgctccagttggagacggagatgtggtggcagacatccaggacagaattcaagccttaggactccatctccccgacccaccactggaatctgaggatgaggacgaggagggtgcaaccgccctcaacaaccacagctcaattccaatggaccctgagcacgtcgagctggtaaaacgcaccatggcaggcgtcagcctgccagcccctggcgtgcctgcgtgggcaagagagatcagtgatgcccagtgggaagacgtggtacagaaagctctgcaggcgcgccaggcttcccccgcatggaagtag

SEQ ID NO: 181135 - DNA, 558 bp, Artificial Sequence
  derived and/or modified sequence
atgggccctgagcggcacctgagcggggccccagccaggatggccaccgtggtgctgggcggggacaccatgggccctgagcgcatcttccccaaccagacagaggagctgggccaccagggccccagcgagggcaccggggactggagcagcgaggagcctgaggaggagcaggaggagactggaagtggccctgctggctacagctaccagcccctgaaccaggaccctgagcaggaggaggtggagctggcccctgtgggagatggagatgtggtggccgacatccaggaccgcatccaggccctgggcctgcacctgcctgacccccccctggagagtgaagatgaagatgaggagggcgccacagccctgaacaaccacagcagcatccccatggaccctgagcacgtggagctggtgaagaggaccatggccggcgtgtccctgcctgcccctggggtgcctgcctgggcccgggagatcagtgatgcccagtgggaggatgtggtgcagaaggccctgcaggcccggcaggccagccctgcctggaagtag

SEQ ID NO: 181136 - DNA, 1089 bp, Artificial Sequence
  derived and/or modified sequence
gcggggctggaggactaggcacctctgcacgtcctgccccgccggaagtggaggccgcgggctctgagcgggtgaggcgcgcgggaacaccggcgccgggattcggatgggggcgggtgggggacgctgcagctggggccatttgaggggagcccatggggcctgaaaggcatctgtcaggcgcccctgcccggatggcaacagtagttctaggaggagacaccatgggccctgagcgtatcttccccaatcagactgaggaactgggacatcagggcccttcagaaggcactggggattggagcagtgaggagcctgaggaagagcaggaggaaacggggtcgggcccagctggctactcctaccagcccctgaaccaagatcctgaacaagaggaggtggaactggcaccagtgggggatggagatgtagttgctgacatccaggatcgaatccaggccctggggcttcatttgccagacccaccattagagagtgaagatgaagatgaggagggagctacagcgttgaacaaccacagctctattcccatggacccagaacatgtagagctggtgaaaaggacaatggctggagtaagcctgcctgcgccaggggttcctgcctgggctcgggagatatcggatgcccagtgggaagatgtggtacagaaagccctccaagcccggcaggcatcccctgcctggaagtgaccacagtgagagctgccttatattcctacattccaggccagaaccagcacaggactgaacacatccctggttgtaatgtccatttccatcttccccgtctccctttccacatcaaggcacatcagacttctcagagacccactttattcagttctgtacatatggggacatcggtccaagcccaacccaccttagcatgtatcactctgtggagaataaagcaccctatgtacacagccaaaagccgcactgcctgcgcccctggaacctgggtccggccttcctcagcccctggcccctccaaggtacctataagggacaagagaaggcctgcccagcatagcacaaacaaggaaataaataggtgttggcagga

SEQ ID NO: 181137 - DNA, 558 bp, Artificial Sequence
  derived and/or modified sequence
atgggccccgagcggcacctgagcggcgcccccgcccggatggccactgtcgttttaggaggagacactatggggcctgaacggatcttcccgaatcaaacagaagagttagggcatcaggggccaagtgaaggcaccggggactggagtagtgaggaaccagaggaggagcaggaagagaccggttccggcccagcggggtacagttaccagcctctaaatcaggatcccgaacaagaagaggtggagctcgcgccagtgggcgatggtgatgtggttgctgacatccaagatcgtatccaggctctcggcctccacctgccagatcctccgctggaatcagaggacgaagatgaggagggagcaactgctctgaacaatcacagctcaatccctatggaccctgagcacgtagagttggttaagcgcacgatggctggcgtaagccttccggcacctggcgtgccagcgtgggccagggagatctctgacgctcaatgggaagacgttgtgcagaaagcactgcaggcccgtcaggccagcccggcttggaaatag

SEQ ID NO: 181138 - DNA, 558 bp, Artificial Sequence
  derived and/or modified sequence
atgggacctgaacgacatctttccggcgcacccgcacgcatggccacggtcgtattgggcggagacaccatgggacccgagcgaatctttcccaatcagactgaagagttaggacaccagggaccaagtgaagggaccggcgactggtcatctgaggagcccgaggaggagcaggaggagaccggatctggtcctgccggttactcttaccagcccctgaaccaggatcccgaacaggaagaggttgagctggcgccagtgggggatggggacgtggtcgccgatatccaggaccggattcaggccctgggattacacctccccgatcctccactggagtctgaagacgaagacgaagagggagctactgccctcaacaaccattcatctatacccatggatcccgagcatgtcgagttagtgaaacgtactatggccggtgtgtccctgcccgctccaggagtgccagcctgggccagagagattagtgacgcacagtgggaggatgtggtgcagaaagctctgcaagcacgtcaggcatctccagcgtggaaatag

SEQ ID NO: 181139 - DNA, 558 bp, Artificial Sequence
  derived and/or modified sequence
atgggccccgagagacacctgagcggcgcccccgccagaatggccaccgtggtgctgggcggcgacaccatgggccccgagagaatcttccccaaccagaccgaggagctgggccaccagggccccagcgagggcaccggcgactggagcagcgaggagcccgaggaggagcaggaggagaccggcagcggccccgccggctacagctaccagcccctgaaccaggaccccgagcaggaggaggtggagctggcccccgtgggcgacggcgacgtggtggccgacatccaggacagaatccaggccctgggcctgcacctgcccgacccccccctggagagcgaggacgaggacgaggagggcgccaccgccctgaacaaccacagcagcatccccatggaccccgagcacgtggagctggtgaagagaaccatggccggcgtgagcctgcccgcccccggcgtgcccgcctgggccagagagatcagcgacgcccagtgggaggacgtggtgcagaaggccctgcaggccagacaggccagccccgcctggaagtag

SEQ ID NO: 181140 - protein, 90 aa, Artificial Sequence
  derived and/or modified sequence
MACPLDQAIGLLVAIFHKYSGREGDKHTLSKKELKELIQKELTIGSKLQDAEIARLMEDLDRNKDQEVNFQEYVTFLGALALIYNEALKG

SEQ ID NO: 181141 - DNA, 273 bp, Artificial Sequence
  derived and/or modified sequence
atggcgtgccctttagaccaggccatcggcttactggttgcgatattccacaagtacagcggaagggaaggcgataaacatactctgtctaagaaagagcttaaggaattaatacaaaaggagctgacaattggctcgaagttgcaggacgcggagattgccagactcatggaggacctcgatcgcaacaaggatcaggaggtcaacttccaggagtacgttacgtttttgggcgctttagctctcatatataacgaggctctgaaaggatag

SEQ ID NO: 181142 - DNA, 273 bp, Artificial Sequence
  derived and/or modified sequence
atggcctgcccacttgatcaggcgattgggctccttgttgccatctttcataagtattctggacgggaaggtgacaaacacactttatctaaaaaagaattaaaagagctcatccaaaaggagctcacaatcggcagtaagcttcaggatgccgagatcgctcgtctaatggaggatctcgataggaacaaagatcaggaagtcaacttccaagagtacgttacctttctgggcgccctggccctgatctacaatgaagccctcaaaggctag

SEQ ID NO: 181143 - DNA, 273 bp, Artificial Sequence
  derived and/or modified sequence
atggcctgccccctggaccaggccatcggcctgctggtggccatcttccacaagtacagcggccgggagggggacaagcacaccctgagcaagaaggagctgaaggagctgatccagaaggagctgaccatcggcagcaagctgcaggatgctgagatcgcccggctgatggaggacctggacaggaacaaggaccaggaggtgaacttccaggagtatgtgaccttcctgggcgccctggccctgatctacaatgaggccctgaagggctag

SEQ ID NO: 181144 - DNA, 273 bp, Artificial Sequence
  derived and/or modified sequence
atggcctgccccctggaccaggccatcggcctgctggtggccatctttcataaatactcgggcagagaaggggataagcatactctgtctaaaaaggagttgaaagaactgattcagaaagagctgaccattggatccaagcttcaagatgctgagattgcccgcttgatggaggatttagacagaaataaagaccaggaggtgaacttccaggagtatgtaaccttcctgggagcattggcattgatttataacgaggctctcaaaggatag

SEQ ID NO: 181145 - DNA, 273 bp, Artificial Sequence
  derived and/or modified sequence
atggcctgccccctggaccaggccatcggcctgctggtggccatctttcataaatattccgggagggaaggagacaaacacactctgtccaagaaagagctcaaagaattaattcagaaggaattaactattggaagtaaattgcaggatgcagagatcgctcgcttgatggaagatcttgaccgcaataaggaccaggaagtgaacttccaagagtacgttacctttctcggggctctggcactgatctataatgaggctttgaaggggtag

SEQ ID NO: 181146 - DNA, 273 bp, Artificial Sequence
  derived and/or modified sequence
atggcctgcccgttggaccaggctatcggcctgctggtggctatcttccacaaatactccggccgagagggggacaaacatacattatccaaaaaggagttaaaagagctcattcagaaagagctgacaatcgggtctaaactgcaggatgcagaaatcgcgagattaatggaagatctcgatagaaacaaggatcaggaagtgaactttcaggagtacgtgacattcctcggggctttggccctaatctacaacgaggcactgaaaggttag

SEQ ID NO: 181147 - DNA, 273 bp, Artificial Sequence
  derived and/or modified sequence
atggcatgccccctggaccaagctattggtttgttggtggctatcttccacaagtattcaggacgcgaaggagacaaacataccctgtccaagaaggaactgaaggaactgatccagaaagagcttaccattggatccaagctgcaggacgctgaaattgccaggctgatggaggacctcgatcggaacaaagaccaggaggtgaactttcaggagtacgtgacctttctgggcgcactggcactcatctataatgaagctcttaaaggatag

SEQ ID NO: 181148 - DNA, 684 bp, Artificial Sequence
  derived and/or modified sequence
ctgcgcagatgaggggagactcgtcaccaggcgtgcagtgggcactgctgggctcccccatcccgtcctaacccggaacagccccgggcaggaggcgtggaaagtcgagggggtaaaccgcgaatgtgcgttgtgtaagccacggcgcagggtggggcgcgggcgggacttgggcgggcggggtgggcttggccgagctggcctccggggcaccgaccgctataaggccagtcggactgcgacacagcccatcccctcgaccgctcgcgtcgcatttggccgcctccctaccgctccaagcccagccctcagccatggcatgccccctggatcaggccattggcctcctcgtggccatcttccacaagtactccggcagggagggtgacaagcacaccctgagcaagaaggagctgaaggagctgatccagaaggagctcaccattggctcgaagctgcaggatgctgaaattgcaaggctgatggaagacttggaccggaacaaggaccaggaggtgaacttccaggagtatgtcaccttcctgggggccttggctttgatctacaatgaagccctcaagggctgaaaataaatagggaagatggagacaccctctgggggtcctctctgagtcaaatccagtggtgggtaattgtacaataaattttttttggtcaaattta

SEQ ID NO: 181149 - DNA, 673 bp, Artificial Sequence
  derived and/or modified sequence
gagctgcgcagatgaggggagactcgtcaccaggcgtgcagtgggcactgctgggctcccccatcccgtcctaacccggaacagccccgggcaggaggcgtggaaagtcgagggggtaaaccgcgaatgtgcgttgtgagccctgggtactttccagggccagctgccctcacgctgggggtccagccatcccctgcccagttcagccgctggatccagactggggccatctgtggcgctcccccgctggagggatagtcaggagcagcagtgctgtgccaggtccaagcccagccctcagccatggcatgccccctggatcaggccattggcctcctcgtggccatcttccacaagtactccggcagggagggtgacaagcacaccctgagcaagaaggagctgaaggagctgatccagaaggagctcaccattggctcgaagctgcaggatgctgaaattgcaaggctgatggaagacttggaccggaacaaggaccaggaggtgaacttccaggagtatgtcaccttcctgggggccttggctttgatctacaatgaagccctcaagggctgaaaataaatagggaagatggagacaccctctgggggtcctctctgagtcaaatccagtggtgggtaattgtacaataaattttttttggtcaaattta

SEQ ID NO: 181150 - DNA, 273 bp, Artificial Sequence
  derived and/or modified sequence
atggcctgccccctggaccaggccatcggcctgctggtggccatcttccacaagtacagcggcagagagggcgacaagcacaccctgagcaagaaggagctgaaggagctgatccagaaggagctgaccatcggcagcaagctgcaggacgccgagatcgccagactgatggaggacctggacagaaacaaggaccaggaggtgaacttccaggagtacgtgaccttcctgggcgccctggccctgatctacaacgaggccctgaagggctag

SEQ ID NO: 181151 - protein, 383 aa, Artificial Sequence
  derived and/or modified sequence
MERRARSSSRESRGRGGRTPHKENKRAKAERSGGGRGRQEAGPEPSGSGRAGTPGEPRAPAATVVDVDEVRGSGEEGTEVVALLESERPEEGTKSSGLGACEWLLVLISLLFIIMTFPFSIWFCVKVVQEYERVIIFRLGHLLPGRAKGPGLFFFLPCLDTYHKVDLRLQTLEIPFHEIVTKDMFIMEIDAICYYRMENASLLLSSLAHVSKAVQFLVQTTMKRLLAHRSLTEILLERKSIAQDAKVALDSVTCIWGIKVERIEIKDVRLPAGLQHSLAVEAEAQRQAKVRMIAAEAEKAASESLRMAAEILSGTPAAVQLRYLHTLQSLSTEKPSTVVLPLPFDLLNCLSSPSNRTQGSLPFPSPSKPVEPLNPKKKDSPML

SEQ ID NO: 181152 - DNA, 1152 bp, Artificial Sequence
  derived and/or modified sequence
atggagcgccgggcccgctcgtcatcccgggaatctcgcgggaggggaggacgaacaccccacaaagagaataaaagggccaaagctgagagatccggaggtggacgaggcaggcaggaagccgggcccgaaccttcaggttcaggtagagccggcacacccggcgaacctcgcgcaccggctgcaacagtggtggatgtggatgaggtccggggatctggagaggagggaacagaagtcgtggctctgctggagtccgagaggcccgaagaaggaaccaagtcctcaggtctgggggcttgcgagtggctgctcgtgctcattagccttctcttcattatcatgacattccccttctcaatctggttttgtgtaaaggtggttcaagagtatgaaagggtgatcatattcaggctgggtcacctgctccctggacgcgctaaagggcctggcctattttttttcttaccatgtttagatacataccacaaggtagatctgcgcctgcaaacgctggagatcccctttcacgaaatcgtgaccaaggacatgtttattatggaaattgacgcaatttgttactacagaatggaaaatgcaagcctgctgctgagctccttggctcacgtgagtaaagctgtccagttcctagtccagactactatgaagcggctactcgctcacagatccttaacagaaatactgctcgagcgcaaatcaatagctcaggatgccaaagtggccttggacagtgtgacatgcatctgggggattaaggtggagcgcattgagataaaggacgtccgtctgcccgcgggcctccagcactcattggcagtcgaggccgaggctcagaggcaagccaaggtaaggatgattgcagccgaagcagagaaagcagccagcgaatctctgaggatggccgctgaaattctctcaggtactcccgcagccgtgcaacttcgctacctgcatacactgcagagcctatcaacagaaaagccatcaactgtggtcttgcctctccccttcgacttactgaattgcctttcgagcccctccaacaggactcagggcagtctgccattcccctcccccagtaagccggtggagccccttaatccgaagaagaaagatagccccatgctgtag

SEQ ID NO: 181153 - DNA, 1152 bp, Artificial Sequence
  derived and/or modified sequence
atggagcggcgggcccggagcagcagccgggagagccggggccggggcggccgcaccccccacaaggagaacaagagggccaaggccgagaggtctgggggcggccggggccggcaggaggccggccctgagcccagcggcagcggccgggccggcaccccaggagagccccgggccccagctgccaccgtggtggatgtggatgaggtgcggggcagcggggaggagggcacagaggtggtggccctgctggagagcgagaggcctgaggagggcaccaagagcagcggcctgggcgcctgtgagtggctgctggtgctgatcagcctgctcttcatcatcatgaccttccccttcagcatctggttctgtgtgaaggtggtgcaggagtatgaaagagtcatcatcttccggctgggccacctgctgcccggccgggccaagggccctggcctcttcttcttcctgccctgcctggacacctaccacaaggtggacctgcggctgcagaccctggagatccccttccatgaaattgtgaccaaggacatgttcatcatggagattgatgccatctgctactacaggatggagaatgccagcctgctgctgagcagcctggcccacgtgtccaaggctgtgcagttcctggtgcagaccaccatgaagaggctgctggcccacaggagcctgacagagatcctgctggagaggaagagcatcgcccaggatgccaaggtggccctggacagcgtgacctgcatctggggcatcaaggtggagagaattgagatcaaggatgtgcggctgcctgctggcctgcagcacagcctggccgtggaggccgaggcccagaggcaggccaaggtgaggatgattgctgctgaggccgagaaggccgccagcgagagcctgaggatggctgctgagatcctgagcggcaccccagctgctgtgcagctgcgctacctgcacaccctgcagagcctgagcacagagaagcccagcacagtggtgctgcccctgccctttgacctgctgaactgcctgagcagccccagcaacagaacccagggcagcctgcccttccccagccccagcaagcctgtggagcccctgaaccccaagaagaaggacagccccatgctgtag

SEQ ID NO: 181154 - DNA, 1152 bp, Artificial Sequence
  derived and/or modified sequence
atggagcggcgggcccggagcagcagccgggagagccggggccggggcgggagaactccccataaggagaataaaagagctaaggctgaacggtcggggggtggccgagggcggcaagaagcaggacccgagcctagcgggagcgggcgggcaggtaccccgggggaaccgcgcgctccggcggctacagtcgttgatgtggatgaagtcagaggatctggcgaggagggcactgaagtcgttgccctactggagtcggaacggcctgaggagggaactaagtccagcggcctgggtgcctgcgaatggcttctggtgctgattagcttactgtttattattatgacatttcccttctccatctggttctgtgtaaaagtggtgcaagaatacgagcgggtgattattttcagacttggtcacctcctgcccggacgagccaagggacctggactcttcttcttcctcccctgtctggatacgtatcacaaagtagatctcagattgcaaaccctggaaatccccttccacgagattgtcaccaaggacatgtttatcatggagatagatgccatctgttactaccggatggaaaacgcctcgctgctgctgtcgtctctggctcacgtatcaaaagctgtccagtttttggtccagaccaccatgaaacgacttcttgcccaccggtcattaactgagattttactcgaacggaagtctattgcacaggacgccaaagtagctctcgattcagttacttgcatctggggaatcaaagtagagaggatcgagattaaagacgtgcgactgccagccggtctgcaacattcactggcagtggaagccgaagcccaacgacaagctaaagttaggatgatagctgcggaggcagagaaggcagcctcagagtccctgcgcatggccgctgagattttatcaggaacgcccgccgccgtgcagctcaggtatctgcacaccctccagagtctctccactgagaaacccagtactgtggtgctgccactgcccttcgacctgctgaattgcctttcctccccgagtaatcgcacacaggggtctttgcctttcccgtccccttctaagcccgtcgagccactgaatccaaagaaaaaggacagcccgatgctctag

SEQ ID NO: 181155 - DNA, 1855 bp, Artificial Sequence
  derived and/or modified sequence
cacagggactgcgctcccgtgcccctagcgctcccgcgctgctgctccagccgcccggcagctctgaggatggagaggagggcgcggagctcctccagggagtcccgcgggcgaggcggcaggactccgcacaaggagaacaagagggcaaaggccgagaggagcggcggaggccgcgggcgccaggaggctgggcccgagccgtcgggctccggacgggcggggaccccgggggagccccgagcgcccgccgccacggtggtggacgtggatgaggtccgaggctccggcgaggagggcaccgaggtggtggcgctgttggagagcgagcggcccgaggaaggtaccaaatcctccggcttaggggcctgtgagtggcttcttgtcctcatttccctgctcttcatcatcatgaccttccctttttccatctggttctgcgtaaaggttgtacaagagtatgaaagagtaattatattccgactgggacatctgcttcctggaagagccaaaggccctggtcttttcttttttttgccctgcctggatacctaccacaaggttgaccttcgtctccaaactctggagataccttttcatgagatcgtgaccaaagacatgtttataatggagatagatgccatttgctactaccgaatggaaaatgcctctcttctcctaagcagtcttgctcatgtatctaaagctgtgcaattccttgtgcaaaccactatgaagcgtctcctagcacatcgatccctcactgaaattcttctagagaggaagagcatcgcccaagatgcaaaggttgccttggattcagtgacctgtatttggggaatcaaagtggagagaatagaaattaaagatgtgaggttgccagctgggcttcagcactcactggctgtggaggctgaagcgcaaagacaagccaaagtgcggatgattgctgcagaagcggaaaaggctgcttctgagtccctgaggatggcagctgagattctgtcaggcacccctgctgccgttcagcttcgatacctccacacccttcagtctctgtccacagagaagccttccactgtggttttacctttgccatttgacctactgaattgcctgtcttctcccagcaacagaactcagggaagcctccccttcccaagtccttccaaacctgttgagccactaaatcctaaaaagaaagactctcccatgttataggaaggatggggcataatgtgactgtaaaggggcctgccatagaaaagtcacatgcctgagggagacactctgtcctcattccctgcccttcctttggttgccatatggaatggccatggaatgcacgaagtcacaatgcaccatccatgagaagacggtgaaatgatgtaatgacagagaaggcagacaacatgtttccgtgactcatctagtcagagcaattatgggaaacagctttggtcaacattctactttggaaagaattttgagtctagatgtggttaaattttgacttctgggaacttggttcagatgtccctttcactgtatgtcctctgacccctttggcaaggttgccacagctcccacagcccttcctacaagcacctatcattgggcttgtcacactctattgctcttctgtcccaaagatgcagtcttctctccaatgatactaccaagtcttagttttcctcaaccacactcaatctttttgctccaccctgaattcctcacacctaaccctgatagttacctaaagtgacacttaaatgtttcagagtgaatgcaaaaaagagagatgtacttggagtcggatatacaatttatccctaattaaagcatttaaaaggaa

SEQ ID NO: 181156 - DNA, 1152 bp, Artificial Sequence
  derived and/or modified sequence
atggaacgacgcgcacggtcatcctccagggagagccgcggtcggggaggaagaactccccataaggagaataaacgcgcaaaagccgaacggtcaggcggtggcagggggaggcaggaagctggccctgaacctagcggtagcggacgagcgggtacacccggtgagccgagggctcctgcggcaaccgtggtcgatgtcgacgaagtgagaggctctggagaagagggaaccgaggtggtggctctgctagaatccgagcgacctgaggaaggaactaagtctagtggactgggggcatgcgagtggttgctggtccttatctcactgctgttcatcatcatgacgtttcctttttccatctggttttgtgtgaaagtcgtgcaggaatatgagagagtgattatattcaggctcgggcaccttttgcctggtcgggctaagggcccaggtctgttttttttccttccatgtttggacacttaccacaaggtcgatcttcgcctccagacactcgaaattcctttccatgaaattgtcaccaaggatatgtttataatggaaattgacgctatctgctactaccggatggagaacgctagtctcttactatcgtcactcgcacatgtgagtaaggcagtgcagtttctggtacaaaccaccatgaagagactccttgcccaccgcagcctaacagagattctcctggaaagaaaaagcatcgctcaggacgctaaagttgctctagacagtgtcacttgcatttgggggattaaggtggaacggatcgaaattaaggacgtccgcctgcctgccggactgcagcattccttggccgtggaggctgaggcccagcggcaagccaaagtacgtatgattgcggctgaggcggagaaagctgcgagcgaatccttacgtatggccgctgaaatcttgtcaggcacacccgcagccgtgcagctgcggtacctgcataccctccagagcctcagcacagagaagccttcgaccgtagtattgccattacccttcgacctgctgaattgtctcagcagccctagcaacaggactcaaggatctctcccattcccgtctcctagcaagcctgtggagcccctgaatcccaaaaagaaggactcaccaatgctgtag

SEQ ID NO: 181157 - DNA, 1152 bp, Artificial Sequence
  derived and/or modified sequence
atggagagaagagccagaagcagcagcagagagagcagaggcagaggcggcagaaccccccacaaggagaacaagagagccaaggccgagagaagcggcggcggcagaggcagacaggaggccggccccgagcccagcggcagcggcagagccggcacccccggcgagcccagagcccccgccgccaccgtggtggacgtggacgaggtgagaggcagcggcgaggagggcaccgaggtggtggccctgctggagagcgagagacccgaggagggcaccaagagcagcggcctgggcgcctgcgagtggctgctggtgctgatcagcctgctgttcatcatcatgaccttccccttcagcatctggttctgcgtgaaggtggtgcaggagtacgagagagtgatcatcttcagactgggccacctgctgcccggcagagccaagggccccggcctgttcttcttcctgccctgcctggacacctaccacaaggtggacctgagactgcagaccctggagatccccttccacgagatcgtgaccaaggacatgttcatcatggagatcgacgccatctgctactacagaatggagaacgccagcctgctgctgagcagcctggcccacgtgagcaaggccgtgcagttcctggtgcagaccaccatgaagagactgctggcccacagaagcctgaccgagatcctgctggagagaaagagcatcgcccaggacgccaaggtggccctggacagcgtgacctgcatctggggcatcaaggtggagagaatcgagatcaaggacgtgagactgcccgccggcctgcagcacagcctggccgtggaggccgaggcccagagacaggccaaggtgagaatgatcgccgccgaggccgagaaggccgccagcgagagcctgagaatggccgccgagatcctgagcggcacccccgccgccgtgcagctgagatacctgcacaccctgcagagcctgagcaccgagaagcccagcaccgtggtgctgcccctgcccttcgacctgctgaactgcctgagcagccccagcaacagaacccagggcagcctgcccttccccagccccagcaagcccgtggagcccctgaaccccaagaagaaggacagccccatgctgtag

SEQ ID NO: 181158 - DNA, 921 bp, Artificial Sequence
  derived and/or modified sequence
atgtacagcttcatggccggcagcatcttcatcaccatcttcggcaacctggccatgatcatcagcatcagctacttcaagcagctgcacacccccaccaacttcctgatcctgagcatggccatcaccgacttcctgctgggcttcaccatcatgccctacagcatgatcagaagcgtggagaactgctggtacttcggcctgaccttctgcaagatctactacagcttcgacctgatgctgagcatcaccagcatcttccacctgtgcagcgtggccatcgacagattctacgccatctgctaccccctgctgtacagcaccaagatcaccatccccgtgatcaagagactgctgctgctgtgctggagcgtgcccggcgccttcgccttcggcgtggtgttcagcgaggcctacgccgacggcatcgagggctacgacatcctggtggcctgcagcagcagctgccccgtgatgttcaacaagctgtggggcaccaccctgttcatggccggcttcttcacccccggcagcatgatggtgggcatctacggcaagatcttcgccgtgagcagaaagcacgcccacgccatcaacaacctgagagagaaccagaacaaccaggtgaagaaggacaagaaggccgccaagaccctgggcatcgtgatcggcgtgttcctgctgtgctggttcccctgcttcttcaccatcctgctggaccccttcctgaacttcagcacccccgtggtgctgttcgacgccctgacctggttcggctacttcaacagcacctgcaaccccctgatctacggcttcttctacccctggttcagaagagccctgaagtacatcctgctgggcaagatcttcagcagctgcttccacaacaccatcctgtgcatgcagaaggagagcgagtag

SEQ ID NO: 181159 - DNA, 921 bp, Artificial Sequence
  derived and/or modified sequence
atgtacagcttcatggccgggagcatattcatcaccatcttcggcaatctcgctatgattatctccatctcctatttcaagcagctgcataccccaaccaacttcctaatcttaagtatggccataacggactttctacttggcttcacgattatgccttatagcatgatcagatcagtggagaattgttggtattttggtctgacattctgcaagatttattactcttttgacttaatgctgtccattacttctatcttccatctgtgtagtgtggccattgatcgcttttatgctatctgctacccactgctgtacagcacaaaaattaccatcccagtaattaaaagactgctcctgctctgctggtccgtcccaggcgcattcgcctttggtgtggtctttagtgaggcttatgctgacggcatcgaagggtacgacatcctggtagcctgctcgagttcatgccctgtcatgtttaataaactctgggggactacactctttatggccgggttttttaccccgggctcaatgatggtgggcatctatggaaagatttttgccgtgagtcggaagcacgctcatgctatcaataatttgcgggaaaatcagaataaccaggtcaagaaagacaaaaaggctgctaagacgcttggaatagtgatcggcgtgttcctcttgtgctggtttccttgctttttcaccatccttctggatccgtttctgaatttctccaccccagtagtcctgtttgacgccttgacttggttcggatacttcaacagcacctgtaatcccctgatctatgggtttttttacccatggttcagacgggcccttaagtacatcttgctcggcaaaatcttctcatcctgtttccacaataccatcctctgtatgcagaaggagtctgaatag

SEQ ID NO: 181160 - DNA, 921 bp, Artificial Sequence
  derived and/or modified sequence
atgtattcctttatggcaggaagcatttttatcaccatctttggcaatctcgctatgattatatccatctcctacttcaaacaactgcatacaccaaccaattttctgattctgtccatggctatcaccgactttttgctgggctttaccatcatgccatactccatgataagatccgtggaaaattgttggtacttcgggctgaccttttgtaaaatctattattccttcgacttgatgttgtcgataacttctatcttccatctgtgtagtgttgctattgaccgattctacgcaatctgttacccattgctgtactcaactaagatcactattcctgtgataaagaggttgttgctcctgtgctggtctgtgcccggagccttcgcattcggggttgtgtttagtgaagcttatgccgatggaatagaaggctacgacatcctagttgcgtgttccagttcttgtccagtgatgtttaataagctttggggcaccactctttttatggctggtttctttaccccaggaagcatgatggtcggtatctacgggaagatctttgcggtgtcaagaaaacacgcacatgccatcaacaacctccgcgaaaatcaaaataatcaggtaaaaaaagacaaaaaagcggcaaagacactcggtatagttatcggggtgttcttgctgtgctggtttccttgcttttttactattctgctggatcctttcctgaatttctctactcccgtggtactgttcgacgctctgacatggttcggctatttcaactccacatgtaatcccctgatctacggattcttctatccttggttccgcagggcgttaaaatatattctgctcggaaaaatattttccagctgctttcacaacaccatactgtgcatgcagaaagagtccgagtag

SEQ ID NO: 181161 - DNA, 921 bp, Artificial Sequence
  derived and/or modified sequence
atgtacagcttcatggccggcagcatcttcatcaccatcttcggcaacctggccatgatcatcagcatctcctacttcaagcagctgcacacccccaccaacttcctgatcctgtccatggccatcacagacttcctgctgggcttcaccatcatgccctacagcatgatccgctctgtggagaactgctggtacttcggcctgaccttctgcaagatctactacagctttgacctgatgctgagcatcaccagcatcttccacctgtgcagcgtggccatcgaccgcttctacgccatctgctaccccctgctgtacagcaccaagatcaccatccctgtgatcaagaggctgctgctgctgtgctggagcgtgcctggggcctttgcctttggagtggtgttcagcgaggcctatgcagatggcatcgagggctatgacatcctggtggcctgcagcagcagctgccctgtgatgttcaacaagctgtggggcaccaccctcttcatggccggcttcttcaccccaggctccatgatggtgggcatctacggcaagatctttgctgtgtccaggaagcacgcccacgccatcaacaacctgcgggagaaccagaacaaccaggtgaagaaggacaagaaggccgccaagaccctgggcatcgtgattggagtcttcctgctgtgctggttcccctgcttcttcaccatcctgctggaccccttcctgaacttcagcacccctgtggtgctgtttgatgccctgacctggtttggctacttcaacagcacctgcaaccccctcatctacggcttcttctacccctggttccggcgggccctgaagtacatcctgctgggcaagatcttcagcagctgcttccacaacaccatcctgtgcatgcagaaggagagcgagtag

SEQ ID NO: 181162 - DNA, 921 bp, Artificial Sequence
  derived and/or modified sequence
atgtacagcttcatggccggcagcatcttcatcaccatcttcggcaaccttgcaatgataatttcgatcagctacttcaaacagctgcacacgcccactaattttcttattttgagcatggctattaccgattttctgctgggcttcacaatcatgccttacagtatgattcggagcgtcgagaactgttggtacttcggcctcaccttctgcaaaatttattactccttcgacctcatgctgtccataactagcatatttcacctctgcagcgttgcaattgacaggttttacgctatatgttatccactgctctactctaccaaaatcacgattcccgtgataaagcgtctgctcctgctttgctggagcgtaccaggagcatttgcgtttggcgtcgtgttttcggaagcatacgccgatgggatcgagggatatgacatcctggtcgcatgcagctccagttgtccggtaatgttcaacaagctgtgggggaccactctgtttatggccggcttcttcacacctggatcaatgatggtcggaatatatggaaaaatattcgcggtgtcacggaagcacgcgcacgccatcaacaatctacgcgagaatcagaataatcaggtcaaaaaggacaaaaaggctgccaaaacactagggattgtaatcggcgtttttctgctttgctggtttccttgttttttcactatcctgttggatccctttctgaatttttcgactccagtggtcctgttcgatgccctgacatggtttggctattttaactcaacttgcaacccattaatttacgggtttttctatccctggttccgccgagccctcaagtacattcttctgggtaagatcttctctagttgttttcataacactattttgtgtatgcagaaggagtctgagtag

SEQ ID NO: 181163 - DNA, 921 bp, Artificial Sequence
  derived and/or modified sequence
atgtacagcttcatggccggcagcatcttcatcaccatcttcggcaacctggctatgatcatctccatcagttacttcaaacagttacacacacccacgaatttcctgatcctctccatggcgataacagatttccttctcggctttaccattatgccatacagtatgattaggtcagtggagaactgttggtatttcggattgaccttctgtaagatttactacagctttgatctgatgttgtccattacaagtatctttcacctgtgcagtgttgctatcgacaggttctacgctatctgttatccattgttatacagcacgaagatcacaatccccgttatcaaacgtcttctgttattatgttggagcgttccgggggcctttgcattcggtgtggtcttcagtgaagcatacgctgatggtattgagggctatgatattctggtagcttgctctagttcatgcccagtgatgtttaacaaactctggggaacaacactgttcatggctggcttcttcactcccggtagcatgatggtgggcatctacggcaaaatattcgctgtttcccggaagcacgcacacgctattaacaatctgcgcgaaaaccagaacaatcaggtgaagaaggacaaaaaggccgccaaaacacttggtattgtcattggagtctttctgctatgctggtttccctgcttttttacaatcctcctggatccgttccttaatttttccacacccgtggtgttattcgacgcacttacttggtttggctattttaattctacctgtaaccccttaatttacggattcttttatccgtggtttcgccgggccttgaagtatattctactgggcaagatatttagtagctgcttccacaataccatcctgtgtatgcagaaagaatcagaatag

SEQ ID NO: 181164 - DNA, 921 bp, Artificial Sequence
  derived and/or modified sequence
atgtattcctttatggcaggctcgattttcattacaatatttggcaatttagccatgattatatctattagctatttcaagcaactgcacacacctacaaattttttgattttatccatggcaattacggacttcctgctgggcttcactatcatgccgtactccatgatcaggagtgttgagaattgttggtatttcgggctgaccttctgcaagatctattactcatttgatttgatgctgtctatcactagcatcttccacctgtgcagcgtggccatcgaccggttttacgcgatctgctacccccttctgtattcgacaaagattaccatcccagtgatcaagagactgttattgctgtgctggtccgtgccaggggcattcgcgttcggagtggttttcagcgaagcatacgcggacggcatcgaggggtacgatattttagtggcttgctcttcttcatgtccggttatgtttaacaaactgtggggaacgaccttgtttatggcaggtttctttacacctgggtccatgatggtgggtatatacgggaaaatttttgcagtcagtcgaaaacacgcccacgccataaacaatctccgagaaaaccagaataaccaggtgaaaaaggataagaaggccgctaaaacactgggcatcgttataggggtgtttctgctctgttggttcccctgcttcttcacaatattgttagaccctttcttaaacttctctacacctgtggttctctttgacgcactgacatggtttggttattttaactcgacatgtaatccgttgatttatggtttcttttatccatggtttcgcagagcacttaaatacattctgctgggcaagatcttcagcagctgttttcataacaccattctctgtatgcaaaaagaaagcgaatag

SEQ ID NO: 181165 - DNA, 921 bp, Artificial Sequence
  derived and/or modified sequence
atgtatagcttcatggcaggttccattttcatcaccatctttgggaacctcgccatgattataagcattagttattttaagcaattgcacacacctacaaattttctgatcctaagcatggctattactgacttcctgctgggtttcacgatcatgccttacagtatgatcagaagtgtggaaaattgctggtacttcgggctgaccttctgcaagatttattactcgttcgacctcatgctgtctattacttcaatatttcacctctgctccgtggctattgatcgcttttatgcgatttgctaccccctactgtactccacaaagataactatccctgtgatcaagagactgttgctgctttgctggtcagtaccgggagcattcgctttcggtgtcgtcttctcagaggcctatgcagacggtatcgagggttatgacatcctggtggcctgctcaagttcctgtcctgtgatgttcaataagctgtgggggaccaccctcttcatggccggattttttaccccaggatccatgatggtaggaatctatgggaagattttcgccgtgtctcggaaacatgcacacgcaatcaacaaccttagagagaaccagaacaatcaagtgaagaaggataaaaaggccgctaaaacgctggggatcgtcataggcgtgttccttctatgttggttcccatgtttcttcacgattcttctggaccctttcttgaatttttccacgccagtggtgctgtttgacgccttaacatggttcggatatttcaatagcacctgcaatcccctcatttacggattcttttacccttggtttcggcgagctcttaaatatattctgctggggaagatcttctcctcatgcttccataatacaatcctgtgcatgcagaaggagtctgagtag

SEQ ID NO: 181166 - protein, 274 aa, Artificial Sequence
  derived and/or modified sequence
MAAPEAEVLSSAAVPDLEWYEKSEETHASQIELLETSSTQEPLNASEAFCPRDCMVPVVFPGPVSQEGCCQFTCELLKHIMYQRQQLPLPYEQLKHFYRKPSPQAEEMLKKKPRATTEVSSRKCQQALAELESVLSHLEDFFARTLVPRVLILLGGNALSPKEFYELDLSLLAPYSVDQSLSTAACLRRLFRAIFMADAFSELQAPPLMGTVVMAQGHRNCGEDWFRPKLNYRVPSRGHKLTVTLSCGRPSIRTTAWEDYIWFQAPVTFKGFRE

SEQ ID NO: 181167 - DNA, 825 bp, Artificial Sequence
  derived and/or modified sequence
atggccgcccccgaggccgaggtgctgagcagcgccgccgtgcccgacctggagtggtacgagaagagcgaggagacccacgccagccagatcgagctgctggagaccagcagcacccaggagcccctgaacgccagcgaggccttctgccccagagactgcatggtgcccgtggtgttccccggccccgtgagccaggagggctgctgccagttcacctgcgagctgctgaagcacatcatgtaccagagacagcagctgcccctgccctacgagcagctgaagcacttctacagaaagcccagcccccaggccgaggagatgctgaagaagaagcccagagccaccaccgaggtgagcagcagaaagtgccagcaggccctggccgagctggagagcgtgctgagccacctggaggacttcttcgccagaaccctggtgcccagagtgctgatcctgctgggcggcaacgccctgagccccaaggagttctacgagctggacctgagcctgctggccccctacagcgtggaccagagcctgagcaccgccgcctgcctgagaagactgttcagagccatcttcatggccgacgccttcagcgagctgcaggccccccccctgatgggcaccgtggtgatggcccagggccacagaaactgcggcgaggactggttcagacccaagctgaactacagagtgcccagcagaggccacaagctgaccgtgaccctgagctgcggcagacccagcatcagaaccaccgcctgggaggactacatctggttccaggcccccgtgaccttcaagggcttcagagagtag

SEQ ID NO: 181168 - DNA, 825 bp, Artificial Sequence
  derived and/or modified sequence
atggccgcaccagaagccgaggtgctctcttctgcagccgttcctgacctggaatggtacgaaaaaagcgaagagacacatgcatcacagatcgaactcctagagacttctagcacccaggaaccgttaaacgcttcagaggccttttgtcccagagactgcatggttcccgtggtgttccccggaccggtctcacaggagggttgttgccagtttacctgcgagttactgaaacacataatgtaccagcgacaacagcttccgttgccttatgaacagctcaaacacttttacaggaagccgagcccccaagcagaggaaatgctgaagaaaaagcctcgcgccacaaccgaagtttcttccagaaagtgccagcaggcgctcgctgagcttgaatcagtcctgtcccacttagaggacttcttcgctcgtacacttgtgcccagggtcctcattcttctgggaggcaacgccctttctccgaaggagttttatgaactggacttgagcttgttagccccatactccgtagaccagtctcttagcactgcggcctgccttcgaagactcttccgggccatttttatggctgacgccttctcagaactgcaggcccctccattaatgggaacggtggtgatggcccagggtcaccgcaattgtggagaggattggttccggcccaaactgaattatcgggtcccatccagggggcacaaactgaccgtgactctgtcttgcggacgaccaagcatcaggacaacagcctgggaagactacatctggttccaagctcccgtaactttcaaaggatttcgggagtag

SEQ ID NO: 181169 - DNA, 1301 bp, Artificial Sequence
  derived and/or modified sequence
atgatgccccgcgagacctttattctaaccgcaaggagtagcggaggggaggtcgtgatggcggcgccggaggcggaggttctgtcctcagccgcagtccctgatttggagtggtatgagaagtccgaagaaactcacgcctcccagatagaactacttgagacaagctctacgcaggaacctctcaacgcttcggaggccttttgcccaagagactgcatggtaccagtggtgtttcctgggcctgtgagccaggaaggctgctgtcagtttacttgtgaacttctaaagcatatcatgtatcaacgccagcagctccctctgccctatgaacagcttaagcacttttaccgaaaaccttctccccaggcagaggagatgctgaagaagaaacctcgggccaccactgaggtgagcagcaggaaatgccaacaagccctggcagaactggagagtgtcctcagccacctggaggacttctttgcacggacactagtaccgcgagtgctgattctccttgggggcaatgccctaagccccaaggagttctatgaactcgacttgtctctgctggccccctacagcgtggaccagagcctgagcacagcagcttgtttgcgccgtctcttccgagccatattcatggctgatgcctttagcgagcttcaggctcctccactcatgggcaccgtcgtcatggcacagggacaccgcaactgtggagaagattggtttcgacccaagctcaactatcgagtgcccagccggggccataaactgactgtgaccctgtcatgtggcagaccttccatccgaaccacggcttgggaagactacatttggttccaggcaccagtgacatttaaaggcttccgcgagtgaatgagtgcttcttaatcctaaaaacacaatggctgaattatctttctccatgtggcgctgaatcacccatctggtttggagctagagttgcttcctggtgagagaggaagcaactctccttctggttgtctgcctcccctcagatttcctgataggctgatggcatgtggctgtgactgtgactgtaatcattgctgaacaacatctctttgaatcaaaggttgattttcccagagggtgctgggtcaggcatttctattaggagttggaaagcaaaaatgggtccatagacactctatggaggtgtccctttctgctctttgctgtgtcctttcagaatttttaccaggaacataatgtggatgtgacttatgaacttaaatataaaataaatagattcttattatattttcctgaaa

SEQ ID NO: 181170 - DNA, 825 bp, Artificial Sequence
  derived and/or modified sequence
atggccgcccctgaggccgaggtgctgagcagcgctgctgtgcctgacctggagtggtatgagaagtctgaggagacccacgccagccagatcgagctgctggagaccagcagcacccaggagcccctgaatgccagcgaggccttctgcccccgggactgcatggtgcctgtggtgtttcctggccctgtgtcccaggagggctgctgccagttcacctgtgagctgctgaagcacatcatgtaccagaggcagcagctgcccctgccctatgagcagctgaagcacttctacaggaagcccagcccccaggccgaggagatgctgaagaagaagccccgggccaccacagaggtgagcagcaggaagtgccagcaggccctggccgagctggagagcgtgctgagccacctggaggacttctttgcccggaccctggtgccccgggtgctgatcctgctgggcggcaatgccctgagccccaaggagttctatgagctggacctgagcctgctggccccctacagcgtggaccagagcctgagcacagctgcctgcctgcggcggctcttccgggccatcttcatggctgatgccttcagcgagctgcaggccccacccctgatgggcaccgtggtgatggcccagggccacaggaactgtggggaggactggttccggcccaagctgaactacagagtgcccagccggggccacaagctgactgtgaccctgagctgtggccggcccagcatccgcaccacagcctgggaggactacatctggttccaggcccctgtgaccttcaagggcttccgggagtag

SEQ ID NO: 181171 - DNA, 825 bp, Artificial Sequence
  derived and/or modified sequence
atggccgcccccgaggccgaggtgctgagcagcgccgccgtgcccgaccttgaatggtatgaaaagtccgaagaaacccacgcatcgcagattgaactcttggagacaagctccacacaggaaccgctcaatgcctcagaggcattctgccctcgtgattgtatggtgccggttgtattccccgggcctgtgagccaggagggatgttgccaattcacttgcgaactgctaaaacacattatgtaccagcgacagcaactgcccctgccttacgaacagctgaagcatttttaccgtaagccaagtccccaggcagaggaaatgctgaagaaaaagccacgcgcaactacagaggtgagctcaaggaaatgccagcaggcgcttgcagaactcgaaagcgtgttaagccatttggaggatttcttcgctcgcacactggtgcccagagtgttgattctcctgggtggtaatgcgctgtcaccgaaggaattttatgaactggacttgtcactgttggcaccatattccgtggaccagtcactgtctaccgcggcatgtttacggcggctgtttagagcaatcttcatggcggatgcattctcagaattgcaggcacctcccctgatgggaacagtggtgatggcccagggccacaggaactgcggcgaggactggtttcggcccaagctaaactatagggtcccctcgagaggccataagctgacagtcactttatcctgcggtcgcccctctatccggactaccgcctgggaggattacatctggttccaggcacctgttaccttcaagggatttcgggagtag

SEQ ID NO: 181172 - DNA, 825 bp, Artificial Sequence
  derived and/or modified sequence
atggccgctccagaagctgaagtactgagttccgccgcagtgcctgacctggagtggtatgaaaaatcagaggagacccacgctagtcaaatagaattgttggaaactagcagcactcaggagcctctgaacgcgtctgaggcgttttgtccgagggactgtatggtgccagtggtcttccccggacctgtctcacaggaggggtgctgtcagttcacgtgcgaactgctgaagcatatcatgtatcaaaggcagcagcttccattgccttacgagcagctgaaacatttctacagaaaaccatcgcctcaggctgaggagatgctcaagaaaaagcctcgtgcaacaacagaagtgagcagcagaaaatgtcagcaggcactggctgagcttgagagcgtgctgtctcacttggaagacttttttgcccgaacattagtgcctcgggtgttgatcctccttggaggtaacgcgctgtccccaaaagaattctatgagctggacctgagtctacttgctccttatagcgtagaccaaagcctctctactgccgcatgccttaggaggctcttccgcgctatcttcatggccgatgcgttcagcgagcttcaggcccctcccctgatgggtacagtggtaatggcccagggtcaccgcaactgcggagaagattggttccggccaaagcttaattatcgtgtcccgtctagaggccacaagttaacggtgacgctgtcctgcgggcgaccgtcaattaggacaactgcctgggaggattacatttggtttcaggcacccgtgactttcaaaggtttccgagagtag

SEQ ID NO: 181173 - protein, 1344 aa, Artificial Sequence
  derived and/or modified sequence
MDQREPLPPAPAENEMKYDTNNNEEEEGEQFDFDSGDEIPEADRQAPSAPETGGAGASEAPAPTGGEDGAGAETTPVAEPTKLVLPMKVNPYSVIDITPFQEDQPPTPVPSAEEENVGLHVPCGYLVPVPCGYAVPSNLPLLLPAYSSPVIICATSLDEEETPEVTEDRQPNSLSSEEPPTSEDQVGREDSALARWAADPANTAWMENPEEAIYDDVPRENSDSEPDEMIYDDVENGDEGGNSSLEYGWSSSEFESYEEQSDSECKNGIPRSFLRSNHKKQLSHDLTRLKEHYEKKMRDLMASTVGVVEIQQLRQKHELKMQKLVKAAKDGTKDGLERTRAAVKRGRSFIRTKSLIAQDHRSSLEEEQNLFIDVDCKHPEAILTPMPEGLSQQQVVRRYILGSVVDSEKNYVDALKRILEQYEKPLSEMEPKVLSERKLKTVFYRVKEILQCHSLFQIALASRVSEWDSVEMIGDVFVASFSKSMVLDAYSEYVNNFSTAVAVLKKTCATKPAFLEFLKQEQEASPDRTTLYSLMMKPIQRFPQFILLLQDMLKNTSKGHPDRLPLQMALTELETLAEKLNERKRDADQRCEVKQIAKAINERYLNKLLSSGSRYLIRSDDMIETVYNDRGEIVKTKERRVFMLNDVLMCATVSSRPSHDSRVMSSQRYLLKWSVPLGHVDAIEYGSSAGTGEHSRHLAVHPPESLAVVANAKPNKVYMGPGQLYQDLQNLLHDLNVIGQITQLIGNLKGNYQNLNQSVAHDWTSGLQRLILKKEDEIRAADCCRIQLQLPGKQDKSGRPTFFTAVFNTFTPAIKESWVNSLQMAKLALEEENHMGWFCVEDDGNHIKKEKHPLLVGHMPVMVAKQQEFKIECAAYNPEPYLNNESQPDSFSTAHGFLWIGSCTHQMGQIAIVSFQNSTPKVIECFNVESRILCMLYVPVEEKRREPGAPPDPETPAVRASDVPTICVGTEEGSISIYKSSQGSKKVRLQHFFTPEKSTVMSLACTSQSLYAGLVNGAVASYARAPDGSWDSEPQKVIKLGVLPVRSLLMMEDTLWAASGGQVFIISVETHAVEGQLEAHQEEGMVISHMAVSGVGIWIAFTSGSTLRLFHTETLKHLQDINIATPVHNMLPGHQRLSVTSLLVCHGLLMVGTSLGVLVALPVPRLQGIPKVTGRGMVSYHAHNSPVKFIVLATALHEKDKDKSRDSLAPGPEPQDEDQKDALPSGGAGSSLSQGDPDAAIWLGDSLGSMTQKSDLSSSSGSLSLSHGSSSLEHRSEDSTIYDLLKDPVSLRSKARRAKKAKASSALVVCGGQGHRRVHRKARQPHQEELAPTVMVWQIPLLNI

SEQ ID NO: 181174 - DNA, 4035 bp, Artificial Sequence
  derived and/or modified sequence
atggaccaaagagaaccattgcctcccgccccggccgaaaatgaaatgaaatatgataccaacaacaatgaagaggaagaaggagagcagttcgatttcgactccggggacgaaatcccagaggctgatcgacaggcccccagcgcaccagagacaggcggcgcgggagctagcgaagctcctgcccccacaggaggagaggacggagccggagcagaaacaacgcctgttgccgagcccacaaaactggtgctcccgatgaaagtcaatccctactctgtcatcgatatcaccccattccaagaagatcaaccccctacaccagttccttctgccgaagaagaaaatgtgggcctacatgtcccttgtggatatctggtaccagtcccatgtggctatgcggtgccatcaaatctgccacttctgttgccagcttacagcagcccagtgattatctgtgccacctctttggacgaggaggaaactccagaagtgactgaggacagacaaccgaactctttatcctcggaggagccacccacttctgaagaccaagtgggtcgcgaggactcggcattagctagatgggcagcggaccctgctaatactgcctggatggagaacccagaggaagctatctatgatgatgtcccacgcgagaatagtgatagcgagccagatgagatgatttatgatgacgtggaaaatggtgacgaaggaggtaactcatcgttggagtatgggtggagctcttccgagttcgagagctacgaagaacagtccgacagcgagtgcaagaacggaatccccagaagctttctccgctcgaaccataagaagcagctcagccacgacctcaccaggcttaaagaacattacgagaaaaagatgcgggacctgatggcttcaaccgttggcgtagtcgagattcagcagctgaggcagaagcatgaactgaaaatgcagaagctggttaaagctgcaaaggacgggactaaggacgggctggagcgaacaagggccgccgttaaacgaggaaggagtttcattcgtactaagagtctgatcgcccaggatcacagatcatcattggaggaagagcagaatctttttatcgacgtcgactgcaagcaccctgaggccatcctcacacctatgccagaggggctgtcacagcaacaggttgtgcgccgctacatactgggaagcgtggtggactctgagaaaaactacgtggacgctttaaagagaatacttgaacaatacgagaagcccttgtctgagatggaacctaaagttctcagtgagagaaagctgaagactgttttttatcgggtgaaggagattctccaatgccattccttgttccagatcgctttggccagcagggtgagcgaatgggacagtgtcgaaatgataggcgacgttttcgtagcatctttcagcaagagcatggtgctggatgcctatagcgaatatgtcaacaatttcagcactgcagtagctgtgctgaagaaaacttgcgctactaagcccgcatttctagaatttttaaagcaagaacaggaggcttccccggacaggacgaccctgtatagccttatgatgaaaccaatccagcgcttcccccagttcatcctcctgctgcaagatatgctgaagaatacatcaaaaggacatccagatcgcttgcccctgcagatggcgttgaccgagctggaaacccttgccgagaagctgaacgagcgcaagcgggatgccgaccagaggtgtgaggtcaagcaaattgccaaggcaattaatgagaggtatttaaacaagctgctctccagcggctctcggtacttaatcaggtcagacgacatgatcgagacagtgtacaacgaccgcggcgagatcgtgaaaaccaaggaacgacgcgtgtttatgctgaacgacgtactcatgtgcgcaacagtgtcatctagaccctctcatgattccagagtcatgagctcacagcggtacctcttgaagtggtcggttcctttgggccacgtggacgctattgagtacgggtcaagcgctggaacaggtgagcacagccgccatctggccgtccatcctccggagtctctcgccgtggtcgcgaacgctaaaccaaacaaagtatatatgggccctggacaactttatcaggacctccagaacttgctgcatgatttaaatgtcattgggcagattacgcaattaatcgggaatctgaaaggcaactatcaaaatctcaatcagagtgtggctcacgattggacatccggactacagcggctcattctgaaaaaggaggatgagatcagggctgcagattgctgccgaatccagttgcagctgccagggaaacaggataagtccggtcgacccacttttttcacagcagtgttcaatacctttacgccagcaatcaaagaaagttgggttaattcgctgcagatggctaaactggcactcgaggaggagaaccacatggggtggttctgtgtggaagacgatggaaaccatataaagaaagaaaagcacccactgctagtgggtcacatgcccgtgatggtggctaaacagcaggaattcaagattgaatgcgcagcttacaaccctgagccatacctgaataacgaatctcagcccgactctttcagcaccgcccatggctttctgtggataggatcgtgtacccaccagatgggtcagattgccattgtatcgtttcagaattccacccctaaggtcattgagtgcttcaacgtggagtccagaatcctatgtatgctgtacgttccagttgaagagaaacggagagagcctggggccccacctgatcctgagaccccagccgtcagggcttcagacgtgccaactatctgtgttgggacagaagagggatccattagtatctacaagagctctcagggtagtaaaaaggtgcgtctgcagcacttttttaccccagaaaaatccactgtgatgtctctggcttgcacgtcccaatctctttacgcaggattagtaaatggtgctgtggcttcatatgccagagcccctgacggctcctgggactctgaacctcagaaagtcattaaacttggcgttcttccagttcgctccctgttgatgatggaggataccctgtgggcagcttcgggcggacaggtgtttattatatcggtcgagacgcatgccgttgagggccagcttgaggcccaccaagaggaaggaatggtcatttcccacatggccgtaagcggcgtgggaatctggatcgcatttaccagtggatctactctgagactgttccacaccgagacgctaaaacacttgcaagatattaacatcgctaccccagtacacaacatgcttccaggccaccaaagactgtcagtgacgtcactgcttgtgtgccacggactattgatggtgggaacctccttgggtgtcttagtggcgcttcctgtaccaaggctgcaggggatacctaaagtgacaggcaggggcatggtctcatatcatgcacataactctcccgtgaaattcattgtactagctacagccttgcacgaaaaggacaaagataaatcaagggattccttggccccgggtcccgagccacaggatgaggatcagaaggatgccttgcccagcggaggcgccgggtcatccctaagccaaggcgatccagatgcggccatctggctgggagatagcctcggctcaatgacacagaagagcgatctgtcttcatcctccggctcactatctctatcccacgggtcttccagcctggagcaccgatccgaggacagcaccatttatgatctgctcaaagatcctgtatctctgcggagcaaagccagacgagcaaagaaagctaaggcttcctccgctctggtcgtctgcgggggtcaggggcatcggcgggttcacagaaaagccaggcaacctcaccaggaggaactcgctcccacagtgatggtgtggcagattccactgctgaacatatag

SEQ ID NO: 181175 - DNA, 4035 bp, Artificial Sequence
  derived and/or modified sequence
atggaccagcgggagcccctgcccccagccccagcagaaaatgagatgaagtatgacaccaacaacaatgaggaggaggagggggagcagtttgattttgattctggagatgagatccctgaggccgaccggcaggcccccagcgcccctgagaccggcggggccggggccagcgaggccccagcccccactggaggagaagatggagctggagctgagaccacccctgtggccgagcccaccaagctggtgctgcccatgaaggtgaacccctacagcgtgattgacatcacccccttccaggaggaccagccccccacccctgtgcccagcgctgaggaggagaatgtgggcctgcacgtgccctgtggctacctggtgcctgtgccctgtggctatgctgtgcccagcaacctgcccctgctgctgcctgcctacagcagccctgtgatcatctgtgccaccagcctggatgaggaggagaccccagaggtgacagaagatcggcagcccaacagcctgagcagcgaggagccccccaccagcgaggaccaggtgggcagagaagattctgccctggcccgctgggccgctgaccctgccaacacagcctggatggagaaccctgaggaggccatctatgatgatgtgccccgggagaacagcgacagcgagccagatgagatgatctatgatgatgtggagaatggagatgagggcggcaacagcagcctggagtatggctggagcagcagcgagtttgagagctatgaggagcagagcgacagcgagtgcaagaatggcatccccaggagcttcctgcggagcaaccacaagaagcagctgagccatgacctgacccggctgaaggagcactatgagaagaagatgagggacctgatggccagcacagtgggcgtggtggagatccagcagctgcggcagaagcatgagctgaagatgcagaagctggtgaaggccgccaaggatggcaccaaggatggcctggagaggaccagggctgctgtgaagaggggccgctccttcatccgcaccaagagcctcatcgcccaggaccacaggagcagcctggaggaggagcagaacctcttcattgatgtggactgcaagcaccctgaggccatcctgacccccatgcctgagggcctgagccagcagcaggtggtgcggcgctacatcctgggctctgtggtggacagcgagaagaactacgtggatgccctgaagaggatcctggagcagtatgagaagcccctgtctgagatggagcccaaggtgctgtctgagaggaagctgaagacagtgttctacagagtgaaggagatcctgcagtgccacagcctcttccagatcgccctggccagccgggtgtctgagtgggacagcgtggagatgattggagatgtgtttgtggccagcttcagcaagtccatggtgctggatgcctacagtgaatatgtgaacaacttcagcacagctgtggccgtgctgaagaagacctgtgccaccaagccagccttcctggagttcctgaagcaggagcaggaggccagcccagacaggaccaccctgtacagcctgatgatgaagcccatccagcgcttcccccagttcatcctgctgctgcaggacatgctgaagaacaccagcaagggccacccagaccggctgcccctgcagatggccctgacagagctggagaccctggccgagaagctgaatgaaaggaagagagatgctgaccagagatgtgaggtgaagcagatcgccaaggccatcaatgaaagatacctgaacaagctgctgagcagcggcagccgctacctgatccgcagtgatgacatgattgaaacagtgtacaatgacagaggagaaattgtgaagaccaaggagaggagggtcttcatgctgaatgatgtgctgatgtgtgccaccgtgagcagccggcccagccatgacagccgggtgatgagcagccagcgctacctgctgaagtggagcgtgcccctgggccacgtggatgccattgaatatggcagcagcgctggcactggagagcacagccgccacctggccgtgcaccccccagagagcctggccgtggtggccaatgccaagcccaacaaggtgtacatgggccctggccagctgtaccaggacctgcagaacctgctgcatgacctgaatgtcatcggccagatcacccagctgattggcaacctgaagggcaactaccagaacctgaaccagagcgtggcccatgactggaccagcggcctgcagaggctcatcctgaagaaggaggatgagatccgggctgctgactgctgccgcatccagctgcagctgcccgggaagcaggacaagagcggccggcccaccttcttcaccgctgtgttcaacaccttcaccccagccatcaaggagagctgggtgaacagcctgcagatggccaagctggccctggaggaggagaaccacatgggctggttctgtgtggaggatgatggcaaccacatcaagaaggagaagcaccccctgctggtgggccacatgcctgtgatggtggccaagcagcaggagttcaagattgaatgtgccgcctacaaccctgagccctacctgaacaatgaaagccagcctgacagcttcagcacagcccacggcttcctgtggattggcagctgcacccaccagatgggccagatcgccatcgtgtccttccagaacagcacccccaaggtgattgagtgcttcaacgtggagagccgcatcctgtgcatgctgtatgtgcctgtggaggagaagaggcgggagcccggggcccccccagaccctgagaccccagctgtgcgggccagtgatgtgcccaccatctgtgtgggcacagaggagggcagcatcagcatctacaagagcagccagggcagcaagaaggtgcggctgcagcacttcttcaccccagagaagagcacagtgatgagcctggcctgcaccagccagagcctgtatgccggcctggtgaatggagctgtggccagctatgcccgggccccagatggctcctgggacagcgagccccagaaggtgatcaagctgggcgtgctgcctgtgcgcagcctgctgatgatggaggacaccctgtgggccgccagcggcggccaggtgttcatcatctctgtggagacccatgctgtggagggccagctggaggcccaccaggaggagggcatggtgatcagccacatggctgtgtctggagtgggcatctggatcgccttcaccagcggcagcaccctgcggctcttccacacagagaccctgaagcacctgcaggacatcaacatcgccacccctgtgcacaacatgctgcccggccaccagaggctgtctgtgaccagcctgctggtgtgccacggcctgctgatggtgggcaccagcctgggcgtgctggtggccctgcctgtgccccggctgcagggcatccccaaggtgacaggccggggcatggtgtcctaccacgcccacaacagccctgtgaagttcatcgtgctggccacagccctgcacgagaaggacaaggacaagagccgggacagcctggcccctggccctgagccccaggatgaggaccagaaggatgccctgcccagcggcggggccggcagcagcctgagccagggcgaccctgatgctgccatctggctgggggacagcctgggctccatgacccagaagagtgacctgagcagcagcagcggcagcctgagcctgagccacggcagcagcagcctggagcacagaagtgaggacagcaccatctatgacctgctgaaggaccctgtgtccctgcggagcaaggcccggcgggccaagaaggccaaggccagcagcgccctggtggtgtgtggcggccagggccaccggcgggtgcacaggaaggcccggcagccccaccaggaggagctggcccccaccgtgatggtgtggcagatccccctgctgaacatctag

SEQ ID NO: 181176 - DNA, 4035 bp, Artificial Sequence
  derived and/or modified sequence
atggaccagcgggagcccctgccccccgcccccgccgagaacgagatgaagtatgacactaataacaacgaagaggaggaaggtgagcagttcgatttcgacagcggcgacgagatccctgaagcggatagacaggcaccctcagcccccgagacaggcggggccggcgccagcgaggcccctgcaccaactggtggcgaagatggtgcaggcgctgaaaccacacctgtcgctgaaccgacaaaactggtgctcccgatgaaagtgaatccgtacagtgtaattgacattacccctttccaggaggaccagccgccaacaccagtgccgagcgccgaggaagagaacgttggtctccacgtgccatgcggatatctcgttccggtcccctgcggctacgctgtgccatcaaacttacctcttttactcccagcatattcttcacctgtcattatatgcgcaacctctctggatgaagaggagacaccagaagttacagaggaccgccagcccaactctctgagcagcgaggagccgcctacctccgaggatcaggtaggccgcgaggatagcgccctggctcgctgggccgccgatcccgcaaacaccgcctggatggaaaatcctgaggaagctatctatgatgacgtgcctagggaaaattccgattctgagccagacgaaatgatctacgatgacgtcgaaaacggagatgaaggagggaactcgtccttggagtacggctggtctagcagcgagttcgagagctacgaagaacagtctgatagcgagtgcaagaacggtataccaaggtcttttctgcgcagtaaccacaaaaaacaacttagtcacgatctcacccgcctgaaagagcactacgaaaaaaagatgagggacctgatggcttcaactgtgggggtggtggaaatccaacagctgcgtcagaagcacgagctgaaaatgcagaagctggtgaaggcagcaaaggatgggacaaaagacggcctcgagcgcacccgggctgcagtgaagaggggacggagtttcatccgcactaaatctctgattgcccaagatcaccgttcgtcgctggaggaggaacagaatttgttcatcgacgtggactgtaagcatccagaggctattctgactcccatgccggaagggctctcgcagcagcaggtcgtcagaaggtatattctaggctcagtggtcgactcagagaagaattatgtggatgccttgaaaaggatactagagcagtacgagaagcctctttctgagatggagcccaaagtccttagtgagcgaaagctgaagactgtcttctatagagtgaaagagattttgcagtgtcacagtctcttccaaattgcactggcaagtcgtgtttcagagtgggactctgtcgagatgatcggcgacgtgttcgtggcatccttcagcaagtctatggttctggatgcttatagtgagtatgtgaataacttctccacagccgtcgcagtgctgaagaaaacttgtgctacaaaacctgcctttctggagtttctcaagcaagagcaggaagcctctcctgatcggacaaccctgtacagtctgatgatgaaaccaattcagagatttcctcagttcatcctactgctgcaggacatgctgaaaaacacctcaaaggggcatcctgatagactgcctttgcagatggctctgactgagctagagacactggctgagaagctaaacgaacgtaagagggacgccgaccaaaggtgtgaggtcaaacagatcgcgaaggccattaacgagcggtatctcaacaaattgctgagctctggatcaagatatctgataaggagtgatgacatgatcgagactgtctataatgatcgaggcgagattgtgaaaactaaggagcggcgcgtgttcatgcttaacgatgttttgatgtgtgcgaccgtgtcatcacggccctctcacgactcacgagtaatgtcttctcagcggtatctgctcaagtggagcgttccactcggccatgtggatgccatagagtacggttccagcgcaggcacaggggaacattcccgccacctggctgtccacccgcctgaatcgttggctgtggtagctaatgcgaagccaaataaagtttacatggggcccggtcagctgtaccaggatctgcagaacttgctgcacgacttgaacgtgattggccaaattacacaattaattggtaatctaaaagggaactaccaaaatctgaatcaaagcgtagcacacgattggacatccggattgcaacggttgattttgaagaaagaagatgagattagggctgccgactgttgccggatccagctgcagctaccagggaaacaggataagtcaggacgccccacgttttttactgcagtgttcaacactttcacgcccgctatcaaggagagctgggtgaactccctccagatggcaaaactggcgctggaggaggaaaaccacatgggttggttttgcgttgaggacgatggcaaccacatcaagaaggaaaaacatccactgctagtcggacacatgcccgtcatggtggcgaagcaacaggagtttaaaatcgaatgcgctgcttacaatccagaaccctatctgaataacgagtcccaacctgacagcttttcaacagcacacgggtttctctggattgggtcctgtacacatcaaatggggcagattgcaattgtgtcgtttcagaattcaactcccaaggtaatcgaatgttttaatgtggagtccagaatcttatgcatgctgtacgttcctgtagaggaaaagcgccgggagccaggcgcaccgcccgatcctgagacacccgccgtgagggctagtgatgttccaaccatttgtgtgggcactgaagagggcagcattagcatatacaagagttctcagggcagcaagaaggtgaggctgcagcatttcttcacccccgagaaatccactgtgatgtcgctagcttgcacatcacagtctctgtatgccgggctggttaacggagccgttgccagttatgcacgggcacctgacggctcgtgggactcagagccacagaaggtgatcaaattgggggtgctccccgtcaggtccctgctgatgatggaagacaccctttgggccgcgagtggaggccaggtgttcattatttctgtggagacacatgctgtggaggggcagctcgaagcccaccaagaagaaggtatggttatttcccatatggcagtgtcaggagtgggaatctggatcgcgttcaccagtggctcaacactgaggttatttcatacagaaactttgaagcatctacaggacattaacatagccacacccgtccataacatgctccctggacaccaacgcctgtccgtaacaagcctgttagtgtgtcatgggctgcttatggtgggaaccagccttggcgtgttggtcgcgttgcccgtgccacgcttacagggcattcccaaagtgaccggacgcgggatggtctcttatcacgcccataactctccagtgaaatttatcgttctggcaacggccctgcacgaaaaggacaaagataagtctagagattccctcgctcccgggccggaaccacaagatgaagatcagaaggatgctctcccatccgggggggccggctcgagtctgagtcaaggcgatcccgatgctgccatctggctcggtgattccctgggaagtatgacgcagaagtctgatctgtcctcttcgtccggtagtctcagtctctcgcatggctcctcaagcctggagcacaggtccgaagacagtacgatctatgatcttctgaaggaccccgtctctttaagatcgaaggcaaggcgggcgaaaaaggcaaaagcctcttctgcactggtggtttgcggtggccagggtcacagacgtgtgcacaggaaggccaggcaaccacatcaggaggaactggcacctacagtgatggtgtggcaaattcctctgctgaacatttag

SEQ ID NO: 181177 - DNA, 4035 bp, Artificial Sequence
  derived and/or modified sequence
atggatcagcgcgagccacttcccccagctcccgcagaaaacgaaatgaagtatgacaccaataataatgaagaggaagagggcgagcaatttgattttgactccggcgatgagatccccgaagctgatagacaagcgccatccgcaccagagacaggcggtgccggagcaagcgaagcacctgcaccaactggcggtgaagacggtgctggcgcagaaaccacccccgtggccgagccaacaaagctggtccttccaatgaaagtgaatccgtacagtgtgatcgatatcactccgttccaggaggaccagcccccaacccccgtgccgtcagctgaagaggagaatgtgggcttgcatgtgccttgtggatatcttgtccccgttccttgcggctacgcggtgcctagcaacttgccgctgctgctgcccgcatacagtagcccagttatcatctgcgcaacaagtctggatgaagaagagacccccgaggttacagaggatagacagcccaattccctgtcttctgaggaaccccctacaagcgaggaccaggtcggacgggaggatagtgcactggcacgctgggccgcagacccagcaaacaccgcatggatggaaaacccagaggaggccatctatgatgacgtgcctagagagaatagtgactctgagcctgatgagatgatctacgatgacgtcgagaacggagacgaagggggaaattcctccttagagtatggttggtcttcctcagaatttgagtcttacgaagaacagagtgactccgaatgtaagaatgggatccctaggagctttctcagatctaatcacaaaaaacagcttagccacgatctcacaagactcaaggaacactacgagaaaaagatgagggatctgatggcctcaaccgtcggagtagttgaaatccagcagcttcggcagaagcacgagcttaagatgcagaaactggtgaaggcggcaaaggacggcacaaaagacgggctggagagaaccagagcagctgtgaagcgcggtaggagctttattagaaccaaaagtttaatcgcccaggaccatcggtcctcccttgaagaggaacagaatctgtttatcgatgtggattgcaaacatccagaggctatccttactcccatgcccgaagggttaagccaacagcaggtcgtacgtagatatatccttggatcagtcgtggactccgaaaagaattatgtggacgcgctgaaacggatacttgagcagtatgaaaaacccctgagtgaaatggaacctaaagtccttagcgaacggaagctcaaaactgtgttttatagagtcaaagaaatcctgcaatgccactcactgtttcagatagccttagcatctagagtgagcgagtgggactcagtggaaatgatcggggatgtcttcgtggcatcattttcaaaaagtatggttctggacgcatacagcgaatatgtgaacaacttttcaaccgcagtggctgtgttaaaaaaaacatgcgcgactaaacccgcttttctggagtttctcaaacaggagcaggaagccagcccagacagaacgactttgtattctcttatgatgaaaccaattcagcgcttcccgcagtttattttactgctccaggacatgctgaaaaacaccagtaagggccaccccgacagattgccactgcagatggccctgactgagctggagactctggctgaaaaactgaacgaacgcaaacgggacgccgaccagagatgcgaagtcaagcagatcgccaaggctatcaacgagcggtaccttaacaaacttctgagctccgggagtagatatctgatacgttctgacgatatgatcgagactgtctataacgaccggggagagattgtgaagactaaggagaggagagtgtttatgcttaatgacgtcctgatgtgcgccactgtgtcttctcgcccatcacacgactcaagggtgatgagctcgcagcgttacttgctaaagtggtccgttccactagggcacgtcgacgccatcgaatacggctcatctgccggaactggcgagcatagtagacacttggccgtccaccccccagagtcgctcgctgtggtggcaaatgccaagcctaacaaagtttatatgggcccaggacagttatatcaggacctgcagaatctcttacacgacctgaatgtgattggtcagatcactcaactgatcggaaacttgaagggtaactaccagaacctgaatcagagcgtcgctcacgattggaccagtggcttgcagcggctgattctgaaaaaggaggacgagatcagagccgctgactgctgtcgcatccagttacagctgccaggaaaacaggataagtcaggacggccaactttcttcacagctgtttttaatacctttacccctgctatcaaggaatcctgggttaattccttacagatggccaagcttgccctcgaggaagagaaccatatggggtggttctgtgtggaggatgacgggaatcacattaaaaaagagaagcatccactgctggttggccatatgcccgtgatggttgccaagcagcaggaatttaagatagaatgcgcagcatataatccggagccttacttgaacaatgaatctcagccagattcttttagtaccgctcatggctttttgtggatcgggagttgtactcaccagatgggacagattgctatcgtaagcttccagaacagcacgccaaaggtaattgagtgcttcaacgtcgagtccaggattctgtgcatgctatatgtccctgttgaggaaaagcggagagagcctggcgcacctcccgatccagagaccccggcagtgcgagcctcagatgtgccgactatctgcgtcgggaccgaagaaggctccatatcgatatacaagagctcacagggatctaagaaggtgcgcttgcaacacttctttaccccagaaaagagtaccgtgatgtctctcgcctgtacctctcaaagcctctatgcgggactcgtgaacggcgctgtggcttcctatgctcgagcccctgatgggtcttgggactcagaacctcagaaggtgattaaactaggggtattgccagtcaggagcctgcttatgatggaagatactctatgggccgcttcaggaggccaagtctttatcattagtgtggaaacacacgccgttgaaggacagctggaagctcatcaggaagagggcatggtaatcagccacatggctgtgtccggggtcggtatttggatcgcatttacatctgggtctactttacggctgttccacacagaaaccctgaaacatctgcaggacatcaacatagccacccccgtgcataatatgctgccgggtcatcagcgcttgagcgtgacatcactgctagtttgccatggccttctgatggtgggaacctcactgggggtgctggtggctctgcctgtgcctcgtctgcaaggaatacccaaggtgacgggaagaggaatggtctcttatcatgcccataatagccctgttaaattcatcgtccttgcaacggctctccacgagaaggataaagataagtcccgcgactcattggcaccgggtccagagccccaggatgaggaccagaaggacgcgctccctagcggtggggctggctcttctttgtcacaaggcgacccagatgcagcgatttggcttggggattcactcggatcaatgacacaaaagtctgacctgtcctcttcatccggctcactgtctctttcacacggatccagctccctggaacacaggagcgaggacagtaccatctatgacttgctgaaggatccagtcagcctgcggagcaaagcacggagagctaagaaggcgaaagcttcttccgctcttgtagtgtgtggtggacaggggcatcggagggtccaccggaaagctaggcagcctcatcaggaggagctggcacctactgtgatggtttggcagatccctttactcaatatttag

SEQ ID NO: 181178 - DNA, 4035 bp, Artificial Sequence
  derived and/or modified sequence
atggaccagagagagcccctgccccccgcccccgccgagaacgagatgaagtacgacaccaacaacaacgaggaggaggagggcgagcagttcgacttcgacagcggcgacgagatccccgaggccgacagacaggcccccagcgcccccgagaccggcggcgccggcgccagcgaggcccccgcccccaccggcggcgaggacggcgccggcgccgagaccacccccgtggccgagcccaccaagctggtgctgcccatgaaggtgaacccctacagcgtgatcgacatcacccccttccaggaggaccagccccccacccccgtgcccagcgccgaggaggagaacgtgggcctgcacgtgccctgcggctacctggtgcccgtgccctgcggctacgccgtgcccagcaacctgcccctgctgctgcccgcctacagcagccccgtgatcatctgcgccaccagcctggacgaggaggagacccccgaggtgaccgaggacagacagcccaacagcctgagcagcgaggagccccccaccagcgaggaccaggtgggcagagaggacagcgccctggccagatgggccgccgaccccgccaacaccgcctggatggagaaccccgaggaggccatctacgacgacgtgcccagagagaacagcgacagcgagcccgacgagatgatctacgacgacgtggagaacggcgacgagggcggcaacagcagcctggagtacggctggagcagcagcgagttcgagagctacgaggagcagagcgacagcgagtgcaagaacggcatccccagaagcttcctgagaagcaaccacaagaagcagctgagccacgacctgaccagactgaaggagcactacgagaagaagatgagagacctgatggccagcaccgtgggcgtggtggagatccagcagctgagacagaagcacgagctgaagatgcagaagctggtgaaggccgccaaggacggcaccaaggacggcctggagagaaccagagccgccgtgaagagaggcagaagcttcatcagaaccaagagcctgatcgcccaggaccacagaagcagcctggaggaggagcagaacctgttcatcgacgtggactgcaagcaccccgaggccatcctgacccccatgcccgagggcctgagccagcagcaggtggtgagaagatacatcctgggcagcgtggtggacagcgagaagaactacgtggacgccctgaagagaatcctggagcagtacgagaagcccctgagcgagatggagcccaaggtgctgagcgagagaaagctgaagaccgtgttctacagagtgaaggagatcctgcagtgccacagcctgttccagatcgccctggccagcagagtgagcgagtgggacagcgtggagatgatcggcgacgtgttcgtggccagcttcagcaagagcatggtgctggacgcctacagcgagtacgtgaacaacttcagcaccgccgtggccgtgctgaagaagacctgcgccaccaagcccgccttcctggagttcctgaagcaggagcaggaggccagccccgacagaaccaccctgtacagcctgatgatgaagcccatccagagattcccccagttcatcctgctgctgcaggacatgctgaagaacaccagcaagggccaccccgacagactgcccctgcagatggccctgaccgagctggagaccctggccgagaagctgaacgagagaaagagagacgccgaccagagatgcgaggtgaagcagatcgccaaggccatcaacgagagatacctgaacaagctgctgagcagcggcagcagatacctgatcagaagcgacgacatgatcgagaccgtgtacaacgacagaggcgagatcgtgaagaccaaggagagaagagtgttcatgctgaacgacgtgctgatgtgcgccaccgtgagcagcagacccagccacgacagcagagtgatgagcagccagagatacctgctgaagtggagcgtgcccctgggccacgtggacgccatcgagtacggcagcagcgccggcaccggcgagcacagcagacacctggccgtgcacccccccgagagcctggccgtggtggccaacgccaagcccaacaaggtgtacatgggccccggccagctgtaccaggacctgcagaacctgctgcacgacctgaacgtgatcggccagatcacccagctgatcggcaacctgaagggcaactaccagaacctgaaccagagcgtggcccacgactggaccagcggcctgcagagactgatcctgaagaaggaggacgagatcagagccgccgactgctgcagaatccagctgcagctgcccggcaagcaggacaagagcggcagacccaccttcttcaccgccgtgttcaacaccttcacccccgccatcaaggagagctgggtgaacagcctgcagatggccaagctggccctggaggaggagaaccacatgggctggttctgcgtggaggacgacggcaaccacatcaagaaggagaagcaccccctgctggtgggccacatgcccgtgatggtggccaagcagcaggagttcaagatcgagtgcgccgcctacaaccccgagccctacctgaacaacgagagccagcccgacagcttcagcaccgcccacggcttcctgtggatcggcagctgcacccaccagatgggccagatcgccatcgtgagcttccagaacagcacccccaaggtgatcgagtgcttcaacgtggagagcagaatcctgtgcatgctgtacgtgcccgtggaggagaagagaagagagcccggcgccccccccgaccccgagacccccgccgtgagagccagcgacgtgcccaccatctgcgtgggcaccgaggagggcagcatcagcatctacaagagcagccagggcagcaagaaggtgagactgcagcacttcttcacccccgagaagagcaccgtgatgagcctggcctgcaccagccagagcctgtacgccggcctggtgaacggcgccgtggccagctacgccagagcccccgacggcagctgggacagcgagccccagaaggtgatcaagctgggcgtgctgcccgtgagaagcctgctgatgatggaggacaccctgtgggccgccagcggcggccaggtgttcatcatcagcgtggagacccacgccgtggagggccagctggaggcccaccaggaggagggcatggtgatcagccacatggccgtgagcggcgtgggcatctggatcgccttcaccagcggcagcaccctgagactgttccacaccgagaccctgaagcacctgcaggacatcaacatcgccacccccgtgcacaacatgctgcccggccaccagagactgagcgtgaccagcctgctggtgtgccacggcctgctgatggtgggcaccagcctgggcgtgctggtggccctgcccgtgcccagactgcagggcatccccaaggtgaccggcagaggcatggtgagctaccacgcccacaacagccccgtgaagttcatcgtgctggccaccgccctgcacgagaaggacaaggacaagagcagagacagcctggcccccggccccgagccccaggacgaggaccagaaggacgccctgcccagcggcggcgccggcagcagcctgagccagggcgaccccgacgccgccatctggctgggcgacagcctgggcagcatgacccagaagagcgacctgagcagcagcagcggcagcctgagcctgagccacggcagcagcagcctggagcacagaagcgaggacagcaccatctacgacctgctgaaggaccccgtgagcctgagaagcaaggccagaagagccaagaaggccaaggccagcagcgccctggtggtgtgcggcggccagggccacagaagagtgcacagaaaggccagacagccccaccaggaggagctggcccccaccgtgatggtgtggcagatccccctgctgaacatctag

SEQ ID NO: 181179 - protein, 1267 aa, Artificial Sequence
  derived and/or modified sequence
MGDMKTPDFDDLLAAFDIPDPTSLDAKEAIQTPSEENESPLKPPGICMDESVSLSHSGSAPDVPAVSVIVKNTSRQESFEAEKDHITPSLLHNGFRGSDLPPDPHNCGKFDSTFMNGDSARSFPGKLEPPKSEPLPTFNQFSPISSPEPEDPIKDNGFGIKPKHSDSYFPPPLGCGAVGGPVLEALAKFPVPELHMFDHFCKKEPKPEPLPLGSQQEHEQSGQNTVEPHKDPDATRFFGEALEFNSHPSNSIGESKGLARELGTCSSVPPRQRLKPAHSKLSSCVAALVALQAKRVASVTKEDQPGHTKDLSGPTKESSKGSPKMPKSPKSPRSPLEATRKSIKPSDSPRSICSDSSSKGSPSVAASSPPAIPKVRIKTIKTSSGEIKRTVTRILPDPDDPSKSPVGSPLGSAIAEAPSEMPGDEVPVEEHFPEAGTNSGSPQGARKGDESMTKASDSSSPSCSSGPRVPKGAAPGSQTGKKQQSTALQASTLAPANLLPKAVHLANLNLVPHSVAASVTAKSSVQRRSQPQLTQMSVPLVHQVKKAAPLIVEVFNKVLHSSNPVPLYAPNLSPPADSRIHVPASGYCCLECGDAFALEKSLSQHYGRRSVHIEVLCTLCSKTLLFFNKCSLLRHARDHKSKGLVMQCSQLLVKPISADQMFVSAPVNSTAPAAPAPSSSPKHGLTSGSASPPPPALPLYPDPVRLIRYSIKCLECHKQMRDYMVLAAHFQRTTEETEGLTCQVCQMLLPNQCSFCAHQRIHAHKSPYCCPECGVLCRSAYFQTHVKENCLHYARKVGYRCIHCGVVHLTLALLKSHIQERHCQVFHKCAFCPMAFKTASSTADHSATQHPTQPHRPSQLIYKCSCEMVFNKKRHIQQHFYQNVSKTQVGVFKCPECPLLFVQKPELMQHVKSTHGVPRNVDELSSLQSSADTSSSRPGSRVPTEPPATSVAARSSSLPSGRWGRPEAHRRVEARPRLRNTGWTCQECQEWVPDRESYVSHMKKSHGRTLKRYPCRQCEQSFHTPNSLRKHIRNNHDTVKKFYTCGYCTEDSPSFPRPSLLESHISLMHGIRNPDLSQTSKVKPPGGHSPQVNHLKRPVSGVGDAPGTSNGATVSSTKRHKSLFQCAKCSFATDSGLEFQSHIPQHQVDSSTAQCLLCGLCYTSASSLSRHLFIVHKVRDQEEEEEEEAAAAEMAVEVAEPEEGSGEEVPMETRENGLEECAGEPLSADPEARRLLGPAPEDDGGHNDHSQPQASQDQDSHTLSPQV

SEQ ID NO: 181180 - DNA, 3804 bp, Artificial Sequence
  derived and/or modified sequence
atgggcgacatgaagacccccgacttcgacgacctgctggccgccttcgacatccccgaccccaccagcctggacgccaaggaggccatccagacccccagcgaggagaacgagagccccctgaagccccccggcatctgcatggacgagagcgtgagcctgagccacagcggcagcgcccccgacgtgcccgccgtgagcgtgatcgtgaagaacaccagcagacaggagagcttcgaggccgagaaggaccacatcacccccagcctgctgcacaacggcttcagaggcagcgacctgccccccgacccccacaactgcggcaagttcgacagcaccttcatgaacggcgacagcgccagaagcttccccggcaagctggagccccccaagagcgagcccctgcccaccttcaaccagttcagccccatcagcagccccgagcccgaggaccccatcaaggacaacggcttcggcatcaagcccaagcacagcgacagctacttccccccccccctgggctgcggcgccgtgggcggccccgtgctggaggccctggccaagttccccgtgcccgagctgcacatgttcgaccacttctgcaagaaggagcccaagcccgagcccctgcccctgggcagccagcaggagcacgagcagagcggccagaacaccgtggagccccacaaggaccccgacgccaccagattcttcggcgaggccctggagttcaacagccaccccagcaacagcatcggcgagagcaagggcctggccagagagctgggcacctgcagcagcgtgccccccagacagagactgaagcccgcccacagcaagctgagcagctgcgtggccgccctggtggccctgcaggccaagagagtggccagcgtgaccaaggaggaccagcccggccacaccaaggacctgagcggccccaccaaggagagcagcaagggcagccccaagatgcccaagagccccaagagccccagaagccccctggaggccaccagaaagagcatcaagcccagcgacagccccagaagcatctgcagcgacagcagcagcaagggcagccccagcgtggccgccagcagcccccccgccatccccaaggtgagaatcaagaccatcaagaccagcagcggcgagatcaagagaaccgtgaccagaatcctgcccgaccccgacgaccccagcaagagccccgtgggcagccccctgggcagcgccatcgccgaggcccccagcgagatgcccggcgacgaggtgcccgtggaggagcacttccccgaggccggcaccaacagcggcagcccccagggcgccagaaagggcgacgagagcatgaccaaggccagcgacagcagcagccccagctgcagcagcggccccagagtgcccaagggcgccgcccccggcagccagaccggcaagaagcagcagagcaccgccctgcaggccagcaccctggcccccgccaacctgctgcccaaggccgtgcacctggccaacctgaacctggtgccccacagcgtggccgccagcgtgaccgccaagagcagcgtgcagagaagaagccagccccagctgacccagatgagcgtgcccctggtgcaccaggtgaagaaggccgcccccctgatcgtggaggtgttcaacaaggtgctgcacagcagcaaccccgtgcccctgtacgcccccaacctgagcccccccgccgacagcagaatccacgtgcccgccagcggctactgctgcctggagtgcggcgacgccttcgccctggagaagagcctgagccagcactacggcagaagaagcgtgcacatcgaggtgctgtgcaccctgtgcagcaagaccctgctgttcttcaacaagtgcagcctgctgagacacgccagagaccacaagagcaagggcctggtgatgcagtgcagccagctgctggtgaagcccatcagcgccgaccagatgttcgtgagcgcccccgtgaacagcaccgcccccgccgcccccgcccccagcagcagccccaagcacggcctgaccagcggcagcgccagcccccccccccccgccctgcccctgtaccccgaccccgtgagactgatcagatacagcatcaagtgcctggagtgccacaagcagatgagagactacatggtgctggccgcccacttccagagaaccaccgaggagaccgagggcctgacctgccaggtgtgccagatgctgctgcccaaccagtgcagcttctgcgcccaccagagaatccacgcccacaagagcccctactgctgccccgagtgcggcgtgctgtgcagaagcgcctacttccagacccacgtgaaggagaactgcctgcactacgccagaaaggtgggctacagatgcatccactgcggcgtggtgcacctgaccctggccctgctgaagagccacatccaggagagacactgccaggtgttccacaagtgcgccttctgccccatggccttcaagaccgccagcagcaccgccgaccacagcgccacccagcaccccacccagccccacagacccagccagctgatctacaagtgcagctgcgagatggtgttcaacaagaagagacacatccagcagcacttctaccagaacgtgagcaagacccaggtgggcgtgttcaagtgccccgagtgccccctgctgttcgtgcagaagcccgagctgatgcagcacgtgaagagcacccacggcgtgcccagaaacgtggacgagctgagcagcctgcagagcagcgccgacaccagcagcagcagacccggcagcagagtgcccaccgagccccccgccaccagcgtggccgccagaagcagcagcctgcccagcggcagatggggcagacccgaggcccacagaagagtggaggccagacccagactgagaaacaccggctggacctgccaggagtgccaggagtgggtgcccgacagagagagctacgtgagccacatgaagaagagccacggcagaaccctgaagagatacccctgcagacagtgcgagcagagcttccacacccccaacagcctgagaaagcacatcagaaacaaccacgacaccgtgaagaagttctacacctgcggctactgcaccgaggacagccccagcttccccagacccagcctgctggagagccacatcagcctgatgcacggcatcagaaaccccgacctgagccagaccagcaaggtgaagccccccggcggccacagcccccaggtgaaccacctgaagagacccgtgagcggcgtgggcgacgcccccggcaccagcaacggcgccaccgtgagcagcaccaagagacacaagagcctgttccagtgcgccaagtgcagcttcgccaccgacagcggcctggagttccagagccacatcccccagcaccaggtggacagcagcaccgcccagtgcctgctgtgcggcctgtgctacaccagcgccagcagcctgagcagacacctgttcatcgtgcacaaggtgagagaccaggaggaggaggaggaggaggaggccgccgccgccgagatggccgtggaggtggccgagcccgaggagggcagcggcgaggaggtgcccatggagaccagagagaacggcctggaggagtgcgccggcgagcccctgagcgccgaccccgaggccagaagactgctgggccccgcccccgaggacgacggcggccacaacgaccacagccagccccaggccagccaggaccaggacagccacaccctgagcccccaggtgtag

SEQ ID NO: 181181 - DNA, 3804 bp, Artificial Sequence
  derived and/or modified sequence
atgggggacatgaagactcccgactttgatgatttacttgccgccttcgacattcccgatcccacaagcctcgacgctaaggaagctatccagacccccagcgaagaaaacgagagccctctcaaacctccaggcatctgtatggacgaatccgtgtccctcagtcactccggaagcgcacctgatgttcctgctgttagcgtgatcgtgaaaaacacgagtcgccaggagtcttttgaggctgaaaaggaccatattaccccttcactgctgcacaatggtttccgggggtcagatctgcccccagatccgcataactgcggcaaatttgattccacttttatgaacggtgacagcgctcggtcctttcctgggaagttagaaccacctaagagtgagccgctgcccaccttcaatcagttctctcccattagcagccctgagccggaagaccctatcaaagataacggttttggcataaagccaaaacatagcgactcctacttcccccctcctctgggctgtggcgccgtgggaggcccagtcctcgaagcacttgcgaagttcccagttccagaactccatatgttcgatcacttttgtaaaaaagaaccaaagccagagccactcccccttggctcccagcaggagcatgagcagtctggtcagaatacagttgaaccacacaaggaccccgatgcaacacggttctttggcgaggcattggagtttaattcgcatccatcaaactccattggggaatcaaaggggctcgcacgggagctggggacctgtagcagcgtgccccccaggcagcggttaaagcccgcccacagcaaacttagctcgtgcgtggccgcactggttgcgctgcaggctaagcgagtggcatctgtgaccaaggaggaccaacctggacacactaaagacctttctggccctacaaaggaaagctcaaaaggaagtccaaagatgcccaagagtcctaaatctcccagatccccgctcgaagctactagaaagtctattaagccgagcgacagcccccgttctatctgttcagacagctcctctaaaggtagccctagtgtggctgcatcttctccgccagctatccccaaagtacgcatcaaaacaataaagacctcatccggggaaatcaaacggactgtaacccgaatcttgcctgaccctgatgatcccagcaagagtcctgtggggtcccctctgggatcagctattgctgaggcaccaagcgagatgccaggggacgaggtcccagtagaggaacattttccagaggcaggaaccaatagcgggagtccccagggcgccaggaagggagatgaaagcatgacgaaggcctcagacagttccagcccgtcttgctcctctgggccacgcgtgcctaagggagccgccccagggtcacagaccggaaagaaacaacagagtacagctctccaggcctctacactggctccagccaatctcttaccgaaggcggtacatttagccaatctcaatctcgttccacacagcgtcgccgcgtcagtgacggccaagagcagcgtgcaacgccgctcccagcctcagctcacacagatgtcggtgcccctggtccaccaagtgaagaaagcagccccattgatcgtcgaggtgttcaataaagtgctgcatagcagcaatcccgtccccctgtatgccccgaacttaagcccccccgccgatagccgcatccacgtgcctgcttctggatactgttgcttggaatgcggggacgccttcgcccttgagaagagtctctcacagcactatgggaggaggtccgtgcacattgaagtgctctgcacactgtgttccaagacccttctgttcttcaacaagtgttctctgctcagacatgcccgtgaccataagagtaagggcctggtgatgcagtgtagccagctgctggtcaagcctataagtgctgatcagatgtttgtgagcgcacctgttaactccacagcccccgcagcccccgccccatcatcctcccctaaacacggcctgacttcggggtctgcctcgccgcctccacccgccctgcccctgtaccccgaccccgtaagactgatccgttactctattaagtgcctggagtgccacaagcagatgagagactatatggtcctggctgcccattttcagaggacaacggaggagaccgaaggtttgacatgccaagtctgtcagatgctgctgccaaatcagtgcagtttttgcgcacaccaacgcatccacgcccataaatctccctactgttgccccgaatgcggggtgctgtgtagatcggcttactttcagacgcatgtgaaagagaattgcctgcactacgcgcggaaggttggctaccgatgcatacattgtggggttgtccatctcaccctcgccctgctaaaatcgcatatccaggagcgtcattgccaggttttccataagtgcgctttctgccctatggcttttaaaacagcctcttctacggcagatcacagtgcaactcaacacccaactcagccccacaggcctagccagcttatttataagtgtagttgtgaaatggtttttaacaagaagcgacacatccagcagcacttctatcagaacgtatctaagacacaggtgggagtgttcaagtgccccgaatgtcccttactgttcgtccagaaaccggagttgatgcaacacgtcaaatccacacacggggttcctcgcaacgtagacgagctcagctcacttcaatcttctgcggatacatcttcatcacgccctggctcacgggtccctactgagccacccgccacctccgtggcagctcgctcatctagtctgcccagcggccgatgggggaggccagaagcacatcgacgagtagaggctagacctcgcttaaggaacacgggttggacatgccaagaatgccaggaatgggtgcctgatcgagaaagttatgtctcccatatgaaaaagtcccacgggcgtactctgaagagatacccatgtaggcagtgtgagcagagcttccatacaccaaacagcctgcgaaagcacatccggaataatcacgataccgtgaaaaagttttatacatgtggctattgtactgaagactccccctcttttcctcgcccctcactactggagtcgcatatttccttgatgcatgggatcaggaacccggacctgagccagacctcaaaagtgaaacctccgggggggcactccccccaagtgaaccacctcaaacggccagttagcggggtgggggatgcccctggcacctctaatggcgccaccgtctccagcacgaagaggcacaaatctctttttcagtgcgcaaaatgcagtttcgctacagacagcggacttgagtttcagtcacatattccccagcatcaggtcgattcctccaccgctcagtgtcttctctgcggtctctgttacacttcagcttcaagtctaagtcggcacttatttattgtgcacaaggtgcgagatcaggaggaggaggaggaagaagaagctgcagctgcagagatggccgtcgaagtggccgaaccagaagagggctctggcgaggaggtcccaatggagaccagggagaatgggctcgaagaatgtgccggcgaaccactgtccgccgaccccgaagcccgacggcttttaggtccggcgcccgaggacgatggcggacacaacgatcacagccaaccccaggcatctcaggatcaagattcccacactctgtccccccaggtctag

SEQ ID NO: 181182 - DNA, 3804 bp, Artificial Sequence
  derived and/or modified sequence
atgggggatatgaagacccctgattttgatgatcttctagcggcttttgatattccagatcccaccagccttgacgccaaagaggccatacagactccgtcagaggagaatgagtcccccctgaaaccaccaggaatatgcatggacgaatctgtttctttgagtcattcagggagtgcccctgatgtaccagccgtgtcagtgattgtcaagaacactagcagacaagagtccttcgaggcagagaaggatcatattaccccatctctcctgcacaacggcttccgaggatcagatctgccacccgacccccacaattgcggcaaatttgattctactttcatgaacggagactctgccaggtcttttccaggcaaactcgagcccccgaaatcagaacctctgccaacattcaatcagtttagccctatttctagtcctgagcctgaggacccaatcaaggacaatggatttggcatcaagcccaagcactcggactcatatttccctccgccattgggttgtggtgccgttggcggcccagtgctcgaagccctagcgaagtttcctgttcctgagctgcacatgttcgaccacttctgcaagaaggagccaaaaccagagcctttgcctctgggtagccagcaggagcacgaacaaagcggtcaaaatacagtagagccccataaggatcctgatgccaccagattctttggagaggctctggagtttaattcacatccatctaattccatcggagagagcaaagggctcgcgagagagttgggcacctgctcttccgtgccacctaggcagagactgaaacctgcacacagcaaactgtcatcctgcgttgcggctctcgtagcactgcaggcaaagcgagtcgccagtgtcactaaggaggatcagcccggccacaccaaggacttatctggccctaccaaagagtcctctaagggatcaccaaagatgcctaagtcccccaaaagcccgagaagcccattggaagcgacacggaaaagtattaaaccatctgacagtcctagatccatttgctctgacagcagttctaaagggtccccctctgtcgccgcaagctctcctcctgcaatacctaaagtgagaatcaaaactataaagaccagtagtggggaaatcaaacggacagttacacgcatcctccccgatcctgacgacccatcaaagtcccccgttggcagtccccttggctcagccattgccgaggccccaagtgagatgcctggggatgaagttcccgtcgaggagcactttcccgaggcgggcacaaattccggctccccccagggggctcgtaagggtgatgagtccatgactaaggccagtgacagcagctccccatcttgttcatcaggccccagagtccccaagggcgctgcaccaggtagccaaactggtaagaagcaacagtccactgctctccaggcatcaactctggcaccagcaaacctgctccctaaagccgtgcatttggcaaacctaaacctcgtgcctcatagtgtcgccgcaagcgtgacagctaaaagcagcgtgcagaggcgaagtcagccccaactgacccagatgagcgttccccttgtccatcaggtgaaaaaggcggcccccctgatcgtggaagtattcaacaaggtgctgcacagttcgaacccagttccgctgtatgcgcctaacctgtcccctccagcagatagtcgaattcacgtgccagcttcagggtactgctgtcttgagtgcggcgacgcattcgccctggagaagagtttatcccagcactacggtcggaggtctgtgcacattgaggtcctctgtacactgtgcagcaagaccctgctgttcttcaacaagtgcagtttgcttcgccatgccagggatcacaagagtaaaggactcgtcatgcaatgcagccaattgctggtgaagccgattagcgccgatcagatgttcgtgagcgctccagttaattcaacagctccagctgctccagcccccagttcatcaccgaagcacgggttaacatcggggagcgcgagccccccaccgccagctctccctctgtaccccgaccccgtgcggctaatccgctattccatcaaatgcctggaatgccacaagcagatgcgagactatatggtcctcgccgcacactttcagcgcacaaccgaggaaactgaagggctgacctgccaggtctgtcagatgctcctgcctaatcagtgcagcttctgcgcacatcagaggattcacgcccataaaagtccttattgttgcccggagtgtggtgtgctttgtcgaagcgcctattttcagactcacgtgaaggaaaactgcttacactacgcacggaaagtgggatataggtgtattcactgtggagtggtgcacttaaccctggctctattgaagtcccacattcaggagcgtcactgccaggtcttccataagtgtgctttttgcccaatggcgttcaaaacggcctcttccaccgcagaccactccgcaacgcagcatccgacacaaccacataggccgtcccagctcatttacaagtgcagctgcgagatggtgttcaataagaagcgtcacatccagcagcacttttaccagaatgtgtctaaaacccaagtgggggtttttaagtgccctgaatgccctctgctgtttgtccagaaacctgaattgatgcagcatgtcaagagcacgcatggagtgcctcggaatgtggatgagctctcatccctacagtccagcgcagacacttcctccagccggcctggatcacgtgtgcccaccgagcccccagctaccagcgtcgctgcacgaagttcatccctgcccagcggccgctgggggcgcccagaagcccaccggagagtcgaggcccgaccacggctgcgtaacactggctggacgtgccaggagtgtcaagagtgggtacccgaccgagagtcttacgtgtctcatatgaagaagagccatggtaggacactcaaacggtacccatgcaggcagtgtgaacagtcttttcatacaccaaatagcctgaggaagcacattcgcaacaatcacgataccgtcaagaagttttacacgtgtggttactgtacagaagattctccctccttccccagaccatcgctcctcgaatctcacatatccttgatgcatggaattcgaaaccccgacctgagccagacatctaaggtgaagcccccaggcgggcattcccctcaggtgaatcacctaaaacgtcccgtgtccggagtaggggacgctcccggtacgagcaatggcgcaacagtatcttctaccaaacggcacaagtcactattccaatgtgctaaatgctcgtttgctaccgactctggcctggaattccagtcccacatacctcagcaccaggtggattcctccacggcacagtgtctcttgtgtggcctctgctacaccagtgcatcctcattatcaaggcacttatttattgtgcataaagtgcgagatcaagaagaagaagaggaggaggaggcagcagcggctgaaatggccgtggaggtagctgaaccagaggaggggagtggtgaggaggtgccaatggagactcgggaaaacggactggaggagtgcgcaggggagccgttaagtgccgaccctgaagcacgtcggctgttgggccctgcaccagaggatgatggagggcacaatgaccattcccaaccccaggcttctcaggaccaagactcacacacactgagtccacaggtgtag

SEQ ID NO: 181183 - DNA, 3804 bp, Artificial Sequence
  derived and/or modified sequence
atgggagacatgaagaccccagactttgatgacctgctggccgcctttgacatcccagaccccaccagcctggatgccaaggaggccatccagacccccagcgaggagaatgaaagccccctgaagcccccaggcatctgcatggatgaatctgtgtccctgagccacagcggcagcgccccagatgtgcctgctgtgtctgtgattgtgaagaacaccagccggcaggagagctttgaagctgagaaggaccacatcacccccagcctgctgcacaacggcttccggggcagtgacctgcccccagacccccacaactgtgggaagtttgacagcaccttcatgaatggagacagcgcccggagcttccctgggaagctggagccccccaagtctgagcccctgcccaccttcaaccagttcagccccatcagcagccctgagcctgaggaccccatcaaggacaatggcttcggcatcaagcccaagcacagcgacagctacttccccccacccctgggctgtggggctgtgggcggccctgtgctggaggccctggccaagtttcctgtgcctgagctgcacatgtttgaccacttctgcaagaaggagcccaagccagagcccctgcccctgggcagccagcaggagcacgagcagagcggccagaacacagtggagccccacaaggaccctgatgccacccgcttcttcggggaggccctggagttcaacagccaccccagcaacagcatcggggagagcaagggcctggcccgggagctgggcacctgcagctctgtgcccccccggcagaggctgaagccagcccacagcaagctgagcagctgtgtggccgccctggtggccctgcaggccaagagggtggcctctgtgaccaaggaggaccagcccggccacaccaaggacctgagcggccccaccaaggagagcagcaagggcagccccaagatgcccaagagccccaagagccccaggagccccctggaggccaccaggaagagcatcaagcccagcgacagccccaggagcatctgcagcgacagcagcagcaagggcagccccagcgtggccgccagcagccccccagccatccccaaggtgcgcatcaagaccatcaagaccagcagcggggagatcaagaggacagtgacccgcatcctgcctgaccctgatgaccccagcaagagccctgtgggcagccccctgggcagcgccatcgccgaggcccccagcgagatgcctggagatgaggtgcctgtggaggagcacttccctgaggccggcaccaacagcggcagcccccagggcgccaggaaaggagatgagagcatgaccaaggccagtgacagcagcagccccagctgcagcagcggcccccgggtgcccaagggagctgcccctggcagccagacaggcaagaagcagcagagcacagccctgcaggccagcaccctggccccagccaacctgctgcccaaggctgtgcacctggccaacctgaacctggtgccccacagcgtggccgcctctgtgacagccaagagctctgtgcagaggaggagccagccccagctgacccagatgtctgtgcccctggtgcaccaggtgaagaaggccgcccccctgattgtggaggtgttcaacaaggtgctgcacagcagcaaccctgtgcccctgtatgcccccaacctgagccccccagctgacagccgcatccacgtgcctgccagcggctactgctgcctggagtgtggagatgcctttgccctggagaagagcctgagccagcactacggccgccgctctgtgcacatcgaggtgctgtgcaccctgtgcagcaagaccctgctcttcttcaacaagtgcagcctgctgcggcatgcccgggaccacaagagcaagggcctggtgatgcagtgcagccagctgctggtgaagcccatctctgctgaccagatgtttgtgtctgcccctgtgaacagcacagccccagctgccccagcccccagcagcagccccaagcacggcctgaccagcggcagcgccagccccccacctccagccctgcccctgtacccagaccctgtgcggctcatccgctacagcatcaagtgcctggagtgccacaagcagatgagggactacatggtgctggccgcccacttccagaggaccacagaggagacagagggcctgacctgccaggtgtgccagatgctgctgcccaaccagtgcagcttctgtgcccaccagaggatccacgcccacaagagcccctactgctgcccagaatgtggggtgctgtgccgcagcgcctacttccagacccacgtgaaggagaactgcctgcactacgccaggaaggtgggctaccgctgcatccactgcggcgtggtgcacctgaccctggccctgctgaagagccacatccaggagcggcactgccaggtgttccacaagtgtgccttctgccccatggccttcaagacagccagcagcacagctgaccacagcgccacccagcaccccacccagccccaccggcccagccagctgatctacaagtgcagctgtgagatggtgttcaacaagaagaggcacatccagcagcacttctaccagaatgtgtccaagacccaggtgggcgtcttcaagtgcccagagtgccccctgctgtttgtgcagaagccagagctgatgcagcacgtgaagagcacccatggagtgcccagaaatgtggatgagctgagcagcctgcagagcagcgctgacaccagcagcagccggcccggcagccgggtgcccacagagcccccagccacctctgtggccgcccggagcagcagcctgcccagcggccgctggggccggcctgaggcccaccggcgggtggaggcccggccccggctgaggaacacaggctggacctgccaggagtgccaggagtgggtgcctgaccgggagagctatgtgagccacatgaagaagagccacggccgcaccctgaagcgctacccctgccggcagtgtgagcagagcttccacacccccaacagcctgaggaagcacatccggaacaaccacgacacagtgaagaagttctacacctgtggctactgcacagaggacagccccagcttcccccggcccagcctgctggagagccacatcagcctgatgcacggcatccggaacccagacctgagccagaccagcaaggtgaagcccccaggcggccacagcccccaggtgaaccacctgaagaggcctgtgtctggagtgggagatgcccctggcaccagcaatggagccaccgtgagcagcaccaagaggcacaagagcctcttccagtgtgccaagtgcagctttgccacagattctggcctggagttccagagccacatcccccagcaccaggtggacagcagcacagcccagtgcctgctgtgtggcctgtgctacaccagcgccagcagcctgagccgccacctgttcatcgtgcacaaggtgcgggaccaggaggaggaggaggaggaggaggccgctgctgctgagatggctgtggaggtggccgagcctgaggagggcagcggggaggaggtgcccatggagaccagagaaaatggcctggaggagtgtgccggggagcccctgtctgctgaccctgaggcccggcggctgctgggccctgccccagaagatgatggcggccacaatgaccacagccagccccaggccagccaggaccaggacagccacaccctgagcccccaggtgtag

SEQ ID NO: 181184 - DNA, 3804 bp, Artificial Sequence
  derived and/or modified sequence
atgggcgacatgaagacccccgacttcgacgacctgctggccgccttcgatataccagaccctacttccctggacgccaaggaggctattcagacccccagtgaagaaaacgagtcccccctgaagcccccgggcatttgcatggatgagagtgtgagtttgtcccactccggctcagctccagatgtcccggccgtcagtgttattgtaaagaatacaagtaggcaagagtcgttcgaggctgaaaaggatcacatcaccccttctctgctgcataacgggtttagaggatccgacttacctccagacccccataattgcggcaaatttgatagcacctttatgaatggcgacagcgcccggtcctttccggggaaattagaacccccaaagagcgagccactgcccactttcaaccagtttagtccaatatcctccccggaacccgaggatcccatcaaagataatggcttcggcattaagcccaagcattctgactcctacttccctccacctttgggctgcggagcggtaggaggcccagtgctcgaggcattagccaagttcccagttccagaacttcatatgtttgatcacttctgcaagaaagagcccaagccagaaccactgcccttagggtctcagcaggagcatgagcagagcgggcagaatacagtggaaccccataaagatccggatgctacccggttttttggtgaggcactcgagtttaactcccacccatccaacagcatcggcgagtccaagggcctggctcgagaattagggacttgcagctctgtaccaccacgtcaacgcctgaagcccgcgcatagcaaattatcctcatgcgtggctgcactcgttgccctgcaggcgaaacgggtagcttccgtgaccaaggaagaccaacccggacatacgaaagacctttccggacctacaaaggaatcctcgaagggctcacctaagatgccgaagtcacctaagagcccacgcagcccgctggaagccacaaggaaatccataaaacctagtgactccccacgatcaatctgctccgacagcagctcaaagggcagcccatctgttgcggcttcctctccacccgcaatcccaaaggtaagaataaaaaccattaagacgagctctggggaaatcaaacgaacagtgactagaatcctacccgacccagatgatccaagtaaaagccctgtgggatcccctctagggtctgccattgccgaggccccttctgagatgcctggtgacgaagttccagtggaggagcatttccctgaggctggaacaaatagcggttctccacaaggtgctcggaaaggtgatgagtccatgaccaaagcatcagattcaagttctccttcctgcagctccggtccccgagtcccaaaaggagctgccccaggctctcagactggaaaaaaacagcagtctaccgccctgcaagctagcaccttggccccggcaaacctccttcctaaagccgtgcacctagcgaacctcaacctagtgccccacagtgtggccgcaagcgtgaccgcgaagtcttcagtacaacgcagatcacagccccagttgacccagatgagcgtgccactggtgcaccaggtgaagaaggccgcaccactgattgtagaagtgttcaataaggtgctgcactcttctaacccagttccattgtatgcccccaacctgtcacctcccgcagattctagaatccacgttcccgccagtggatattgctgcctggaatgcggcgacgcatttgctctggaaaagtccctgtcacagcattacggtaggaggtcagtgcacattgaggtgctgtgcacgctgtgcagcaagaccttgttatttttcaacaagtgttcattactccgacatgcgcgggaccataaatcgaagggtctagtcatgcagtgctcccaattactggtcaagcccatttccgctgatcagatgttcgttagcgcaccagtgaattctactgctcccgccgcccctgctccctcttcaagcccaaaacacggattaacaagtggctccgcctcacctccgccgcccgctttgccactctatcccgatcctgtgaggctcattcgatactctattaagtgtctggagtgtcacaaacaaatgcgcgactatatggtgctggccgctcactttcagcgcaccaccgaggagactgaaggccttacttgccaggtctgccagatgttattgcctaatcaatgtagtttctgtgcccatcagcggatccacgctcacaagtcaccctactgctgtccggaatgcggagtgttgtgtagatcagcctatttccagacacacgtcaaagagaattgtctgcattacgccaggaaagtgggctaccgctgtatacactgcggagtcgtgcacttgaccttagccttactgaagagtcatatacaggagcggcattgccaggtgtttcacaagtgcgcgttttgcccaatggccttcaagaccgctagcagtactgccgaccacagtgcgacccagcacccgacacagccccacagaccaagccagttaatctacaagtgtagctgtgaaatggtctttaataagaaacggcatatacaacagcacttctatcagaatgtcagcaaaactcaagtcggagtgtttaaatgccccgagtgccccctccttttcgtacagaagcctgagttgatgcagcacgtcaaatctacccatggtgtgccaagaaacgtggacgagctctctagtctgcagtctagcgcagacacctcatcgagtagacccggttcacgcgtaccgactgagcctcccgccacgtccgtggccgcccgatctagctcccttccctctggccgctggggtcgccccgaggctcacagacgagtggaagcacggccgaggcttcggaacacgggctggacctgtcaggagtgtcaggagtgggtgccagatcgtgaatcctacgttagccacatgaagaaatcacacggccgcacgctcaagaggtatccttgtcgccagtgtgagcagtcttttcatactcctaactctttgagaaaacacattagaaataatcatgacaccgtaaaaaaattctatacttgtggctactgcacagaggatagtccgtctttccccagaccaagcctactggaatctcatatatcgctgatgcatgggatccgtaaccccgatctcagccagacctctaaagttaagccacccggcggccatagtccacaggtgaatcatcttaagaggccggtgtccggcgtgggtgatgcgccaggtacatccaacggcgctacagtgtcttccacaaagcgacataagtcgctgtttcagtgcgctaagtgctcattcgcgactgactccggcctggaatttcagtcacatattcctcagcaccaggtagactcaagtaccgcccagtgtctgctctgcggtctgtgttacacatccgcctcctcgctcagtagacatctctttatagtgcataaagtgcgtgaccaagaggaagaggaggaagaggaggcagccgcagcagaaatggccgtagaagtggcagagcctgaggagggaagcggggaggaagtaccgatggagactagggagaacggcctggaagagtgtgcaggcgagcccttgagcgctgaccccgaggcgcgcagacttttgggtccagctccagaggacgacggcggccacaacgaccacagccagccccaggcatcgcaggaccaggacagccacaccttaagtcctcaggtttag

SEQ ID NO: 181185 - DNA, 3804 bp, Artificial Sequence
  derived and/or modified sequence
atgggcgacatgaagacccccgacttcgacgacctgctggccgccttcgatattcctgaccctacgagtctcgatgccaaagaagctattcagaccccctcagaagaaaatgaaagccccctcaaaccccctggtatatgcatggacgagtctgtaagtctttcacattccggttctgctccagacgtcccagctgtcagcgttatcgtgaagaacacctctcgacaagagagctttgaggccgagaaagatcatatcactccttccttactacataatggatttcgagggagtgacctacctccggatccacataattgcggcaagttcgactcgacctttatgaacggcgactcagccaggtctttcccgggaaagctggaacccccaaagtctgaaccactgccgacatttaaccagttctccccgatatcctctccagagcccgaggacccaatcaaggacaacgggtttgggatcaaaccaaagcatagcgacagctactttccccctccattggggtgcggggccgttggcggccctgtgctcgaggctttggcaaagtttcccgttccagaattgcacatgttcgatcacttctgtaaaaaagaaccaaaacctgagccactacctctcggaagtcagcaggagcacgagcaatctgggcagaacaccgtggaaccccataaagacccggatgctactagattctttggtgaagcactagagttcaactcacatcctagtaattcaatcggcgagtccaagggactggcccgcgaacttggaacatgttcaagcgtccccccaaggcaacgcttgaaaccagctcactctaagctttcatcatgtgtcgcggctctggtcgccctacaagcaaaacgggtggcatctgtcactaaagaagaccagcccggacacaccaaagacctgtccgggccaaccaaggagtcttctaaaggctctccgaagatgcccaagagtcccaagtccccacgctcgccgttagaagcaacacgaaaaagcattaagcctagcgacagtccacgctcaatctgcagcgactcttctagcaaaggatccccttcagttgccgcaagcagtccccccgctatccccaaggttaggattaagacaattaaaactagttccggggagataaagagaactgttacacggattcttcctgaccccgatgacccttcgaagagccctgtcggtagccccctcgggagcgcaattgccgaagcgcccagcgaaatgccaggcgatgaagtgcccgttgaagagcatttccctgaggcgggaaccaattcaggcagccctcagggcgcccggaaaggagatgagtcgatgacaaaagccagcgatagctccagtccgtcttgctcctcaggtccccgggtgcctaaaggcgcagcccccggcagccagactggtaaaaaacagcagtctacagctttacaagccagtacactcgctccagctaacctcttacccaaggcagtgcatctcgccaatctgaatctggtgcctcactcagtggctgcttccgtcactgcaaagtcctcagtgcaaagacgctcacagcctcaactgacacaaatgtccgtgccactggtccatcaggtgaagaaggccgcaccactcatcgtagaggtcttcaacaaagtcctccattctagtaacccggtgcccctgtatgcccctaacctttctccgcccgcagatagccgcatccacgtgcccgcgtccggctactgctgcctggagtgtggggatgcctttgcgttggaaaagagcctatcccaacattacgggagacggtctgtacatatcgaagttctctgtacactgtgttctaaaactctgctgttcttcaacaaatgttccctactccgacacgctagggaccataagtcgaagggactagttatgcagtgttctcagttacttgtcaaacccatttctgcagaccagatgttcgtgagtgcccccgtcaacagcaccgcaccagctgcccctgcaccatctagttctccgaagcatggcctgaccagtgggtccgcctctccaccgcctcctgcactcccactctacccagacccagtgagattaatccgctactcaattaagtgcctggaatgtcacaaacagatgagagattatatggtcctcgctgctcacttccaacgaacgactgaggagacagagggtcttacctgtcaggtctgccagatgctgctgcccaatcaatgtagcttttgcgcccatcagcgtattcacgcacacaagtctccttactgctgtccagaatgcggtgtgctgtgtaggtcagcctattttcagacacacgtgaaagaaaattgcctgcattatgccagaaaggtcggataccggtgtatacactgcggagtagtgcatctgacgttggccctgcttaagtctcacatacaggagaggcactgccaggtgtttcataagtgcgctttttgccctatggcttttaaaactgcttcttccactgcggaccactctgctacacagcaccccacgcagccccaccgcccgtctcagcttatctacaagtgtagttgcgagatggtgttcaataaaaaacgtcatatacagcagcatttttaccaaaatgtatctaagacgcaggtcggagtctttaaatgcccagagtgtcccctgctgtttgtgcagaagcccgaactaatgcagcatgtgaaatctacacatggcgtgcctcgtaacgtggatgagctgagttctttgcagtccagcgccgacaccagcagcagccgccccggaagtagagtgccaaccgagcctcctgcaacatctgtggctgctagaagcagtagcctaccaagcggcagatgggggcggcctgaggcccaccggcgggtggaagcgaggcccaggctcaggaataccgggtggacttgccaggaatgtcaggagtgggtgcctgatcgagaatcctatgtcagtcacatgaagaaatcgcatggaagaacccttaaacggtatccctgtaggcaatgcgaacagtccttccatacacctaactctctacgaaagcacattagaaacaatcacgataccgtgaagaaattttacacctgcggctattgtacagaggatagcccctcttttcctcgcccatcactcttggaatcgcatattagtctgatgcatggcatccggaacccggatctttctcagaccagcaaagtgaagccacccggagggcactcaccccaagtgaatcacctaaaaaggcccgtatctggcgtcggcgacgctccaggaacctctaacggggccacagtgagttcaacaaagcgccataagtcactgtttcagtgtgcaaaatgttcttttgccacagactctggcctcgagttccagtcgcacatcccacagcaccaggttgactcctccactgctcagtgtctattgtgtggtctatgttacacgtccgcttccagcctgtcacgtcacctctttatcgttcacaaagtacgagatcaggaggaggaagaggaagaggaggccgcggcagcggaaatggccgtcgaggttgccgaacccgaggagggcagtggcgaagaggtgcccatggagacaagggagaatggacttgaggagtgtgctggcgagccccttagtgctgaccccgaggcccggcgcttgctgggacccgcacctgaggacgatggaggacataatgatcactcacaaccacaagccagccaggaccaggatagtcataccttatcccctcaagtatag

SEQ ID NO: 181186 - DNA, 3804 bp, Artificial Sequence
  derived and/or modified sequence
atgggcgatatgaaaacacctgacttcgacgatttgttggccgctttcgatattcccgacccaacttcactggacgcgaaagaggcgatccaaacccctagcgaagagaacgaaagcccactcaagccccctggtatttgcatggatgaaagcgtgtccctgagtcatagcggttcagcaccggacgtcccggcagtgagtgtgatcgtgaagaacaccagtagacaggaaagctttgaagccgagaaggaccacattactccgtcactcttgcataatggtttcaggggctctgacttgccccctgacccacataactgcggaaagttcgactccactttcatgaacggtgactccgcaagaagcttccccggaaaactggagccaccaaaaagcgagccactgccaacttttaatcaatttagcccgatcagtagcccagagccagaggaccccattaaggataatggatttggcattaagcccaagcactctgacagctactttcctcctccattggggtgtggagccgttgggggacctgtcttggaagcgctggctaaatttccggtgcctgagctgcatatgttcgatcacttctgtaaaaaggaacccaaacccgagccattaccacttggatcccagcaggagcatgaacagagcggacagaataccgtagaaccccacaaagaccctgatgctactaggttctttggggaggccttagaattcaactcccacccatccaactccatcggggaatctaagggtctcgcccgtgaactggggacctgctcatccgtgcccccacgacaacggcttaaacctgcgcacagcaaactgagtagctgtgttgcggctctagtggcactgcaggcgaagagagttgcctccgtcaccaaagaagatcaacccggacataccaaggacctgtctggccctacaaaggaaagttccaaaggaagccctaaaatgccaaagagtcctaaaagtcccagaagcccgctggaggccacacgcaagtctatcaaaccttcagacagtccacgttccatctgctctgattccagttctaagggctcacccagtgtggccgcatctagcccacccgctattcctaaggtcaggataaaaaccatcaaaacaagctctggtgagataaagcggaccgtgactaggattctcccagacccagatgacccctcgaagagccccgtcggatctcccctcggcagcgccatcgcagaggcaccaagtgaaatgccgggagatgaagtaccagtggaggaacactttccagaggcaggcacaaactccggctccccgcagggagcgcgaaaaggagatgaaagcatgacaaaggcctccgactcctcaagcccctcttgttcctccggtcccagagtgcctaagggcgctgcgccagggtcccagacaggcaagaagcaacagagcactgcactgcaggcatctacactcgctccggctaatttgctgccgaaggcagtgcacttagctaacttgaatttagtgccccattccgtagcagctagcgtgaccgccaagagttcagtacagcggagaagccagcctcagctgactcagatgtccgtgcctctcgtgcatcaggtcaaaaaggctgctccattaatcgtggaagtgtttaacaaagtcctgcactcaagtaatcccgtgccgttgtatgctcctaacctctcccctcccgctgatagcagaattcacgtaccagcctccggatattgttgcctggagtgtggtgatgccttcgcgctggagaaatccctgtctcagcattatgggaggcgaagcgtccatatcgaagtcttgtgcaccctctgctcgaagacgttactcttctttaacaagtgttctctcttgagacatgcacgagaccacaaatctaagggcctggtcatgcagtgtagtcaattgttggtaaagccaatctccgccgaccagatgttcgtcagcgccccagtaaacagcactgcccctgccgctcccgcaccgtcttcttcccccaagcacgggctgacgagcgggtcagcttctccacctcctccggcactgcctctatatcccgaccccgttcggttgattaggtactcaattaagtgtctcgagtgccacaagcagatgagagactacatggtgctggccgcacactttcaaagaaccacagaggagactgaggggctgacttgccaagtctgccaaatgctcctgcccaaccagtgtagcttctgcgcgcaccagcgcatccacgcccataagagtccatattgttgtcccgaatgcggagttctgtgccggtctgcatatttccagacacacgtcaaggaaaactgcctccactatgcccgaaaagtcggctatcggtgtattcattgcggggtggtgcacttgaccctagccctgcttaaaagccacatccaagagaggcactgtcaggtgtttcacaagtgtgccttttgccctatggccttcaaaaccgccagcagtaccgcagatcactcagccacgcagcatccaacacaaccccaccggccttctcagttgatttacaaatgctcctgtgagatggtgttcaataaaaagcgtcacatccagcagcacttttaccagaacgtctctaagactcaggtcggagtattcaaatgtcccgaatgcccactgttattcgtccagaagcccgagctgatgcagcatgtgaaaagcacccacggagttcctcgtaatgttgatgaactttcatcacttcagtcttcagctgatacttcgagtagcaggccagggtccagggtgccaactgaacctcctgctacatcggtggccgctcgaagctcttctcttccctctggacgatggggacgaccggaagctcacaggcgggttgaagccagaccgagattaagaaacaccggttggacatgccaggagtgtcaggagtgggtgccagatcgggaatcatatgtctcccacatgaaaaagtcacatggacgcactctgaaaaggtacccatgtcgccagtgtgagcagtctttccatactccaaattcgctgcggaagcacatccggaataatcacgacactgtgaagaagttctacacttgcggatactgcacggaggattctcctagcttcccacgccctagcttgctggagagtcacatatccttgatgcacgggattcggaatcctgatcttagtcagacaagtaaagtcaaacctccgggtggccactctcctcaggttaatcatttgaagcgaccagtgtcgggcgtcggagacgcacctggaacttccaatggcgctacggtcagtagcacgaagcgccataagagtctattccaatgcgcgaaatgttcttttgccacagattccgggcttgagtttcagtcccatatcccgcagcaccaggtggattcatccacagcccagtgcttactgtgcgggttgtgttatacgagtgcctcctcattgagccggcacctgttcatagttcataaggtaagagatcaggaggaagaagaggaggaggaagcggcagccgcagagatggcagtggaagttgccgagcccgaagaagggagtggcgaggaagtgcctatggagacgagagagaatgggctcgaggagtgtgccggtgaacctctgtcggccgacccagaggctagacgccttctgggaccagcaccagaggacgatggcggacacaacgaccacagtcagccccaagcgtcacaagatcaagatagtcataccctttcgccccaggtctag

SEQ ID NO: 181187 - DNA, 3804 bp, Artificial Sequence
  derived and/or modified sequence
atgggggatatgaagacacctgattttgacgacctgctggccgcttttgacatacctgaccctacctcactcgatgccaaagaggcaatccaaaccccttcagaagaaaacgagagtccccttaaacccccaggcatatgcatggacgagagcgtatccttgtcacacagtggcagcgctcctgacgtgcccgctgtgagcgtcatcgtcaaaaataccagccggcaggagagtttcgaagctgaaaaagatcacatcacaccgagcctactgcacaatggctttcggggttcggacctgcctccggatccacacaactgtggcaagttcgactcaaccttcatgaacggggacagcgccaggtctttccctggcaagctcgaaccacccaaatccgagcctctcccaacctttaaccagttctcaccaatttcctctcctgagcctgaggaccccattaaggataacggctttggtatcaaacccaaacactccgattcttatttcccacccccactgggatgcggggctgtaggtggtcctgtactggaggcgctggctaaattccccgtgcctgagctgcacatgtttgatcacttctgtaaaaaagagcccaaacctgagccgctcccactgggcagccagcaggaacatgaacagtccgggcaaaacacagtggagcctcataaggatccagatgctacccggtttttcggagaagccttggagtttaatagccatccctccaatagcattggtgagtctaagggcctcgctcgggagctggggacttgcagtagtgtgcctcctcggcagaggttaaagcctgcacattccaagcttagcagttgcgtggccgctctggtggccttacaggccaaaagagtggctagcgtaaccaaggaggatcagcctggacacaccaaagatctgtccggtcctaccaaggaatccagcaagggctctccaaaaatgccaaagagccctaagtcccctagatcaccactggaggccacgaggaagagcataaagccctcggactctcccagatccatctgctccgactcatcctcaaagggatcaccctctgtggcagctagttctccccctgccatccctaaggtgagaattaaaactatcaagacatcatcaggcgagatcaaaagaaccgtgacccggatcttgccagaccctgatgaccctagcaagtccccagtgggcagccccctcgggagcgcaatcgccgaggcaccctcggagatgcctggcgacgaggtcccagtagaagagcactttcctgaggctgggaccaattctggatccccgcagggagccaggaagggcgacgagagcatgacaaaggcaagcgattcgtcctccccttcttgcagcagtggcccacgtgttcccaaaggagccgcacctggttctcagaccggaaaaaaacagcagtccacagcacttcaggcttctactctcgctcccgcaaatttgctccccaaggctgtgcacctggcaaatttgaacctggtccctcatagtgtagccgcaagtgtgactgcgaaaagttctgtccagcgtagatcccaaccgcaacttacccaaatgagcgtccctctggtgcatcaggtgaagaaggcagcaccattaatcgtcgaggtgtttaataaggtgctgcatagcagtaacccagtgcctttgtacgctccgaatctaagtcctcccgcagatagcagaatacacgtgcccgcttcagggtactgctgcttggaatgcggtgatgcctttgccctggaaaaaagtctgtcccagcactacggacggcgaagcgttcatatcgaagttctttgtacgttatgttccaagacactcctcttcttcaacaaatgttcgcttctacggcatgcacgagatcacaaatcaaaagggctcgtaatgcagtgttcacagctgcttgtgaagcccatctccgcagaccagatgttcgtgtcagcccctgtgaactccactgcccctgctgcaccggcaccgagtagcagcccgaaacatggcctgacgagtgggagcgcttcccctccccctccggctctcccgttataccctgacccagttcgactcattcggtattcaataaagtgcctcgaatgccataaacagatgcgcgactacatggtgctcgctgctcacttccagcgcaccacagaagagactgagggtctaacctgccaggtgtgccagatgctccttcctaaccaatgttccttttgcgcccatcagaggatacacgctcacaagtcaccatactgttgccccgagtgtggagtgttatgcagaagcgcttacttccagactcacgtcaaagaaaactgtctacactacgctaggaaagtcggatacagatgtattcactgtggtgtggtgcatctcacactggcacttctaaagtcacatattcaagagagacactgccaagtatttcacaagtgcgccttttgtccaatggcgttcaagaccgcgagcagcactgctgaccacagcgcaacacagcaccctacccaacctcacaggccctctcagctaatctacaaatgtagttgcgagatggtcttcaacaaaaagaggcacatacaacaacatttctaccaaaacgtcagcaaaacccaggtcggggttttcaagtgccccgagtgccccttgctgttcgtgcagaagccggaattaatgcagcacgtaaaatccactcacggagtgccaaggaacgtggatgagttatccagcctgcagagctccgcagacacaagcagctcccgcccagggtccagagtgccaaccgagcctcccgcaacaagcgttgcagctcggagctcctctttgccgtccggccgatggggtaggccagaagcccatagaagagtggaagcccgaccgagactaaggaatactggatggacctgccaggagtgccaggagtgggttcctgaccgagagagctatgtgtcacacatgaagaaatcacatggccgaacactcaagcgttacccttgccggcagtgtgagcagtcttttcatacccccaactccctcaggaaacatattcgtaataatcacgatacggtaaagaagttctatacctgcggatactgtaccgaggactcaccatctttcccgcgacccagcctcttagagtcgcacatctcactaatgcacggcatccgcaatccagacctgtcccaaaccagcaaagtgaaacccccaggcggacactctccacaggtcaaccatctcaagcggccagtaagcggggtgggcgacgctcctgggacatctaatggagcgaccgtctcgtctactaagcgtcataagagcctgttccagtgcgcgaagtgttcttttgccacagactcaggtcttgagttccagagccacatccctcagcatcaggtcgatagttcaactgctcagtgtctcctgtgcggtctctgttacacttcggcctctagtctttcaaggcatctgtttattgtccacaaagtgcgcgatcaggaagaggaggaggaggaggaagccgcagcagcagagatggcagtcgaggtggcagagccagaagaaggctctggcgaggaggtgccaatggagactagagaaaacggactggaagaatgcgccggagagcccctttcagctgatcctgaggcgagacgcctgcttggccctgccccagaggatgacggaggacacaatgaccattctcagccccaggccagccaggaccaagatagtcacaccctaagcccccaagtgtag

SEQ ID NO: 181188 - DNA, 3804 bp, Artificial Sequence
  derived and/or modified sequence
atgggcgatatgaagactcctgatttcgacgatctgctcgccgccttcgacataccggatccgacgagtcttgacgctaaagaagccatccagacgccttcggaagagaacgagtcgcccctcaaacccccaggtatatgcatggacgaaagcgttagtctatctcactcggggtctgctcccgatgttcccgcagtttctgtcatcgtcaagaacacctcacgccaggagtcttttgaagctgagaaagatcatataacacccagtctcctgcacaacggcttcaggggatcagatctccctcccgaccctcacaattgtggcaagttcgattccacattcatgaatggcgactctgctcgaagctttcctggcaagctggagcctccaaaaagcgagcctttaccgacgttcaatcagtttagcccgatttcatcgccggagcccgaggatcccattaaagataatggatttgggatcaagcccaagcatagtgacagctatttcccccctcccctgggctgcggagctgtgggggggcccgtgttggaggcactggctaagtttccagtcccagagctgcatatgttcgaccatttctgcaagaaggaacctaaaccagagccattgccactcgggtctcagcaagagcacgaacagtccggacagaacacagtggagcctcataaggatcctgacgctactcgttttttcggcgaagcactcgaattcaactcacacccgagcaatagtataggagagtcaaaaggcttagctcgcgaattgggaacctgttcctcagtccctcctcgacagcgacttaagccggcacactccaaactgtcttcatgcgttgcagcattagtagccctgcaggcaaagcgcgtggctagcgttaccaaagaagaccagcccgggcatacaaaagacctcagtgggcccactaaagaatcctccaaagggagtcctaagatgcctaagtctcctaagagccccaggagcccattggaggcaacacgtaaaagcatcaaaccatctgactcaccgagatccatttgcagtgactcaagctccaagggcagcccatctgtggccgcaagctcaccgccggcaattccaaaagtgaggattaaaactatcaagacatcatcaggagagattaaacgaacagtgacccggattctgcctgaccccgacgatccttcaaaaagcccagtgggttctcccctcgggtcggccattgccgaagctccttccgaaatgcccggcgacgaggtcccagtcgaggaacactttcctgaagctggaaccaacagcggcagtccccagggagcacgtaagggggacgagtcaatgactaaggcttctgacagtagttctccttcgtgcagcagtggtccacgggtgccaaagggagccgcacccggctcacagactggtaagaaacagcaatccaccgctctgcaagccagcaccctagcaccagccaatctcctgcccaaggcggtccaccttgccaacctcaatctggttccccattctgtcgctgccagtgtgaccgccaagtcttccgtgcaaagacgcagccaacctcagctgacacaaatgtccgtgccacttgtccatcaggtgaaaaaggcagccccccttattgttgaggtattcaacaaagtgctccattcctctaatccagtgccactctatgcccccaacctttctcctcctgcggattcccgcatacatgttcccgccagtggttactgttgcctcgaatgtggcgatgcctttgcactggagaaatctcttagtcagcactatggtcgcagaagtgtgcatattgaggtgctgtgcactctttgcagcaagacgctcctgttcttcaacaaatgcagcctgcttcggcatgctcgggaccataagagcaagggactcgtcatgcagtgctctcagctcctcgtgaagcccatcagcgccgatcagatgttcgtgtcagctccagtgaatagcactgctccggccgcccccgctcctagctcaagcccaaagcacggcttaacttccggttcagcaagcccccctccacccgcgcttcccttataccccgatccagtgagattaatccgatacagcataaagtgtctggaatgtcacaagcagatgagagactacatggtgctggctgctcactttcagagaactacagaggaaaccgagggacttacctgccaggtctgccaaatgctgctgccgaaccagtgtagcttttgcgcacaccagcgtattcacgctcataagtccccctactgctgccctgagtgcggagttctgtgtcgaagtgcctattttcaaactcatgtcaaggagaattgcctccactatgcacggaaggtgggttatcgatgtattcattgtggtgtggtgcatttgactcttgctcttctgaagtcccacatccaggaacggcactgccaagtcttccataaatgtgccttctgtcctatggccttcaaaaccgccagcagtaccgccgaccattcagctacacagcaccccactcagccgcatcgcccaagccaactgatctacaagtgtagttgcgagatggtctttaataagaagagacatatccaacagcacttctaccaaaatgtgtctaagacacaggtaggcgtgtttaaatgccctgagtgtcctctcttgtttgtccagaagcccgagctgatgcaacacgttaagtccacccacggagttccgcgtaatgtggacgaactatcgtctctgcagagttcagctgatacttcaagcagcagacccggctctcgagtgcctacagagccccctgctacaagcgttgccgcccggtctagttcactgccaagtggacggtggggccggccggaagcccacagaagagtggaagctaggcctagactcaggaacacggggtggacctgccaggagtgccaggaatgggtccccgatcgcgaaagctatgtgtctcacatgaaaaagtctcacggacggacacttaaacgatacccttgccggcaatgtgaacagtcttttcatacacccaatagcctgcgaaagcatataagaaacaatcacgataccgtcaaaaaattctatacttgtgggtactgcaccgaagacagccccagcttcccgcgcccctccctccttgagtcacatattagcctgatgcacggcataagaaacccagacctgtcacagaccagcaaagtaaaaccccctggtggtcattcaccacaggtgaatcatctcaagagaccagtttctggcgttggagacgcgccgggcacatccaacggggccactgtatcttctacaaaaagacataagtctctgtttcagtgtgccaaatgttccttcgctacagactccggccttgagttccagtctcacatcccacagcatcaagttgattctagcactgcccagtgccttttatgcggcctttgttacacttctgccagtagcttatccagacacctattcatcgtgcataaggtccgagatcaggaagaagaagaggaagaagaagcggctgccgcagagatggccgtggaagtggctgagcccgaagaggggagcggggaagaagtgccaatggagacgcgcgagaacggcctggaggagtgtgcaggcgaaccacttagtgccgaccctgaagcccggagactcctcgggcccgctccagaagatgacgggggacacaacgaccacagtcagccccaggcatctcaagaccaggattcccacaccttaagtccccaggtgtag

SEQ ID NO: 181189 - DNA, 3804 bp, Artificial Sequence
  derived and/or modified sequence
atgggcgatatgaaaacacccgactttgacgatttactggctgcttttgacatcccagacccaacttcactagacgctaaagaggcaatacaaacacccagcgaggagaatgagtcaccccttaagccacccggcatttgtatggacgagtccgtgagcctcagccattccggaagcgcaccagatgtgccagcagttagcgtcatcgtcaaaaacacttctagacaggaatcatttgaggccgaaaaagaccatatcacaccatctctcctgcataacggattccgagggtctgatctgccacctgatccacataactgcggcaagttcgactctaccttcatgaatggggactccgcccgatcattccctggaaagctggaacccccgaaatctgaacctctgccaacattcaaccagtttagccctattagctcacctgagcctgaggaccccattaaagataacggctttggcattaaacccaagcatagcgactcttatttcccccccccgttaggctgcggagctgtgggcgggcctgtcctggaggcgttagccaagtttcccgttcccgagcttcacatgttcgaccacttctgcaagaaggaacctaaaccagagccattgccactcgggtctcagcaagagcacgaacagtccggacagaacacagtggagcctcataaggatcctgacgctactcgttttttcggcgaagcactcgaattcaactcacacccgagcaatagtataggagagtcaaaaggcttagctcgcgaattgggaacctgttcctcagtccctcctcgacagcgacttaagccggcacactccaaactgtcttcatgcgttgcagcattagtagccctgcaggcaaagcgcgtggctagcgttaccaaggaggaccaaccaggccacacgaaggacctgagcggacccacaaaggaaagctcaaagggttcaccaaaaatgcccaagagtcctaaatccccccgttcaccactcgaggccacccgcaaatcaattaagccaagcgatagtcccagaagtatctgttctgattcctcctctaagggctcaccatccgtggccgcttcttcccctcccgccatccctaaagtacgtattaaaaccatcaagaccagctctggcgagattaaaagaaccgtgaccagaattctccctgaccccgacgacccctccaaaagtcctgtcgggagtccactgggatccgcaatagctgaagccccatctgaaatgcctggcgacgaagtgcccgtagaggaacacttccccgaggctggtactaacagcggatcaccccaaggagcgcgtaagggcgatgaatctatgaccaaggcctccgactcatctagcccgtcctgttcatccggccccagagtgcctaaaggagccgccccaggctcacagaccggcaagaagcaacagtctacagcactgcaggcctctacactggccccagccaatttgctgcctaaagcggtccatctagccaacctgaatctcgtgccacacagcgttgcagcgagcgtgaccgccaaatcctccgttcaaagaaggtcccagccccagttaacccagatgtctgtgccattagtccaccaggtaaagaaggctgcccccctgattgtggaagtgttcaacaaggtcttgcactcctcaaatccagtacccctatatgcccccaatttatccccccccgccgactctcggatacatgtcccagcctctggttactgttgtctcgagtgcggtgacgcctttgctcttgagaagagtctgtctcagcactatggtcgtcgctctgttcatattgaagttttgtgtactctgtgtagcaaaaccctgttattcttcaacaaatgtagcctgctaagacacgctcgagaccataagtccaaaggccttgtgatgcagtgcagtcagctattagtgaaaccaatcagcgccgatcagatgttcgtgagcgccccggtgaacagtacagccccagccgcaccagccccaagttcaagtccaaaacatgggctcacctcaggtagtgcatctccgccacctcccgcactaccgctatacccagatccagtacgcctaattaggtattcaataaagtgccttgagtgtcacaaacagatgcgcgactacatggtgctagctgctcactttcagaggaccacggaggaaacggagggcctgacatgtcaggtgtgccaaatgctgcttcccaaccagtgctctttctgcgcccaccagagaattcatgcccacaagtccccttactgttgccctgaatgcggtgttctgtgccgctctgcatattttcaaacgcacgtgaaagaaaattgtctgcattacgcccgaaaagtcggctataggtgcatccactgcggcgtagtgcatctcaccctcgcgctgctgaagtcccatatacaagaaaggcactgccaggtctttcacaagtgtgctttttgccccatggccttcaaaaccgctagctctaccgcggaccacagcgccactcagcaccccactcaaccgcatcggccttcccagctcatttacaaatgctcatgcgaaatggtgttcaacaaaaaaagacacatacaacagcacttttaccagaatgtcagtaagactcaggtcggcgtcttcaaatgtcccgagtgtcccctcctgtttgtgcaaaagcctgaattaatgcagcatgtaaagtccacacatggagtacctagaaatgttgacgaacttagcagcctgcaatcatccgccgacacatcctcttctcgtcctgggagtcgggttcccacagaaccaccagccacaagcgtcgcagcaagatctagttcactccctagtgggagatggggacgcccagaggcacaccgccgtgtggaagcacgccctcgacttcgtaatactggttggacctgtcaggaatgtcaggagtgggtgcccgacagggagagttatgtgagtcacatgaagaaaagtcatgggcgtactcttaaacggtacccatgtcgccagtgtgaacagagcttccatacccctaactcactaagaaaacacatcagaaacaatcatgacacagtgaagaaattctacacttgcggatattgtaccgaagactcccccagctttccaagaccttccctactagagtctcacatcagcctcatgcatgggatccggaacccagacctcagccaaacctccaaggttaagcctcccggcgggcactccccacaagtaaatcatcttaagcggcccgtttccggcgtgggtgacgccccaggaacaagtaatggagccaccgtctcaagcacaaaaaggcacaaatcactctttcagtgtgcgaagtgctcctttgccacggattcaggtctggaatttcagtcccacattccccagcatcaggtcgactccagcacggcccaatgtctactctgtggactctgctacacttccgcctcaagcttatcccgtcatttgttcattgttcataaggtacgcgatcaagaagaagaagaagaagaagaggccgctgccgccgaaatggccgtggaagttgctgagcctgaagaaggtagtggcgaggaggtgcccatggaaacgagagaaaatggtttagaagaatgcgctggcgagccgttatcagctgatccggaagcacgacgcctcttaggacccgccccggaggatgatggaggacacaatgatcattcacagccccaggctagtcaggaccaagattcacacacgttgtcacctcaggtttag

SEQ ID NO: 181190 - DNA, 7861 bp, Artificial Sequence
  derived and/or modified sequence
cagcccttgccagcatccagccatgggggatatgaaaaccccagattttgatgaccttctggctgcctttgacatcccagaccccaccagccttgatgccaaggaggccatccagacacccagtgaggagaatgagagtcccctcaaacctccaggcatatgtatggatgaaagtgtgtccttgtctcactcaggatcagcccccgatgtgccggccgtgagtgtcattgtcaagaacaccagccgccaggagtcatttgaagcggagaaagaccacattactcccagtctcctacacaatggattccggggctcagatctgcctccagatccccacaactgtgggaaatttgattctacttttatgaatggagacagtgccaggagtttccctggcaaactggagcctcccaagtcagagccattacccaccttcaaccagttcagtccaatctccagcccagaacctgaggatcccatcaaagataacggatttgggataaagcccaaacactctgacagttatttcccaccccctcttgggtgcggggctgtgggaggcccagtcctggaggctctggctaagtttccggttccagagctgcatatgtttgatcatttttgtaagaaagaacccaagccagaacccctgcccttggggagccagcaggaacacgagcaaagtgggcagaacacagtggaacctcacaaggatccggatgccactcgattcttcggggaagctttggagttcaacagccatcctagcaacagtattggagagtccaaggggcttgcccgggagcttggtacctgctcatcagtcccccctaggcagcgtctaaagccagctcattccaagctgtcctcttgtgtggcagccttggtggccttgcaggccaaaagagtggctagtgtcactaaggaggatcagcctggccacacaaaggatctctcagggcccactaaagagagttctaaaggtagccccaaaatgcccaagtcaccaaagagtccccggagccctctggaggccactagaaaaagtatcaagccatcggacagccctcgtagcatctgcagtgacagcagcagcaaaggctcaccgtctgtggctgccagctccccaccagcaattcccaaagtgagaatcaaaaccattaagacatcatcaggggaaatcaaacggactgtcacaaggatcctgccagatcctgatgatccaagtaagtcccctgttgggtcacctctagggagcgccattgcagaggcccccagcgagatgccaggggatgaggtgcctgtggaagagcactttcctgaggcaggcacaaattcagggagcccccagggggccaggaaaggggacgagagcatgacaaaggccagtgactcgtcatctcccagctgcagttctgggccccgggtcccaaagggggctgccccaggctcacagacaggcaagaagcaacagagcacagcactgcaggcatccaccctggcccctgccaacctcctgcccaaagccgtgcacttggccaacctgaacctcgtcccccacagtgttgctgcatcagtgacagccaagtcttcagtgcaaagacggagccagccacagcttacacaaatgtcggtgcccctggtccaccaggtgaaaaaggctgccccactgattgtagaggtcttcaacaaggtccttcacagctccaaccccgtgcccctctatgcgccaaatctcagcccgcctgcggacagcaggatccacgtgccggccagtgggtactgctgcctggagtgtggagacgcatttgccttagagaagagcctgagccagcactatggccggcggagcgtccacattgaggtactgtgcacactgtgctccaagacgctgctcttcttcaacaagtgcagcctgctccggcacgcccgtgaccacaagagcaaggggctcgtcatgcagtgttcccagctgctggtgaagcctatctctgcggaccaaatgttcgtgtcggcccctgtgaactccacggcaccagcagccccagccccttcatcctctcccaaacatggcctcacttcgggcagtgccagtccccctcctccagccttgccactctacccagaccctgtgaggctcatccggtactcaatcaagtgtcttgaatgtcacaagcagatgcgggactacatggtcctggctgcacatttccagaggacaacagaggagacagaggggctgacctgccaggtatgccaaatgctgctgcccaaccagtgcagtttctgtgcccaccagcggattcatgcacacaagtccccctactgctgcccggagtgtggggtcctctgccgctctgcctacttccagacccatgtaaaggagaattgcctgcactatgcccgcaaggtgggctacaggtgcatccactgtggtgtcgtccacctgaccttggccttgctgaaaagccacatccaggagcgacactgccaggttttccacaaatgtgcattctgccccatggccttcaagactgccagcagcactgcagaccacagtgccacccagcaccccacccagccccacagaccctcccagctcatttataagtgctcctgtgaaatggtcttcaacaagaagaggcacattcagcagcatttttaccagaatgtcagcaagacgcaggtgggcgtcttcaagtgccctgagtgcccactcttgttcgtgcagaagccggagttgatgcaacacgtcaagagcacccacggtgttccccgaaatgtggacgagctgtcaagcctccagtcttcagcggacacatcctcaagccgccctggctctcgagttcccactgagccaccagccactagtgtggctgctcggagcagctccctgccttctggccgctggggtaggcctgaagcccaccgcagggtggaagccaggccgcggctgaggaacactggctggacctgccaggagtgccaggagtgggttccagatcgggagagctacgtgtcccacatgaaaaagagccacggtcggacattgaagcggtacccatgccggcagtgtgaacagtccttccacacccccaacagcctgcgcaaacacatccgcaacaaccatgacacagtaaagaagttctacacctgcgggtactgcacagaggacagccccagctttcctcggccctcccttctggagagccacatcagccttatgcatggcatcagaaaccctgatttgagccagacgtccaaagtgaaacctccgggtggacattcccctcaggtgaaccatctgaaaagaccagtcagtggagtgggggacgctccaggcaccagcaatggcgcaactgtctcttccaccaaaaggcacaagtccctttttcagtgcgcgaaatgtagttttgccacagactcggggctcgagtttcagagccacatacctcagcaccaggtggacagctccacagcccaatgtctcctctgtggtttgtgctacacctctgccagctccctcagccgccacctcttcattgtccacaaggtgagagaccaggaggaggaggaggaagaggaggcggcggcagcggagatggcagtggaggtggcagagccagaggagggctccggggaggaggtgcccatggagactagagagaatggactggaagaatgtgccggtgagcctttgtcagctgacccagaggcgaggagattgctgggcccggcccctgaggacgatggtggccacaatgatcacagtcaaccacaggcctctcaggaccaggacagccacacactgtcccctcaggtgtgaccggagactttgcagtgtgcatggtcaggggtggtgccgaagtgtcttccacctgccctgcggaccgtggaaaataaaaggctctgcccccagtgtgagtgtgaccggttgtaccctggagtagtgtctgccctgagctgccagtgctgggtatcccccagccccaggaaatgtggggtcggccaggaccctcacagctctgaatttgcttctgttatttatggcttttcgctgcttcttggtgccccatctcttgtctgtgtccttccaaccccaagctgcttatgtggcccaaccccactgctgtcaactaggcttgaaccccacagcggctgtgctcttctgggaggttcccgcttgctgccttcagccagggcgctcctcagagctctattttcctgcagacaccagctctccttcctgcctttagatcctgagaaggagggaaatgaggggtgctgacacagtccctctgggagagctctgcctagtctggtttggcgagggcccttgatcaccttgcccctcctccctgtcttctctgattcttttccctcaaaatagtcctgagaactaattgtcacactggctcatcatgtctctgtgggtggggtgggagaaacctctgctgcacacctctgtttggaacctgggcagagcaggaggtaaggcaaaggcaggcaggcaccaagaaccagaccccttgagaaggcgctgtgggtgggtctttgttctgctgttctgcctttcctgacaggtggggttggggcacacagacattggaatatttgtactgctctcgtgccatttgagaggctgctgccccaggcaggccagcccctactcctcttggctacactcatgttgctcagactatatttcaaataaaaaatcttctcaccatgcaggtaggctcttgtattcctctccaagtgagcctggccccaccctattccacccaagggtctttcccagacttcccctgtttgtcccatctctgagggagaacaatacttcctactgtctaaggaaggccttctctagattctggagcttgtggttaggaaaccgggagccctgtactacttagttctctagagaccttctgaaggggtgaggggagcggctccacaatggtcaagtcacctccaagatctccaggctagtgacattggctttagggcgtatcgaaattttctaggcaccttcatctttccttcagttgattttcaacataagagaaccccttactggtaaaaagggaaaagggggtggagaagaggaattttataattttcttatagcattcaagaggtttcttatttcttacagcatcgctactgccacagagaactcaaatgtggcagaactgggattagacttgggagactggctgtcttttcactgatggtggagtcagggcccacccaagcacgaggagcaggctgtgtggaggtgtcgtctgacctctaacccaggtggcatggggttgcgcccagcaggatgtagtggagtaaagggaagagggtgctggccgggtgcttagaggtcatctttcaaggaggcattaaatatcaattataaattattaagtcagataaatatgcctgaccttttcacagttgaaaaaatacattttttcccctctatcaaatgccaagtttttagtggaaatgctaatggcagtgggaaaggttgcctcactttcagagagactctcgctgtctgcacccttttaataattgctcttcctggcaaggctgccacttccctgcctccccagctggcagtggggcaacccaggcctgtttccagctacctgcaaagccagacctagacctgccgtagctgttgtcccatgcctaattctagttacaggaagccatccctgtaccctgggtccattcacaggaatgggttccagaggaggctgatagaagggtttgaaatgactggctggatcccttcctgctcagacacagtggtagctggagagcaggcagagatggtagaattgcaggtttgaccacctgtcgtgaccccagatatacatctccttcctgggaagaacgtgagttggaaaaatgctgagccagtccctggaaaacctgggtcctggcctggattctgtccttagccagctcttaacaaatcccttaacctcactgtctcctctccttcacaatagagttagtaattcccatccaactggcttcacaggcttttgtgagcttatgaatgtgaaagtattttctagtttataaaacactatatgaatgtggggaaatctttacttgaccttagggcatggagggtggagcacattttgtctgctgtttggacttggatgctgattagcagttatgaagtggcccagacacctagccattctttagtaagagtgaagatagcattttaagccctccttgtgtgcctagcatcttactgaacactttctggtgattctctcctttaatcctcacaaagatctcacagttgtcctccattttacggagaagaaaccgaggctccgagaggttaaacgatgtgcagaggctacctgtagtgatggtgctgagtcaagcctgtcaaccactgtgctcgttagtgaccaaggctgctttgacaggctgccagcttgtcagtggtttgcagccccccagacatttgctttcctacttcccatgcagttggggtgccctgccaagtgccaggttctctttggagtccatctgtgccttgtcaccccaaggagggcctcgagcatcacaccgttgacatttcgaaacgtggtatctctacaacctttcattctcattgggatttaccttgccatttgaacaccatcattttttgaggactgtctagaaaaggttgcctaaccctcacagggaacacacagttccctcagagtccagcatcttctggtcttttctttttcaagatttttttaaatggttgtgctatcatttgtcatcatcagaaaatgcttgctgtaacaagcgtttatctgcacattatgctgcagtgaatgctctactgatcaagttaaacagataagatcccttcccttgtagaaactacaacttaatacagtctaagacttgacaaattacttagtatttattttccaactgctttatctctgtaaaatgatatgctgaattattataagctaattgttgtagaaagaactttccccttaacttatgtaaacagtctggttttaaaaaatttgataattgtggcccagtaagctcaacactttgccttccccaagactggggaacctctgtcctgttcaccactgtatattcagcaccaggcagtttctttttttgtttgtttgtttttttgttttgaaaaattaatacatatacatggtaagacattccacaatacaaaagggtatacaataaatggtaagcttccccatggaggtcagcctctagtcccctctccagagttaatcactgttatctatatgttgtgtatcctttcatagcaattctatgcatttacaagtttataaatatgtatatttatatatctatttttaatacaaatagtagaattctatacacagtgttctgaagcttgctttcttatatagtattttggagattattccaaattcatacattgggtcagagtaattctttaaaagttccttgcatataacagtgattcaaaaagtatatggatgaatgagtgaatgctgcatgaatgaatgaatctgattcaattggtagctacagctgttctctcagggtctgatctgaccaagacagcaccttctagattctagaatgtgtcctcctgactaaggggttcaggatactgttcaccttctccaacagatgccaccggagccttaggaactgggcacaggaagccttgggcccctggaggaaaaagttgagactaggacgcaggtcccaagtatgggatttttttgggttcctacttaaaatgcttttttctttattggaaaatgatgtaacattttagagaaattaaaaagcacacatattt

SEQ ID NO: 181191 - DNA, 5951 bp, Artificial Sequence
  derived and/or modified sequence
ctggcctgcagtcgccgccgccgccgccaggtggtgtttggactctagaccatgtgcctaggtagaagtttttcctttctccgcagctctgctcccctagcaacgctcgccacacccttgttttgagatcctctctaaggagcggagagtttaataggcaagaaggaagggagaagacagaaggaagacgctcccccgtacggagacagagggagggggggctccaaagccgaaagaggaggtccctacctgccacggataccagtcagcccttgccagcatccagccatgggggatatgaaaaccccagattttgatgaccttctggctgcctttgacatcccagaccccaccagccttgatgccaaggaggccatccagacacccagtgaggagaatgagagtcccctcaaacctccaggcatatgtatggatgaaagtgtgtccttgtctcactcaggatcagcccccgatgtgccggccgtgagtgtcattgtcaagaacaccagccgccaggagtcatttgaagcggagaaagaccacattactcccagtctcctacacaatggattccggggctcagatctgcctccagatccccacaactgtgggaaatttgattctacttttatgaatggagacagtgccaggagtttccctggcaaactggagcctcccaagtcagagccattacccaccttcaaccagttcagtccaatctccagcccagaacctgaggatcccatcaaagataacggatttgggataaagcccaaacactctgacagttatttcccaccccctcttgggtgcggggctgtgggaggcccagtcctggaggctctggctaagtttccggttccagagctgcatatgtttgatcatttttgtaagaaagaacccaagccagaacccctgcccttggggagccagcaggaacacgagcaaagtgggcagaacacagtggaacctcacaaggatccggatgccactcgattcttcggggaagctttggagttcaacagccatcctagcaacagtattggagagtccaaggggcttgcccgggagcttggtacctgctcatcagtcccccctaggcagcgtctaaagccagctcattccaagctgtcctcttgtgtggcagccttggtggccttgcaggccaaaagagtggctagtgtcactaaggaggatcagcctggccacacaaaggatctctcagggcccactaaagagagttctaaaggtagccccaaaatgcccaagtcaccaaagagtccccggagccctctggaggccactagaaaaagtatcaagccatcggacagccctcgtagcatctgcagtgacagcagcagcaaaggctcaccgtctgtggctgccagctccccaccagcaattcccaaagtgagaatcaaaaccattaagacatcatcaggggaaatcaaacggactgtcacaaggatcctgccagatcctgatgatccaagtaagtcccctgttgggtcacctctagggagcgccattgcagaggcccccagcgagatgccaggggatgaggtgcctgtggaagagcactttcctgaggcaggcacaaattcagggagcccccagggggccaggaaaggggacgagagcatgacaaaggccagtgactcgtcatctcccagctgcagttctgggccccgggtcccaaagggggctgccccaggctcacagacaggcaagaagcaacagagcacagcactgcaggcatccaccctggcccctgccaacctcctgcccaaagccgtgcacttggccaacctgaacctcgtcccccacagtgttgctgcatcagtgacagccaagtcttcagtgcaaagacggagccagccacagcttacacaaatgtcggtgcccctggtccaccaggtgaaaaaggctgccccactgattgtagaggtcttcaacaaggtccttcacagctccaaccccgtgcccctctatgcgccaaatctcagcccgcctgcggacagcaggatccacgtgccggccagtgggtactgctgcctggagtgtggagacgcatttgccttagagaagagcctgagccagcactatggccggcggagcgtccacattgaggtactgtgcacactgtgctccaagacgctgctcttcttcaacaagtgcagcctgctccggcacgcccgtgaccacaagagcaaggggctcgtcatgcagtgttcccagctgctggtgaagcctatctctgcggaccaaatgttcgtgtcggcccctgtgaactccacggcaccagcagccccagccccttcatcctctcccaaacatggcctcacttcgggcagtgccagtccccctcctccagccttgccactctacccagaccctgtgaggctcatccggtactcaatcaagtgtcttgaatgtcacaagcagatgcgggactacatggtcctggctgcacatttccagaggacaacagaggagacagaggggctgacctgccaggtatgccaaatgctgctgcccaaccagtgcagtttctgtgcccaccagcggattcatgcacacaagtccccctactgctgcccggagtgtggggtcctctgccgctctgcctacttccagacccatgtaaaggagaattgcctgcactatgcccgcaaggtgggctacaggtgcatccactgtggtgtcgtccacctgaccttggccttgctgaaaagccacatccaggagcgacactgccaggttttccacaaatgtgcattctgccccatggccttcaagactgccagcagcactgcagaccacagtgccacccagcaccccacccagccccacagaccctcccagctcatttataagtgctcctgtgaaatggtcttcaacaagaagaggcacattcagcagcatttttaccagaatgtcagcaagacgcaggtgggcgtcttcaagtgccctgagtgcccactcttgttcgtgcagaagccggagttgatgcaacacgtcaagagcacccacggtgttccccgaaatgtggacgagctgtcaagcctccagtcttcagcggacacatcctcaagccgccctggctctcgagttcccactgagccaccagccactagtgtggctgctcggagcagctccctgccttctggccgctggggtaggcctgaagcccaccgcagggtggaagccaggccgcggctgaggaacactggctggacctgccaggagtgccaggagtgggttccagatcgggagagctacgtgtcccacatgaaaaagagccacggtcggacattgaagcggtacccatgccggcagtgtgaacagtccttccacacccccaacagcctgcgcaaacacatccgcaacaaccatgacacagtaaagaagttctacacctgcgggtactgcacagaggacagccccagctttcctcggccctcccttctggagagccacatcagccttatgcatggcatcagaaaccctgatttgagccagacgtccaaagtgaaacctccgggtggacattcccctcaggtgaaccatctgaaaagaccagtcagtggagtgggggacgctccaggcaccagcaatggcgcaactgtctcttccaccaaaaggcacaagtccctttttcagtgcgcgaaatgtagttttgccacagactcggggctcgagtttcagagccacatacctcagcaccaggtggacagctccacagcccaatgtctcctctgtggtttgtgctacacctctgccagctccctcagccgccacctcttcattgtccacaaggtgagagaccaggaggaggaggaggaagaggaggcggcggcagcggagatggcagtggaggtggcagagccagaggagggctccggggaggaggtgcccatggagactagagagaatggactggaagaatgtgccggtgagcctttgtcagctgacccagaggcgaggagattgctgggcccggcccctgaggacgatggtggccacaatgatcacagtcaaccacaggcctctcaggaccaggacagccacacactgtcccctcaggtgtgaccggagactttgcagtgtgcatggtcaggggtggtgccgaagtgtcttccacctgccctgcggaccgtggaaaataaaaggctctgcccccagtgtgagtgtgaccggttgtaccctggagtagtgtctgccctgagctgccagtgctgggtatcccccagccccaggaaatgtggggtcggccaggaccctcacagctctgaatttgcttctgttatttatggcttttcgctgcttcttggtgccccatctcttgtctgtgtccttccaaccccaagctgcttatgtggcccaaccccactgctgtcaactaggcttgaaccccacagcggctgtgctcttctgggaggttcccgcttgctgccttcagccagggcgctcctcagagctctattttcctgcagacaccagctctccttcctgcctttagatcctgagaaggagggaaatgaggggtgctgacacagtccctctgggagagctctgcctagtctggtttggcgagggcccttgatcaccttgcccctcctccctgtcttctctgattcttttccctcaaaatagtcctgagaactaattgtcacactggctcatcatgtctctgtgggtggggtgggagaaacctctgctgcacacctctgtttggaacctgggcagagcaggaggtaaggcaaaggcaggcaggcaccaagaaccagaccccttgagaaggcgctgtgggtgggtctttgttctgctgttctgcctttcctgacaggtggggttggggcacacagacattggaatatttgtactgctctcgtgccatttgagaggctgctgccccaggcaggccagcccctactcctcttggctacactcatgttgctcagactatatttcaaataaaaaatcttctcaccatgcaggtaggctcttgtattcctctccaagtgagcctggccccaccctattccacccaagggtctttcccagacttcccctgtttgtcccatctctgagggagaacaatacttcctactgtctaaggaaggccttctctagattctggagcttgtggttaggaaaccgggagccctgtactacttagttctctagagaccttctgaaggggtgaggggagcggctccacaatggtcaagtcacctccaagatctccaggctagtgacattggctttagggcgtatcgaaattttctaggcaccttcatctttccttcagttgattttcaacataagagaaccccttactggtaaaaagggaaaagggggtggagaagaggaattttataattttcttatagcattcaagaggtttcttatttcttacagcatcgctactgccacagagaactcaaatgtggcagaactgggattagacttgggagactggctgtcttttcactgatggtggagtcagggcccacccaagcacgaggagcaggctgtgtggaggtgtcgtctgacctctaacccaggtggcatggggttgcgcccagcaggatgtagtggagtaaagggaagagggtgctggccgggtgcttagaggtcatctttcaaggaggcattaaatatcaattataaattattaagtcagataaatatgcctgaccttttcacagttgaaaaaatacattttttcccctctatcaaatgccaagtttttagtggaaatgctaatggcagtgggaaaggttgcctcactttcagagagactctcgctgtctgcacccttttaataattgctcttcctggcaaggctgccacttccctgcctccccagctggcagtggggcaacccaggcctgtttccagctacctgcaaagccagacctagacctgccgtagctgttgtccca

SEQ ID NO: 181192 - protein, 940 aa, Artificial Sequence
  derived and/or modified sequence
MILEQYVVVSNYKKQENSELSLQAGEVVDVIEKNESGWWFVSTSEEQGWVPATYLEAQNGTRDDSDINTSKTGEEEKYVTVQPYTSQSKDEIGFEKGVTVEVIRKNLEGWWYIRYLGKEGWAPASYLKKAKDDLPTRKKNLAGPVEIIGNIMEISNLLNKKASGDKETPPAEGEGHEAPIAKKEISLPILCNASNGSAVGVPDRTVSRLAQGSPAVARIAPQRAQISSPNLRTRPPPRRESSLGFQLPKPPEPPSVEVEYYTIAEFQSCISDGISFRGGQKAEVIDKNSGGWWYVQIGEKEGWAPASYIDKRKKPNLSRRTSTLTRPKVPPPAPPSKPKEAEEGPTGASESQDSPRKLKYEEPEYDIPAFGFDSEPELSEEPVEDRASGERRPAQPHRPSPASSLQRARFKVGESSEDVALEEETIYENEGFRPYAEDTLSARGSSGDSDSPGSSSLSLTRKNSPKSGSPKSSSLLKLKAEKNAQAEMGKNHSSASFSSSITINTTCCSSSSSSSSSLSKTSGDLKPRSASDAGIRGTPKVRAKKDADANAGLTSCPRAKPSVRPKPFLNRAESQSQEKMDISTLRRQLRPTGQLRGGLKGSKSEDSELPPQTASEAPSEGSRRSSSDLITLPATTPPCPTKKEWEGPATSYMTCSAYQKVQDSEISFPAGVEVQVLEKQESGWWYVRFGELEGWAPSHYLVLDENEQPDPSGKELDTVPAKGRQNEGKSDSLEKIERRVQALNTVNQSKKATPPIPSKPPGGFGKTSGTPAVKMRNGVRQVAVRPQSVFVSPPPKDNNLSCALRRNESLTATDGLRGVRRNSSFSTARSAAAEAKGRLAERAASQGSDSPLLPAQRNSIPVSPVRPKPIEKSQFIHNNLKDVYVSIADYEGDEETAGFQEGVSMEVLERNPNGWWYCQILDGVKPFKGWVPSNYLEKKN

SEQ ID NO: 181193 - protein, 1105 aa, Artificial Sequence
  derived and/or modified sequence
MLAYCVQDATVVDVEKRRNPSKHYVYIINVTWSDSTSQTIYRRYSKFFDLQMQLLDKFPIEGGQKDPKQRIIPFLPGKILFRRSHIRDVAVKRLKPIDEYCRALVRLPPHISQCDEVFRFFEARPEDVNPPKEDYGSSKRKSVWLSSWAESPKKDVTGADATAEPMILEQYVVVSNYKKQENSELSLQAGEVVDVIEKNESGWWFVSTSEEQGWVPATYLEAQNGTRDDSDINTSKTGEEEKYVTVQPYTSQSKDEIGFEKGVTVEVIRKNLEGWWYIRYLGKEGWAPASYLKKAKDDLPTRKKNLAGPVEIIGNIMEISNLLNKKASGDKETPPAEGEGHEAPIAKKEISLPILCNASNGSAVGVPDRTVSRLAQGSPAVARIAPQRAQISSPNLRTRPPPRRESSLGFQLPKPPEPPSVEVEYYTIAEFQSCISDGISFRGGQKAEVIDKNSGGWWYVQIGEKEGWAPASYIDKRKKPNLSRRTSTLTRPKVPPPAPPSKPKEAEEGPTGASESQDSPRKLKYEEPEYDIPAFGFDSEPELSEEPVEDRASGERRPAQPHRPSPASSLQRARFKVGESSEDVALEEETIYENEGFRPYAEDTLSARGSSGDSDSPGSSSLSLTRKNSPKSGSPKSSSLLKLKAEKNAQAEMGKNHSSASFSSSITINTTCCSSSSSSSSSLSKTSGDLKPRSASDAGIRGTPKVRAKKDADANAGLTSCPRAKPSVRPKPFLNRAESQSQEKMDISTLRRQLRPTGQLRGGLKGSKSEDSELPPQTASEAPSEGSRRSSSDLITLPATTPPCPTKKEWEGPATSYMTCSAYQKVQDSEISFPAGVEVQVLEKQESGWWYVRFGELEGWAPSHYLVLDENEQPDPSGKELDTVPAKGRQNEGKSDSLEKIERRVQALNTVNQSKKATPPIPSKPPGGFGKTSGTPAVKMRNGVRQVAVRPQSVFVSPPPKDNNLSCALRRNESLTATDGLRGVRRNSSFSTARSAAAEAKGRLAERAASQGSDSPLLPAQRNSIPVSPVRPKPIEKSQFIHNNLKDVYVSIADYEGDEETAGFQEGVSMEVLERNPNGWWYCQILDGVKPFKGWVPSNYLEKKN

SEQ ID NO: 181194 - protein, 1060 aa, Artificial Sequence
  derived and/or modified sequence
  misc_feature (1)..(1): Xaa can be any naturally occurring amino acid
XFFDLQMQLLDKFPIEGGQKDPKQRIIPFLPGKILFRRSHIRDVAVKRLKPIDEYCRALVRLPPHISQCDEVFRFFEARPEDVNPPKEDYGSSKRKSVWLSSWAESPKKDVTGADATAEPMILEQYVVVSNYKKQENSELSLQAGEVVDVIEKNESGWWFVSTSEEQGWVPATYLEAQNGTRDDSDINTSKTGEEEKYVTVQPYTSQSKDEIGFEKGVTVEVIRKNLEGWWYIRYLGKEGWAPASYLKKAKDDLPTRKKNLAGPVEIIGNIMEISNLLNKKASGDKETPPAEGEGHEAPIAKKEISLPILCNASNGSAVGVPDRTVSRLAQGSPAVARIAPQRAQISSPNLRTRPPPRRESSLGFQLPKPPEPPSVEVEYYTIAEFQSCISDGISFRGGQKAEVIDKNSGGWWYVQIGEKEGWAPASYIDKRKKPNLSRRTSTLTRPKVPPPAPPSKPKEAEEGPTGASESQDSPRKLKYEEPEYDIPAFGFDSEPELSEEPVEDRASGERRPAQPHRPSPASSLQRARFKVGESSEDVALEEETIYENEGFRPYAEDTLSARGSSGDSDSPGSSSLSLTRKNSPKSGSPKSSSLLKLKAEKNAQAEMGKNHSSASFSSSITINTTCCSSSSSSSSSLSKTSGDLKPRSASDAGIRGTPKVRAKKDADANAGLTSCPRAKPSVRPKPFLNRAESQSQEKMDISTLRRQLRPTGQLRGGLKGSKSEDSELPPQTASEAPSEGSRRSSSDLITLPATTPPCPTKKEWEGPATSYMTCSAYQKVQDSEISFPAGVEVQVLEKQESGWWYVRFGELEGWAPSHYLVLDENEQPDPSGKELDTVPAKGRQNEGKSDSLEKIERRVQALNTVNQSKKATPPIPSKPPGGFGKTSGTPAVKMRNGVRQVAVRPQSVFVSPPPKDNNLSCALRRNESLTATDGLRGVRRNSSFSTARSAAAEAKGRLAERAASQGSDSPLLPAQRNSIPVSPVRPKPIEKSQFIHNNLKDVYVSIADYEGDEETAGFQEGVSMEVLERNPNGWWYCQILDGVKPFKGWVPSNYLEKKN

SEQ ID NO: 181195 - DNA, 2823 bp, Artificial Sequence
  derived and/or modified sequence
atgatcctggagcagtacgtggtggtgagcaactacaagaagcaggagaacagcgagctgagcctgcaggccggcgaggtggtggacgtgatcgagaagaacgagagcggctggtggttcgtgagcaccagcgaggagcagggctgggtgcccgccacctacctggaggcccagaacggcaccagagacgacagcgacatcaacaccagcaagaccggcgaggaggagaagtacgtgaccgtgcagccctacaccagccagagcaaggacgagatcggcttcgagaagggcgtgaccgtggaggtgatcagaaagaacctggagggctggtggtacatcagatacctgggcaaggagggctgggcccccgccagctacctgaagaaggccaaggacgacctgcccaccagaaagaagaacctggccggccccgtggagatcatcggcaacatcatggagatcagcaacctgctgaacaagaaggccagcggcgacaaggagaccccccccgccgagggcgagggccacgaggcccccatcgccaagaaggagatcagcctgcccatcctgtgcaacgccagcaacggcagcgccgtgggcgtgcccgacagaaccgtgagcagactggcccagggcagccccgccgtggccagaatcgccccccagagagcccagatcagcagccccaacctgagaaccagacccccccccagaagagagagcagcctgggcttccagctgcccaagccccccgagccccccagcgtggaggtggagtactacaccatcgccgagttccagagctgcatcagcgacggcatcagcttcagaggcggccagaaggccgaggtgatcgacaagaacagcggcggctggtggtacgtgcagatcggcgagaaggagggctgggcccccgccagctacatcgacaagagaaagaagcccaacctgagcagaagaaccagcaccctgaccagacccaaggtgcccccccccgccccccccagcaagcccaaggaggccgaggagggccccaccggcgccagcgagagccaggacagccccagaaagctgaagtacgaggagcccgagtacgacatccccgccttcggcttcgacagcgagcccgagctgagcgaggagcccgtggaggacagagccagcggcgagagaagacccgcccagccccacagacccagccccgccagcagcctgcagagagccagattcaaggtgggcgagagcagcgaggacgtggccctggaggaggagaccatctacgagaacgagggcttcagaccctacgccgaggacaccctgagcgccagaggcagcagcggcgacagcgacagccccggcagcagcagcctgagcctgaccagaaagaacagccccaagagcggcagccccaagagcagcagcctgctgaagctgaaggccgagaagaacgcccaggccgagatgggcaagaaccacagcagcgccagcttcagcagcagcatcaccatcaacaccacctgctgcagcagcagcagcagcagcagcagcagcctgagcaagaccagcggcgacctgaagcccagaagcgccagcgacgccggcatcagaggcacccccaaggtgagagccaagaaggacgccgacgccaacgccggcctgaccagctgccccagagccaagcccagcgtgagacccaagcccttcctgaacagagccgagagccagagccaggagaagatggacatcagcaccctgagaagacagctgagacccaccggccagctgagaggcggcctgaagggcagcaagagcgaggacagcgagctgcccccccagaccgccagcgaggcccccagcgagggcagcagaagaagcagcagcgacctgatcaccctgcccgccaccacccccccctgccccaccaagaaggagtgggagggccccgccaccagctacatgacctgcagcgcctaccagaaggtgcaggacagcgagatcagcttccccgccggcgtggaggtgcaggtgctggagaagcaggagagcggctggtggtacgtgagattcggcgagctggagggctgggcccccagccactacctggtgctggacgagaacgagcagcccgaccccagcggcaaggagctggacaccgtgcccgccaagggcagacagaacgagggcaagagcgacagcctggagaagatcgagagaagagtgcaggccctgaacaccgtgaaccagagcaagaaggccaccccccccatccccagcaagccccccggcggcttcggcaagaccagcggcacccccgccgtgaagatgagaaacggcgtgagacaggtggccgtgagaccccagagcgtgttcgtgagccccccccccaaggacaacaacctgagctgcgccctgagaagaaacgagagcctgaccgccaccgacggcctgagaggcgtgagaagaaacagcagcttcagcaccgccagaagcgccgccgccgaggccaagggcagactggccgagagagccgccagccagggcagcgacagccccctgctgcccgcccagagaaacagcatccccgtgagccccgtgagacccaagcccatcgagaagagccagttcatccacaacaacctgaaggacgtgtacgtgagcatcgccgactacgagggcgacgaggagaccgccggcttccaggagggcgtgagcatggaggtgctggagagaaaccccaacggctggtggtactgccagatcctggacggcgtgaagcccttcaagggctgggtgcccagcaactacctggagaagaagaactag

SEQ ID NO: 181196 - DNA, 3318 bp, Artificial Sequence
  derived and/or modified sequence
atgctggcctactgcgtgcaggacgccaccgtggtggacgtggagaagagaagaaaccccagcaagcactacgtgtacatcatcaacgtgacctggagcgacagcaccagccagaccatctacagaagatacagcaagttcttcgacctgcagatgcagctgctggacaagttccccatcgagggcggccagaaggaccccaagcagagaatcatccccttcctgcccggcaagatcctgttcagaagaagccacatcagagacgtggccgtgaagagactgaagcccatcgacgagtactgcagagccctggtgagactgcccccccacatcagccagtgcgacgaggtgttcagattcttcgaggccagacccgaggacgtgaacccccccaaggaggactacggcagcagcaagagaaagagcgtgtggctgagcagctgggccgagagccccaagaaggacgtgaccggcgccgacgccaccgccgagcccatgatcctggagcagtacgtggtggtgagcaactacaagaagcaggagaacagcgagctgagcctgcaggccggcgaggtggtggacgtgatcgagaagaacgagagcggctggtggttcgtgagcaccagcgaggagcagggctgggtgcccgccacctacctggaggcccagaacggcaccagagacgacagcgacatcaacaccagcaagaccggcgaggaggagaagtacgtgaccgtgcagccctacaccagccagagcaaggacgagatcggcttcgagaagggcgtgaccgtggaggtgatcagaaagaacctggagggctggtggtacatcagatacctgggcaaggagggctgggcccccgccagctacctgaagaaggccaaggacgacctgcccaccagaaagaagaacctggccggccccgtggagatcatcggcaacatcatggagatcagcaacctgctgaacaagaaggccagcggcgacaaggagaccccccccgccgagggcgagggccacgaggcccccatcgccaagaaggagatcagcctgcccatcctgtgcaacgccagcaacggcagcgccgtgggcgtgcccgacagaaccgtgagcagactggcccagggcagccccgccgtggccagaatcgccccccagagagcccagatcagcagccccaacctgagaaccagacccccccccagaagagagagcagcctgggcttccagctgcccaagccccccgagccccccagcgtggaggtggagtactacaccatcgccgagttccagagctgcatcagcgacggcatcagcttcagaggcggccagaaggccgaggtgatcgacaagaacagcggcggctggtggtacgtgcagatcggcgagaaggagggctgggcccccgccagctacatcgacaagagaaagaagcccaacctgagcagaagaaccagcaccctgaccagacccaaggtgcccccccccgccccccccagcaagcccaaggaggccgaggagggccccaccggcgccagcgagagccaggacagccccagaaagctgaagtacgaggagcccgagtacgacatccccgccttcggcttcgacagcgagcccgagctgagcgaggagcccgtggaggacagagccagcggcgagagaagacccgcccagccccacagacccagccccgccagcagcctgcagagagccagattcaaggtgggcgagagcagcgaggacgtggccctggaggaggagaccatctacgagaacgagggcttcagaccctacgccgaggacaccctgagcgccagaggcagcagcggcgacagcgacagccccggcagcagcagcctgagcctgaccagaaagaacagccccaagagcggcagccccaagagcagcagcctgctgaagctgaaggccgagaagaacgcccaggccgagatgggcaagaaccacagcagcgccagcttcagcagcagcatcaccatcaacaccacctgctgcagcagcagcagcagcagcagcagcagcctgagcaagaccagcggcgacctgaagcccagaagcgccagcgacgccggcatcagaggcacccccaaggtgagagccaagaaggacgccgacgccaacgccggcctgaccagctgccccagagccaagcccagcgtgagacccaagcccttcctgaacagagccgagagccagagccaggagaagatggacatcagcaccctgagaagacagctgagacccaccggccagctgagaggcggcctgaagggcagcaagagcgaggacagcgagctgcccccccagaccgccagcgaggcccccagcgagggcagcagaagaagcagcagcgacctgatcaccctgcccgccaccacccccccctgccccaccaagaaggagtgggagggccccgccaccagctacatgacctgcagcgcctaccagaaggtgcaggacagcgagatcagcttccccgccggcgtggaggtgcaggtgctggagaagcaggagagcggctggtggtacgtgagattcggcgagctggagggctgggcccccagccactacctggtgctggacgagaacgagcagcccgaccccagcggcaaggagctggacaccgtgcccgccaagggcagacagaacgagggcaagagcgacagcctggagaagatcgagagaagagtgcaggccctgaacaccgtgaaccagagcaagaaggccaccccccccatccccagcaagccccccggcggcttcggcaagaccagcggcacccccgccgtgaagatgagaaacggcgtgagacaggtggccgtgagaccccagagcgtgttcgtgagccccccccccaaggacaacaacctgagctgcgccctgagaagaaacgagagcctgaccgccaccgacggcctgagaggcgtgagaagaaacagcagcttcagcaccgccagaagcgccgccgccgaggccaagggcagactggccgagagagccgccagccagggcagcgacagccccctgctgcccgcccagagaaacagcatccccgtgagccccgtgagacccaagcccatcgagaagagccagttcatccacaacaacctgaaggacgtgtacgtgagcatcgccgactacgagggcgacgaggagaccgccggcttccaggagggcgtgagcatggaggtgctggagagaaaccccaacggctggtggtactgccagatcctggacggcgtgaagcccttcaagggctgggtgcccagcaactacctggagaagaagaactag

SEQ ID NO: 181197 - DNA, 3183 bp, Artificial Sequence
  derived and/or modified sequence
tgattcttcgacctgcagatgcagctgctggacaagttccccatcgagggcggccagaaggaccccaagcagagaatcatccccttcctgcccggcaagatcctgttcagaagaagccacatcagagacgtggccgtgaagagactgaagcccatcgacgagtactgcagagccctggtgagactgcccccccacatcagccagtgcgacgaggtgttcagattcttcgaggccagacccgaggacgtgaacccccccaaggaggactacggcagcagcaagagaaagagcgtgtggctgagcagctgggccgagagccccaagaaggacgtgaccggcgccgacgccaccgccgagcccatgatcctggagcagtacgtggtggtgagcaactacaagaagcaggagaacagcgagctgagcctgcaggccggcgaggtggtggacgtgatcgagaagaacgagagcggctggtggttcgtgagcaccagcgaggagcagggctgggtgcccgccacctacctggaggcccagaacggcaccagagacgacagcgacatcaacaccagcaagaccggcgaggaggagaagtacgtgaccgtgcagccctacaccagccagagcaaggacgagatcggcttcgagaagggcgtgaccgtggaggtgatcagaaagaacctggagggctggtggtacatcagatacctgggcaaggagggctgggcccccgccagctacctgaagaaggccaaggacgacctgcccaccagaaagaagaacctggccggccccgtggagatcatcggcaacatcatggagatcagcaacctgctgaacaagaaggccagcggcgacaaggagaccccccccgccgagggcgagggccacgaggcccccatcgccaagaaggagatcagcctgcccatcctgtgcaacgccagcaacggcagcgccgtgggcgtgcccgacagaaccgtgagcagactggcccagggcagccccgccgtggccagaatcgccccccagagagcccagatcagcagccccaacctgagaaccagacccccccccagaagagagagcagcctgggcttccagctgcccaagccccccgagccccccagcgtggaggtggagtactacaccatcgccgagttccagagctgcatcagcgacggcatcagcttcagaggcggccagaaggccgaggtgatcgacaagaacagcggcggctggtggtacgtgcagatcggcgagaaggagggctgggcccccgccagctacatcgacaagagaaagaagcccaacctgagcagaagaaccagcaccctgaccagacccaaggtgcccccccccgccccccccagcaagcccaaggaggccgaggagggccccaccggcgccagcgagagccaggacagccccagaaagctgaagtacgaggagcccgagtacgacatccccgccttcggcttcgacagcgagcccgagctgagcgaggagcccgtggaggacagagccagcggcgagagaagacccgcccagccccacagacccagccccgccagcagcctgcagagagccagattcaaggtgggcgagagcagcgaggacgtggccctggaggaggagaccatctacgagaacgagggcttcagaccctacgccgaggacaccctgagcgccagaggcagcagcggcgacagcgacagccccggcagcagcagcctgagcctgaccagaaagaacagccccaagagcggcagccccaagagcagcagcctgctgaagctgaaggccgagaagaacgcccaggccgagatgggcaagaaccacagcagcgccagcttcagcagcagcatcaccatcaacaccacctgctgcagcagcagcagcagcagcagcagcagcctgagcaagaccagcggcgacctgaagcccagaagcgccagcgacgccggcatcagaggcacccccaaggtgagagccaagaaggacgccgacgccaacgccggcctgaccagctgccccagagccaagcccagcgtgagacccaagcccttcctgaacagagccgagagccagagccaggagaagatggacatcagcaccctgagaagacagctgagacccaccggccagctgagaggcggcctgaagggcagcaagagcgaggacagcgagctgcccccccagaccgccagcgaggcccccagcgagggcagcagaagaagcagcagcgacctgatcaccctgcccgccaccacccccccctgccccaccaagaaggagtgggagggccccgccaccagctacatgacctgcagcgcctaccagaaggtgcaggacagcgagatcagcttccccgccggcgtggaggtgcaggtgctggagaagcaggagagcggctggtggtacgtgagattcggcgagctggagggctgggcccccagccactacctggtgctggacgagaacgagcagcccgaccccagcggcaaggagctggacaccgtgcccgccaagggcagacagaacgagggcaagagcgacagcctggagaagatcgagagaagagtgcaggccctgaacaccgtgaaccagagcaagaaggccaccccccccatccccagcaagccccccggcggcttcggcaagaccagcggcacccccgccgtgaagatgagaaacggcgtgagacaggtggccgtgagaccccagagcgtgttcgtgagccccccccccaaggacaacaacctgagctgcgccctgagaagaaacgagagcctgaccgccaccgacggcctgagaggcgtgagaagaaacagcagcttcagcaccgccagaagcgccgccgccgaggccaagggcagactggccgagagagccgccagccagggcagcgacagccccctgctgcccgcccagagaaacagcatccccgtgagccccgtgagacccaagcccatcgagaagagccagttcatccacaacaacctgaaggacgtgtacgtgagcatcgccgactacgagggcgacgaggagaccgccggcttccaggagggcgtgagcatggaggtgctggagagaaaccccaacggctggtggtactgccagatcctggacggcgtgaagcccttcaagggctgggtgcccagcaactacctggagaagaagaactag

SEQ ID NO: 181198 - DNA, 2823 bp, Artificial Sequence
  derived and/or modified sequence
atgattttggaacagtatgtggtagtgtcgaattacaagaaacaggagaactccgaactgtctctgcaggctggagaggtcgtcgatgtgattgaaaagaacgagagtggctggtggttcgtcagcacttcagaggagcagggctgggtcccagcaacgtatttggaagcacagaatggaactcgggatgacagtgatattaacacgtctaagacgggggaagaggagaagtacgtcacagtccaaccatacacatcacaaagcaaagatgaaattgggttcgaaaagggtgttaccgtggaggtgatccggaagaacctcgaaggctggtggtacatccgctatctcgggaaggaaggatgggcgccagcttcatatctgaagaaagccaaagacgacctgcctacacggaagaagaacttggctggacccgttgaaatcatcggcaacattatggaaatctccaacctactgaacaagaaagcctcgggcgataaggagacccctcctgctgaaggagaagggcacgaagcccccatagctaaaaaagagattagcctgccgatcctttgcaacgcttctaacggttcagcggttggcgtgccagaccggactgtatcccggctggctcaagggagtccagcagtggcccggatcgctccccagcgcgctcagatatcttctccaaatttgagaacgcgcccaccacccagaagggagtcttcactggggtttcagttgcctaaacctccagaaccgcccagcgttgaggttgaatactacaccatcgccgagtttcaatcctgcatcagcgacggaatcagcttccggggcggccagaaggctgaggttatcgataaaaactccggcggctggtggtacgtccagattggcgaaaaagaaggctgggcgccagcttcatatatagataaaaggaagaagccaaacttgtctaggagaacctccacactgacccgccccaaggtgccaccccctgcacccccttccaaaccaaaagaggccgaggaagggcccacaggcgccagcgaatcccaggatagccctcgcaagttgaagtacgaggaacccgagtacgacattcccgctttcgggtttgattccgaaccagagttatccgaggagccagtagaagacagggcatcgggggagagacgccccgcccagccacacagacccagtcctgcttcctctttgcagagagctcgattcaaagtgggcgaaagctctgaagatgttgccctcgaagaggagaccatctacgaaaacgaaggctttaggccttatgctgaagacaccctcagcgctcgcggctcgtctggggattccgacagccccggaagctcctctcttagcttgacacgcaagaacagtccaaaatcgggctctcccaaatcttcttccttacttaagctaaaggctgagaaaaatgcgcaggctgagatggggaaaaaccattcctccgccagttttagcagcagtattaccatcaacaccacatgttgttcttcctctagctcttcttccagtagcctctcgaagacatccggagatcttaagccacgtagcgcatccgacgcaggcatccggggcacacccaaggttcgagcaaaaaaggacgctgatgccaatgccggtctgactagctgccccagggccaagccatccgtgaggccaaaaccttttttaaatagggccgaaagccaatctcaagaaaagatggacataagcacgctgaggcgccagcttaggcctaccggccagctgcgggggggactaaaaggtagcaagagcgaggacagcgaattgcctcctcagaccgcctctgaggccccgtctgaaggaagccgccgttcttcttctgatctaattactctccctgccacaacacctccctgccctacaaagaaggagtgggaaggcccagcaactagttacatgacctgttccgcctaccagaaggtccaggactctgaaatctcgtttccagccggagtggaggtgcaggtgctcgagaagcaggaatctgggtggtggtatgtcaggtttggagaactcgagggatgggccccgtctcactacctggttttggacgagaacgagcaaccagatcctagcgggaaagagctggatacagtgcccgcgaaaggacgccagaacgaggggaagagcgattccctcgaaaagatcgagagacgggtgcaagcactgaacacagtcaaccagagcaagaaggcaaccccgccaattccttccaagcccccgggaggattcggtaagacttccggtacacccgctgtcaaaatgcgcaacggggtccggcaagttgccgtgagacctcaaagcgtgtttgtgtcccctccaccgaaggacaacaacctcagctgtgccctgaggaggaacgagtcgctgaccgccaccgatggcctgcggggggtgcgccggaacagttccttcagcacagcacgtagtgctgccgccgaagccaaggggaggctcgccgagagggcagcttctcagggcagcgacagtcctctgctccctgcacagagaaattccatccctgtgagcccagtgcgacctaagcctatcgaaaaatctcagttcattcacaacaaccttaaagatgtgtacgtgtctatcgctgactatgaaggcgacgaagagacggccggctttcaagaaggggtcagcatggaagtgctcgagcggaatcccaacggctggtggtactgccagatcttagatggcgtaaaacccttcaaaggatgggtgccatccaactatctggaaaaaaagaattag

SEQ ID NO: 181199 - DNA, 3318 bp, Artificial Sequence
  derived and/or modified sequence
atgctcgcttactgtgttcaggatgcaaccgtggtggatgtggaaaaacggcggaatccttcaaaacactacgtctacattattaacgtgacttggtcagactcaacctcacagactatctaccgacgctatagcaagttttttgacctgcagatgcagttgctcgataaattccccattgagggtggccagaaggatcctaagcagcgaatcattccctttctgcccggcaaaatcctgtttcggaggagtcatatcagggatgttgcagtgaagaggcttaagccgattgatgaatactgtagggctttggtgcggctcccaccccatatctcccagtgcgacgaggtctttagattctttgaagcccgcccagaggatgtcaacccacctaaggaagattatggctcctctaagcgcaagtccgtgtggctgtcgagttgggctgaatctcccaagaaggatgtcaccggggctgacgctaccgctgaaccaatgatcctggagcagtatgtcgttgtgtcaaattataagaagcaagagaatagtgagctctcactgcaggcgggtgaagtggtcgatgtgattgagaaaaatgaatcaggatggtggttcgtcagcacgtctgaggagcagggatgggtgccggccacatacctggaagctcagaatggcaccagggatgactccgacattaatacctcgaagaccggggaggaggaaaaatatgtaacagtacagccctacacctcacagtccaaagatgaaattggatttgagaaaggagttactgttgaggtaatccggaaaaacctggaggggtggtggtacatcagatacctgggcaaagaaggctgggcacccgcctcatacctgaagaaggccaaagatgatctgcctacaagaaagaaaaatctggccggtcccgtggaaataataggcaacattatggaaatctcaaatctcttgaataagaaggcttccggagataaagaaacacccccagcagaaggcgaagggcacgaggcgccaatcgctaagaaggagattagtctgccaatactgtgcaatgccagcaacgggagtgcggtgggggtgcccgacagaacggtcagccggttggctcaggggtccccggcggtcgcgagaatcgctccccagagggcccagatttccagccctaatctgcgcacccgccctcccccgcgcagagagagttcactggggtttcagctgcccaagccacccgaacctccaagcgtggaagtcgagtattacaccatcgccgaattccaatcctgtatctcagatgggatttcttttagaggaggccaaaaggcggaagtcatcgacaaaaattctggcggctggtggtacgtccagattggtgagaaggaggggtgggccccagccagctacattgacaaacggaaaaagccgaatctgagccgtcgtactagtacactgactcgccctaaagtccctcccccagctcccccctctaaacctaaagaggccgaggagggacccacaggagctagcgagagccaggacagtccccggaaactgaaatacgaagagccagaatacgatatccccgcatttgggtttgacagtgagccagagctctctgaggagcccgtggaggatagagctagtggcgagaggcggcctgcccagccccatcgcccgtcccccgctagcagcctgcagcgggcaagattcaaagttggcgagtccagtgaagatgtggcactggaggaggaaacaatctatgagaacgaagggttcaggccttatgctgaggatacattgtctgcaagaggcagcagtggggatagtgacagccctggctccagcagcctctcgctcactcgtaagaactcaccaaagagcggatctcccaagtcctcatccctgctcaagttgaaggccgagaagaatgcacaggccgagatgggaaagaatcactccagcgcaagtttttcttctagcatcaccatcaatacaacatgttgctcctcaagctccagcagttctagctctttgtctaagacaagtggtgacttgaaaccgcggtcagccagcgacgcagggatacgcggtactcctaaagtgcgcgctaaaaaagatgccgatgccaatgcggggctgacgagctgtccgagggctaaaccttccgtgagacctaaaccatttttgaatagagcagagtcccagtctcaagagaagatggatattagcacattgaggaggcagctccgtcctactgggcagctaagagggggtctcaaaggatccaagtcagaggattctgagctccctccccagaccgcttccgaagccccatcagaggggtcccggaggagctctagtgacctcataacattgcccgctaccacccctccctgcccaacaaagaaggaatgggaaggacccgccacaagttatatgacatgttccgcatatcagaaggtacaggacagcgaaatatcgtttcctgcaggggtggaggttcaggtgttggagaagcaggaatccgggtggtggtacgtgcgatttggggagttggaggggtgggctcctagccactatctcgtcctggacgagaatgagcagcccgacccatccggcaaggaactggataccgtccccgctaagggacgccaaaacgagggtaagagcgactctcttgaaaaaatagagaggagggtccaggctctcaacaccgtgaatcagtctaaaaaagccacccctccaatcccctccaagccacctggcggatttggcaagacttcaggaacaccagccgtgaaaatgcggaacggtgtgcgccaggtcgccgtgagacctcagtccgtgttcgtatccccgccccctaaagacaataatttgtcttgtgcacttagacgaaacgagtctcttacagctaccgacggcttgcggggcgttcggaggaattccagtttcagcactgctaggtccgccgctgctgaggctaaaggcagacttgcagaaagagccgcatctcaggggtccgattcacccctgcttcccgcacagcgaaactcgattcctgtgtcccctgtgcgaccaaagcccattgagaaatctcaattcattcataataatctgaaagacgtttacgtgagtattgctgattacgaaggtgacgaggagacagcaggtttccaggagggagtgagcatggaggtcttagagagaaatcccaatggctggtggtactgccagatccttgacggtgtgaagccgtttaaggggtgggttccatccaattatctggaaaagaaaaattag

SEQ ID NO: 181200 - DNA, 3183 bp, Artificial Sequence
  derived and/or modified sequence
tgattttttgacttgcaaatgcagttactggataaatttcccattgagggaggacagaaagatccaaagcaaaggatcattcccttcttgccgggtaaaatcctgtttaggagatcgcacatccgggacgtggcagtgaagagactgaaaccaatcgacgagtactgtagggcactggtgcgcttgcctccgcatatcagtcagtgtgatgaggtgttccgtttctttgaagctcgccccgaggatgtgaatccaccaaaagaggactacggatcctccaaacgcaaaagtgtgtggctttccagttgggccgagagccctaagaaagatgttacaggggccgatgccacggctgagcctatgatcctggagcagtacgtagttgtcagcaattacaaaaaacaagaaaattctgaattatcactccaggccggtgaggtggtagatgtcattgagaaaaacgagtcggggtggtggtttgtatctaccagtgaagagcagggatgggtgcccgctacctatttggaggctcagaatgggacccgggacgactctgatatcaacactagtaagaccggagaggaggaaaaatacgtaaccgtccagccctatacgagccagtctaaagacgagatcgggttcgaaaagggagtgacagtggaggtcattcggaagaatctcgagggctggtggtacataaggtatcttgggaaagaaggctgggcgcccgcctcctacctgaagaaagctaaggacgacctcccgacacgtaagaaaaatctcgccggacccgtggagataatcggtaacattatggagatctctaatctgctcaacaagaaggcgagtggcgataaggagaccccgcctgctgagggagagggtcacgaggccccaatagcgaagaaggagatctccctgccaatcctctgcaacgctagcaacggatctgccgttggtgtgccggataggaccgtcagccgactggcccagggaagccccgccgtggcccggatagcacctcagagggcccagattagttccccaaatctgaggactcgacctcctccccggagagagagcagcttggggttccagctccctaaaccccctgagccgccgtcagtggaggtggaatattatacaattgcagagttccagtcttgcatcagcgacgggatcagttttagaggcggccaaaaagcggaagtcatagacaagaactctggtgggtggtggtatgtgcagattggcgaaaaggaggggtgggcacctgctagctacatcgataagcgtaagaaacccaatctgtctaggcgtacgtcaactctgaccaggccaaaggttcccccgcctgccccaccctccaagcccaaggaagcggaggaaggaccgactggagcgtctgaatcccaggattctccccggaagttaaaatacgaagagcctgagtacgacatcccagctttcggctttgattccgaacctgaactgtccgaggaacccgtggaggacagagccagtggagaacgcaggcctgcacagcctcatcgaccttcacccgcatcatccctgcaacgagcccgatttaaggtaggcgagagctcagaggacgtggcgcttgaggaggagacaatttatgaaaatgaaggtttccggccgtacgcagaagataccctcagcgcccggggttcaagcggggacagtgactccccagggtcgtcctcgctgtcattaactcggaagaattcccccaagagcgggtctcccaaatcctcctctctactgaagttgaaggctgaaaaaaacgcgcaagctgaaatggggaagaatcattccagtgcaagcttcagttccagtattaccattaacactacttgttgctcatcttctagttctagcagctcttcgctgtccaaaacctccggcgacctgaagccccgctcagccagcgatgcgggcataagaggaaccccaaaggtgcgagctaaaaaggatgcagacgccaacgcagggctgaccagctgcccacgagccaaaccctcggtgcgcccaaagcctttcctcaatagggcagaatcccaatcccaggagaaaatggacattagcaccttacgtcggcagctgcgtcccacggggcagctcagggggggattgaaaggaagcaagagcgaggattccgagctgccccctcagacagcttcagaagcaccctccgaggggtctaggcgcagctcctccgatctaattacgttgcccgcaaccaccccaccatgtcccaccaagaaagagtgggaaggacctgcaaccagctatatgacatgttcggcctatcaaaaggtacaggactcggagatcagctttcctgcgggagtagaggtacaggttctcgaaaagcaagaaagcgggtggtggtacgtaagattcggcgagttggaggggtgggccccttctcactacctggtcctcgatgagaacgagcagcccgatccgagcgggaaggaactggatacagtgcccgctaaaggcagacaaaatgaggggaagtcagatagtctcgaaaagatcgaacggagagtgcaggccctgaacacagtgaaccagtcaaagaaggccaccccacccatcccatcaaaaccaccaggaggtttcggaaagacttcgggtacccccgctgtgaaaatgcggaacggtgttaggcaagtcgctgtgagacctcagtccgttttcgtgtcacctccgcccaaggacaataatctgtcctgcgctctgcgtaggaatgagtccctgacagctacggatgggctcagaggcgtgagaaggaattcgtccttctcaactgccaggtccgcagcggctgaggcgaagggtagattggctgaaagagctgcaagccagggttccgatagccctctgctacccgcccaaagaaacagcatccccgtgagcccagttaggcccaagcctatcgagaaaagtcagtttatccacaataatctcaaggatgtgtatgtttccatcgctgactacgaaggcgacgaagagacggccggcttccaagagggcgtgtccatggaggtgttagagagaaaccccaatggttggtggtattgccaaattttagacggcgtgaaaccgttcaagggctgggtcccatccaattacctggaaaaaaaaaactag

SEQ ID NO: 181201 - DNA, 2823 bp, Artificial Sequence
  derived and/or modified sequence
atgatcctggagcagtatgtggtggtgagcaactacaagaagcaggagaacagcgagctgagcctgcaggccggggaggtggtggatgtgattgagaagaatgaaagtggctggtggtttgtgtccaccagcgaggagcagggctgggtgcctgccacctacctggaggcccagaatggcaccagagatgacagcgacatcaacaccagcaagacaggagaggaggagaagtatgtgacagtgcagccctacaccagccagagcaaggatgagatcggctttgagaagggcgtgacagtggaggtgatcaggaagaacctggagggctggtggtacatccgctacctgggcaaggagggctgggccccagccagctacctgaagaaggccaaggatgacctgcccaccaggaagaagaacctggccggccctgtggagatcatcggcaacatcatggagatcagcaacctgctgaacaagaaggccagcggggacaaggagaccccacctgctgagggggagggccacgaggcccccatcgccaagaaggagatcagcctgcccatcctgtgcaatgccagcaatggatctgctgtgggcgtgcctgacagaacagtgtcccggctggcccagggcagccctgctgtggccagaattgccccccagagggcccagatcagcagccccaacctgcggacccggcccccaccccggcgggagagcagcctgggcttccagctgcccaagcccccagagcccccatctgtggaggtggagtactacaccatcgccgagttccagagctgcatcagtgatggcatctccttccggggcggccagaaggccgaggtgattgacaagaacagcggcggctggtggtacgtgcagattggagagaaggagggctgggccccagccagctacatcgacaagaggaagaagcccaacctgagcaggaggaccagcaccctgacccggcccaaggtgcccccaccagccccacccagcaagcccaaggaggccgaggagggccccaccggggccagcgagagccaggacagccccaggaagctgaagtatgaggagccagaatatgacatcccagccttcggctttgacagcgagcctgagctgtctgaggagcctgtggaggaccgggccagcggggagaggaggcctgcccagccccaccggcccagccctgccagcagcctgcagagggcccgcttcaaggtgggggagagcagtgaagatgtggccctggaggaggagaccatctatgaaaatgaaggcttccggccctatgcagaggacaccctgagcgcccggggcagcagcggggacagcgacagccctggcagcagcagcctgagcctgaccaggaagaacagccccaagagcggcagccccaagagcagcagcctgctgaagctgaaggccgagaagaatgcccaggccgagatgggcaagaaccacagcagcgccagcttcagcagcagcatcaccatcaacaccacctgctgcagcagcagcagcagcagcagcagcagcctgagcaagaccagcggggacctgaagcccaggtctgccagtgatgctggcatccggggcacccccaaggtgcgggccaagaaggatgctgatgccaatgccggcctgaccagctgcccccgggccaagcccagcgtgcggcccaagcccttcctgaacagagctgagagccagagccaggagaagatggacatcagcaccctgcggcggcagctgcggcccaccggccagctgcggggcggcctgaagggcagcaagtcagaagattctgagctgcccccccagacagccagcgaggcccccagcgagggcagcagaagaagcagcagtgacctgatcaccctgcctgccaccaccccaccctgccccaccaagaaggagtgggagggccctgccaccagctacatgacctgcagcgcctaccagaaggtgcaggacagcgagatctccttccctgctggggtggaggtgcaggtgctggagaagcaggagagcggctggtggtacgtgcgctttggagagctggagggctgggcccccagccactacctggtgctggatgaaaatgagcagcctgaccccagcggcaaggagctggacacagtgcctgccaagggccggcagaatgaaggcaagagtgacagcctggagaagattgaaagaagagtgcaggccctgaacacagtgaaccagagcaagaaggccaccccacccatccccagcaagcccccaggcggctttgggaagaccagcggcaccccagctgtgaagatgagaaatggagtgcggcaggtggccgtgcggccccagagcgtgtttgtgtccccaccacccaaggacaacaacctgagctgtgccctgcggagaaatgaaagcctgacagccacagatggcctgcggggcgtgagaagaaacagcagcttcagcacagcccggtctgctgctgctgaggccaagggccgcctggccgagagagctgccagccagggcagtgacagccccctgctgcctgcccagagaaattccatccctgtgtcccctgtgcggcccaagcccatcgagaagagccagttcatccacaacaacctgaaggatgtgtatgtgtccattgctgactatgaaggagatgaggagacagctggcttccaggagggcgtgtccatggaggtgctggagaggaaccccaacggctggtggtactgccagatcctggatggagtgaagcccttcaagggctgggtgcccagcaactacctggagaagaagaactag

SEQ ID NO: 181202 - DNA, 3318 bp, Artificial Sequence
  derived and/or modified sequence
atgctggcctactgtgtgcaggatgccaccgtggtggatgtggagaagagaagaaaccccagcaagcactacgtgtacatcatcaacgtgacctggagcgacagcaccagccagaccatctaccgccgctacagcaagttctttgacctgcagatgcagctgctggacaagttccccatcgagggcggccagaaggaccccaagcagaggatcatccccttcctgcccgggaagatcctcttccgccgcagccacatcagagatgtggccgtgaagaggctgaagcccattgatgagtactgccgggccctggtgcggctgcccccccacatcagccagtgtgatgaggtgttccgcttctttgaggcccggccagaagatgtgaacccccccaaggaggactatggcagcagcaagaggaagtctgtgtggctgagctcctgggccgagagccccaagaaggatgtgactggagcagatgccacagctgagcccatgatcctggagcagtatgtggtggtgagcaactacaagaagcaggagaacagcgagctgagcctgcaggccggggaggtggtggatgtgattgagaagaatgaaagtggctggtggtttgtgtccaccagcgaggagcagggctgggtgcctgccacctacctggaggcccagaatggcaccagagatgacagcgacatcaacaccagcaagacaggagaggaggagaagtatgtgacagtgcagccctacaccagccagagcaaggatgaaattggatttgagaagggcgtgacagtggaggtgatcaggaagaacctggagggctggtggtacatccgctacctgggcaaggagggctgggccccagccagctacctgaagaaggccaaggatgacctgcccaccaggaagaagaacctggccggccctgtggagatcatcggcaacatcatggagatcagcaacctgctgaacaagaaggccagcggggacaaggagaccccacctgctgagggggagggccacgaggcccccatcgccaagaaggagatcagcctgcccatcctgtgcaatgccagcaatggcagcgctgtgggcgtgcctgacagaacagtgtcccggctggcccagggcagccctgctgtggcccgcatcgccccccagagggcccagatcagcagccccaacctgcggacccggcccccaccaagaagagagagcagcctgggcttccagctgcccaagcccccagagccccccagcgtggaggtggagtactacaccatcgccgagttccagagctgcatcagtgatggcatctccttccggggcggccagaaggccgaggtgattgacaagaacagcggcggctggtggtacgtgcagatcggggagaaggagggctgggccccagccagctacatcgacaagaggaagaagcccaacctgagcaggaggaccagcaccctgacccggcccaaggtgcccccaccagccccacccagcaagcccaaggaggccgaggagggccccactggagccagcgagagccaggacagccccaggaagctgaagtatgaggagccagaatatgacatcccagcctttggatttgattctgagcctgagctgtctgaggagcctgtggaggaccgggccagcggggagcggcggcctgcccagccccaccggcccagccctgccagcagcctgcagagggcccgcttcaaggtgggggagagcagtgaagatgtggccctggaggaggagaccatctatgaaaatgaaggcttccggccctatgcagaggacaccctgagcgcccggggcagcagcggggacagcgacagccctggcagcagcagcctgagcctgaccaggaagaacagccccaagagcggcagccccaagagcagcagcctgctgaagctgaaggccgagaagaatgcccaggccgagatgggcaagaaccacagcagcgccagcttcagcagcagcatcaccatcaacaccacctgctgcagcagcagcagcagcagcagcagcagcctgagcaagaccagcggggacctgaagcccaggtctgccagtgatgctggcatccggggcacccccaaggtgcgggccaagaaggatgctgatgccaatgccggcctgaccagctgcccccgggccaagcccagcgtgcggcccaagcccttcctgaacagagctgagagccagagccaggagaagatggacatcagcaccctgcggcggcagctgcggcccaccggccagctgcggggcggcctgaagggcagcaagtctgaggacagcgagctgcccccccagacagccagcgaggcccccagcgagggcagccgccgcagcagcagtgacctgatcaccctgcctgccaccaccccaccctgccccaccaagaaggagtgggagggccctgccaccagctacatgacctgcagcgcctaccagaaggtgcaggacagcgagatctccttccctgctggggtggaggtgcaggtgctggagaagcaggagagcggctggtggtacgtgcgctttggagagctggagggctgggcccccagccactacctggtgctggatgaaaatgagcagcctgaccccagcggcaaggagctggacacagtgcctgccaagggccggcagaatgaaggcaagagtgacagcctggagaagattgaaagaagagtgcaggccctgaacacagtgaaccagagcaagaaggccaccccacccatccccagcaagcccccaggcggctttgggaagaccagcggcaccccagctgtgaagatgagaaatggagtgcggcaggtggccgtgcggccccagagcgtgtttgtgagccccccacccaaggacaacaacctgagctgtgccctgcggagaaatgaaagcctgacagccacagatggcctgcggggcgtgagaagaaacagcagcttcagcacagcccggtctgctgctgctgaggccaagggccgcctggccgagcgggccgccagccagggcagtgacagccccctgctgcctgcccagaggaacagcatccctgtgtcccctgtgcggcccaagcccatcgagaagagccagttcatccacaacaacctgaaggatgtgtatgtgtccattgctgactatgaaggagatgaggagacagctggcttccaggagggcgtgtccatggaggtgctggagaggaaccccaacggctggtggtactgccagatcctggatggagtgaagcccttcaagggctgggtgcccagcaactacctggagaagaagaactag

SEQ ID NO: 181203 - DNA, 3183 bp, Artificial Sequence
  derived and/or modified sequence
tgattctttgacctgcagatgcagctgctggacaagttccccattgaaggaggccagaaggaccccaagcagaggatcatccccttcctgcccgggaagatcctcttcagaagaagccacatcagagatgtggccgtgaagaggctgaagcccattgatgagtactgccgggccctggtgcggctgcccccccacatcagccagtgtgatgaggtgttccgcttctttgaggcccggccagaagatgtgaacccccccaaggaggactatggcagcagcaagaggaagtctgtgtggctgagctcctgggccgagagccccaagaaggatgtgactggagcagatgccacagctgagcccatgatcctggagcagtatgtggtggtgagcaactacaagaagcaggagaacagcgagctgagcctgcaggccggggaggtggtggatgtgattgagaagaatgaaagtggctggtggtttgtgtccaccagcgaggagcagggctgggtgcctgccacctacctggaggcccagaatggcaccagagatgacagcgacatcaacaccagcaagacaggagaggaggagaagtatgtgacagtgcagccctacaccagccagagcaaggatgagatcggctttgagaagggcgtgacagtggaggtgatcaggaagaacctggagggctggtggtacatccgctacctgggcaaggagggctgggccccagccagctacctgaagaaggccaaggatgacctgcccaccaggaagaagaacctggccggccctgtggagatcatcggcaacatcatggagatcagcaacctgctgaacaagaaggccagcggggacaaggagaccccacctgctgagggggagggccacgaggcccccatcgccaagaaggagatcagcctgcccatcctgtgcaatgccagcaatggatctgctgtgggcgtgcctgacagaacagtgtcccggctggcccagggcagccctgctgtggccagaattgccccccagagggcccagatcagcagccccaacctgcggacccggcccccaccccggcgggagagcagcctgggcttccagctgcccaagcccccagagcccccatctgtggaggtggagtactacaccatcgccgagttccagagctgcatcagtgatggcatctccttccggggcggccagaaggccgaggtgattgacaagaacagcggcggctggtggtacgtgcagattggagagaaggagggctgggccccagccagctacatcgacaagaggaagaagcccaacctgagcaggaggaccagcaccctgacccggcccaaggtgcccccaccagccccacccagcaagcccaaggaggccgaggagggccccaccggggccagcgagagccaggacagccccaggaagctgaagtatgaggagccagaatatgacatcccagccttcggctttgacagcgagcctgagctgtctgaggagcctgtggaggaccgggccagcggggagaggaggcctgcccagccccaccggcccagccctgccagcagcctgcagagggcccgcttcaaggtgggggagagcagtgaagatgtggccctggaggaggagaccatctatgaaaatgaaggcttccggccctatgcagaggacaccctgagcgcccggggcagcagcggggacagcgacagccctggcagcagcagcctgagcctgaccaggaagaacagccccaagagcggcagccccaagagcagcagcctgctgaagctgaaggccgagaagaatgcccaggccgagatgggcaagaaccacagcagcgccagcttcagcagcagcatcaccatcaacaccacctgctgcagcagcagcagcagcagcagcagcagcctgagcaagaccagcggggacctgaagcccaggtctgccagtgatgctggcatccggggcacccccaaggtgcgggccaagaaggatgctgatgccaatgccggcctgaccagctgcccccgggccaagcccagcgtgcggcccaagcccttcctgaacagagctgagagccagagccaggagaagatggacatcagcaccctgcggcggcagctgcggcccaccggccagctgcggggcggcctgaagggcagcaagtcagaagattctgagctgcccccccagacagccagcgaggcccccagcgagggcagcagaagaagcagcagtgacctgatcaccctgcctgccaccaccccaccctgccccaccaagaaggagtgggagggccctgccaccagctacatgacctgcagcgcctaccagaaggtgcaggacagcgagatctccttccctgctggggtggaggtgcaggtgctggagaagcaggagagcggctggtggtacgtgcgctttggagagctggagggctgggcccccagccactacctggtgctggatgaaaatgagcagcctgaccccagcggcaaggagctggacacagtgcctgccaagggccggcagaatgaaggcaagagtgacagcctggagaagattgaaagaagagtgcaggccctgaacacagtgaaccagagcaagaaggccaccccacccatccccagcaagcccccaggcggctttgggaagaccagcggcaccccagctgtgaagatgagaaatggagtgcggcaggtggccgtgcggccccagagcgtgtttgtgtccccaccacccaaggacaacaacctgagctgtgccctgcggagaaatgaaagcctgacagccacagatggcctgcggggcgtgagaagaaacagcagcttcagcacagcccggtctgctgctgctgaggccaagggccgcctggccgagagagctgccagccagggcagtgacagccccctgctgcctgcccagagaaattccatccctgtgtcccctgtgcggcccaagcccatcgagaagagccagttcatccacaacaacctgaaggatgtgtatgtgtccattgctgactatgaaggagatgaggagacagctggcttccaggagggcgtgtccatggaggtgctggagaggaaccccaacggctggtggtactgccagatcctggatggagtgaagcccttcaagggctgggtgcccagcaactacctggagaagaagaactag

SEQ ID NO: 181204 - DNA, 2823 bp, Artificial Sequence
  derived and/or modified sequence
atgatcctggagcagtacgtggtggtgagcaactacaagaagcaggagaatagtgagctgtcactgcaggcaggggaagttgtcgatgtgattgaaaagaatgagagtggctggtggttcgttagcacgagcgaggagcagggatgggtgcccgctacctaccttgaggcgcagaatgggacgagggatgacagtgatatcaacacctcgaagacaggcgaagaagagaaatatgttactgtgcagccctataccagtcagtccaaagacgagatcggttttgagaagggtgtgacagtggaggttatcaggaagaatctcgaggggtggtggtacattcgatatcttgggaaggaggggtgggcgcccgccagctacctgaagaaggccaaagacgatcttcccacacggaaaaagaacctggctgggcccgtggaaattataggaaatatcatggagattagcaatctgctgaacaagaaggcaagtggagacaaagagacccctcccgccgaaggggaaggacacgaagcccccatagcgaaaaaagaaattagcctcccgatcctgtgtaatgcctccaacggttccgcagttggcgtaccagaccggactgtaagccggctcgcacagggttctcctgccgtggcacggatcgcaccccagcgggctcagatctcaagtccaaatctaaggacacgcccaccaccgagaagagagtcttctcttgggtttcaactgcctaaaccccccgagccgcccagcgtggaggtggaatattacactattgccgaattccagtcctgtatttctgatgggatctctttccggggaggacaaaaagctgaagtgatcgacaaaaatagcggagggtggtggtatgtgcagatcggcgagaaggagggttgggcaccagccagctacatagacaagcgaaaaaagcctaatcttagccgccggacctccacccttactcgacccaaagtgcccccaccagctccaccatctaagccaaaggaggcagaagaaggacctacgggagccagcgaatcccaggacagtccaagaaagctgaaatacgaggaacccgagtatgatatccccgcgtttggattcgactccgagcccgaactatccgaagagcctgtggaagacagggcttcaggggagcggaggcccgctcagcctcacaggcccagccccgcctcctccctccaaagggcccgctttaaggtcggcgaatctagcgaagacgttgcgctcgaagaggagactatctatgagaacgaaggatttaggccatacgctgaggacactctctccgctcgtgggtcgtctggggactctgactccccagggtcctccagcctgagcctgacaagaaaaaatagtcccaaatctggctctcccaagagttcaagcctcctgaagcttaaagccgaaaagaacgctcaggccgaaatggggaaaaaccactcctctgcctcattctcaagttctatcacaattaacacaacctgctgtagttcctcatcgtctagttctagcagtctgtctaaaacatccggtgaccttaagccccgctcagcctcagatgccgggattagagggactcccaaagtacgagccaagaaggatgcagacgctaacgctgggttgactagttgcccccgggcaaagccctccgtgcggccgaagccctttctgaatagagccgagtcgcagtcccaggaaaagatggatatttccaccctgagacggcagctgaggccgacaggccaactgagaggcggcttgaagggctctaaaagtgaagacagcgagctccctccacaaacggctagcgaggctccctctgaaggctcacgcagaagcagtagcgacctgattaccttacctgcaactaccccaccctgtccaaccaaaaaggaatgggaagggcctgcaacgtcctatatgacctgctccgcttatcagaaagttcaagactcagaaatctctttccccgcaggggtggaggtccaggtgctggagaagcaggagtcagggtggtggtatgtgcgctttggggagcttgaagggtgggcccccagccattacctggtgctcgatgaaaacgaacaaccagatccctctgggaaggaattagacaccgtccccgctaagggaagacaaaatgagggcaagtctgatagtcttgagaaaatcgaacgccgcgtccaagcgctgaacacagtaaatcaatccaagaaggcaactccccccattccaagcaaaccaccaggcgggttcgggaagacctctggaactcctgcagtgaagatgcgcaatggcgttcggcaggtagcagttaggccccagagcgtgtttgtatcgcctccccctaaggacaataatctcagttgtgcactgcgtagaaatgaatcactgaccgcaaccgacggcctaaggggcgtccgtaggaactcttcattctccaccgctaggtcagcagctgccgaagcgaagggcagattagcggagcgagcagcctctcagggctctgactctccccttcttccggctcagaggaattccattcccgtctctccagtgaggcctaaaccaatcgagaagagccagtttattcataataacctcaaagatgtctatgtgagcattgccgattacgaaggcgatgaggagaccgccggattccaggagggggtatccatggaggtattggagcggaatccaaacggctggtggtactgtcagatcctcgatggcgtgaaacccttcaaaggctgggtccccagcaattacctggagaaaaagaactag

SEQ ID NO: 181205 - DNA, 3318 bp, Artificial Sequence
  derived and/or modified sequence
atgctggcctactgcgtgcaggacgccaccgtggtggacgtggagaagcgacggaacccatctaaacactacgtgtacatcataaacgttacttggagcgactccaccagtcagacgatttatcgcaggtacagcaaattcttcgacctgcaaatgcagttgcttgataagtttccaatcgagggggggcagaaagatccgaaacaaagaattataccttttctgccagggaagattttattcagacggagtcatatcagagacgtcgctgtcaaacgactcaagcccattgatgagtactgtcgcgcattagtgcggctacctccgcatattagccagtgcgatgaggtgtttagattttttgaggcccgaccagaagatgtgaatcccccaaaagaggactacggatccagcaagagaaagagcgtctggctctcaagttgggccgagtcacctaaaaaggacgtcacgggagccgacgcaaccgcagagccaatgatcctggagcaatacgtcgtggtgtcgaactacaagaagcaggaaaactctgagctgtcgttgcaggccggcgaggtggtggatgtaattgagaagaatgagagtggctggtggtttgtgtcaacctccgaagagcagggctgggttcctgccacatacttagaagcccagaacgggactcgcgacgatagcgatatcaacacgagtaaaacaggggaggaggagaagtacgtgactgttcagccctacaccagccagtctaaggatgaaatcggtttcgagaagggcgttaccgtagaagttattaggaagaatctggaggggtggtggtacatacgctaccttggcaaagaaggctgggcccccgctagctacctgaaaaaagcgaaggacgacttgccaacccggaagaaaaacctcgctgggcctgtggaaattattggcaatattatggaaattagtaatttgctgaataaaaaggcgagtggtgacaaggagacgccccctgccgagggcgagggtcacgaggctcctattgccaaaaaggaaatctcgctgcccattctgtgcaacgcttcgaatggctctgccgtgggagtccctgatcggacagtgagcagactagctcagggcagtccggcagtggccaggatcgcgccgcagcgggctcaaattagtagccctaatctgcgcaccaggcctccaccccgccgggaaagttcactcggcttccagctgcctaagcccccggaaccccccagcgtggaggtagaatattacaccattgctgagtttcaaagttgtatttcagacggaatctctttccggggagggcagaaagcggaggtgatagataaaaattccggaggctggtggtatgtgcagatcggcgagaaggaaggatgggcccccgcctcttacatcgataagagaaagaagcctaacctcagcaggagaaccagcacactcacgaggcccaaggtccccccccccgcgccccctagcaaacccaaagaggctgaggagggccccacgggagcgtcagaaagtcaggactctccccgcaagttaaagtatgaagaacccgagtatgatatccctgcctttgggttcgacagcgaaccagaactctccgaggagcctgttgaggatagagcctctggagaaaggaggccagcacaaccccaccggccctctcccgcatcttcattgcagcgagcccgttttaaggtgggagaaagttccgaggacgtggcactcgaggaagagaccatttacgaaaacgagggcttcaggccttatgccgaggacaccctgtcagccaggggctcgtcaggggactccgattcccctggctcctcttcactgtccctgactcgaaagaattcccctaaatcaggctcccccaaatcttcttctttacttaaactgaaagccgaaaagaatgctcaggccgagatgggcaagaatcatagcagcgcatcatttagcagttctataaccattaatacgacctgttgttcaagcagtagcagctcaagttcgagcttatcgaaaacaagcggggatctgaaacctagaagcgcttcagatgctggtatccgcggaacacctaaggtcagggccaagaaggatgcggatgccaacgcgggactgacgagctgtccccgtgccaaaccaagcgtaagacctaagcctttcctcaatagggcagagagtcagtctcaagaaaaaatggacatcagcactttgagaagacagttaagaccaaccggccagctccgcgggggtctgaaaggctcaaagtccgaggacagtgagttacccccccagactgcatcagaagcaccttccgaaggaagtagacgttcttcaagcgacctgatcacattgcctgcgacaacaccgccatgccccaccaaaaaggagtgggagggcccggccactagctacatgacatgcagcgcataccagaaggtccaagatagtgagatttctttccccgccggtgtcgaagtgcaagtactcgagaaacaggagagtggttggtggtatgtgcgatttggagagctggaagggtgggccccgtcacactatctggtgttggatgaaaatgaacagcctgatccctccggaaaggaactcgatactgtccctgcgaaggggcggcagaacgaaggaaagagtgatagccttgagaaaatcgagcgcagggtacaggccctcaacactgtcaaccagtctaagaaagccacacctccaattccctctaaacccccagggggcttcggcaaaactagtgggacgcctgctgtcaaaatgcggaatggagttcgtcaagtggccgtcagaccacagagtgtgtttgttagtccaccacccaaagataataacctatcatgtgccctacggaggaacgaatctctgaccgccacggacgggttgagaggcgtgaggcgaaatagcagttttagcacagcgagatccgccgctgcagaggccaaaggacgcctagccgaacgggctgcatcacagggatcagattcaccactgttgccagcccaaagaaatagtattcccgtatctccagtgaggcccaagccaattgagaagtctcagtttatccacaacaatctcaaggacgtgtatgtttccatagccgactatgaaggtgacgaagagacggccgggttccaggaaggcgtaagtatggaggtcctcgagcggaatcccaacggatggtggtactgtcaaatcttagatggtgtaaagcctttcaagggctgggtcccatctaactacctggaaaaaaagaactag

SEQ ID NO: 181206 - DNA, 3183 bp, Artificial Sequence
  derived and/or modified sequence
tgattcttcgacctgcagatgcagctgctggacaagttccccatcgaaggcggccaaaaagatcctaagcagcgaatcattccctttttgcccggcaaaattctcttcagaaggtcccacattagagatgtagcagtgaagaggctgaagccaattgacgaatattgtcgggccctagtgagactgccacctcacatctcccagtgtgacgaagtgttccggttcttcgaagcaaggcctgaggatgtgaaccctcctaaggaagactacggttcgtccaagagaaaaagcgtgtggctcagctcttgggcggaatcacccaaaaaagatgttaccggagcagatgccacagccgagcccatgatcctcgagcagtacgtcgtggtttcaaattataagaagcaggagaacagcgaactctccttacaggctggcgaggtggtcgatgtcatcgaaaagaatgaaagcggatggtggttcgtctctacaagtgaagagcaaggctgggtacccgccacttatttagaagctcagaatgggacccgagatgattctgacattaacactagcaaaactggtgaggaagagaagtatgtgaccgtccagccttacacttcacaatcaaaagacgaaatcggattcgaaaaaggagtgaccgtagaggtcattaggaagaacctggagggatggtggtacattcgatacctcggcaaagaaggctgggcccccgctagttacctgaaaaaggcaaaagacgacctgccgacacggaaaaaaaatttggccggccccgtcgagataatcggcaatataatggagatcagcaatctcctgaacaagaaagcttcaggagataaagaaacacctcctgcagaaggagaaggccatgaagcgccaattgcaaagaaggagatctcacttccaatcctgtgcaatgccagtaacgggtctgccgtcggcgtccctgaccgcaccgtttcccgtctggcacaggggtcacccgcggtcgctagaattgccccacagcgggcccagatttcaagtcccaatcttaggacgagaccacctcctcgccgggagtccagcctgggttttcagctcccaaaacccccagagccacccagcgtggaagttgagtattacacgattgccgaatttcagtcatgtatttccgatggaatctctttcagaggtggtcaaaaagcagaggtgatcgataaaaatagtggtggttggtggtatgtacagatcggggaaaaagaagggtgggccccagctagctatatcgataagaggaagaaacctaacctcagcagaaggacatctactcttactcgtccaaaagtgccccctcctgcccctccgtcaaaaccaaaggaggccgaggagggccccactggtgcgtccgaaagtcaggactccccgcgcaagcttaagtacgaggaacccgagtacgatatccccgcttttggctttgactcagaaccggagctcagtgaggagcctgtggaagatagggcctccggagaacgtcggccggcccagccacaccgcccaagccctgctagctcccttcagcgtgcgcgattcaaggtgggagagtccagcgaggacgtggctttagaggaagaaacaatctacgaaaatgaagggtttagaccttacgcagaagacaccctctctgcccgcggctccagtggagacagcgattcacctggtagttcttctctgtcactgacccgcaagaactcaccaaagagcggatcacctaagagcagcagccttcttaagctgaaagccgaaaaaaatgcccaggctgagatgggtaaaaaccatagctccgcgtcattcagcagcagcattaccattaataccacgtgctgctcaagcagctcctccagctcatcgagcctttctaagacctccggggacctgaagccacgttctgccagtgacgcgggcattagaggaactcctaaggtcagagctaaaaaagatgccgacgcaaacgccggactcacgtcttgcccccgtgcaaagccttcagtgcggcctaagccctttctgaatcgggccgagtcgcaatcacaagagaagatggatatctcgaccctgcgccggcagttacgccccacaggtcaacttaggggcggtctaaagggatccaaatcagaagacagcgagcttcccccccaaaccgcttcagaagctccctcagagggatcgcgaaggtccagcagcgacttgattactctacccgccacaaccccgccttgtcccaccaaaaaggaatgggaagggccagctacatcctatatgacctgcagcgcctaccagaaggtgcaagactccgagatcagttttcctgccggtgttgaagtccaagtactggaaaagcaggaaagtggctggtggtatgtgagattcggcgagctagaaggatgggccccaagtcactacctggtgctggacgagaacgagcagcccgatccatctggcaaggaactggacacagtgcctgctaaaggtcgccagaatgaggggaagagcgactcactggagaaaattgagcggcgcgtgcaggcactgaacacagttaatcaaagcaaaaaagcaactcctcccattccaagcaaacctccaggaggatttggcaaaacatccgggacgcccgctgtgaagatgcgcaacggcgtgcggcaggtagctgtgcgtccacagtcggtgtttgtatcccctccaccaaaggacaataacctgtcttgcgcccttcgccgtaatgaatcactgactgccaccgacgggctgaggggagtgcgcagaaactcatctttctccaccgcacggtccgccgcggccgaagccaaaggccgcctcgccgaacgggccgcttctcaggggagtgactcgccacttttgcctgcccagcggaacagcattcctgtgagccccgttcggcccaaaccaatcgaaaagagtcaatttatacataacaacctgaaagacgtttacgttagtattgcagattacgaaggggacgaagagacggctgggttccaggaaggggtgtccatggaagtactggagagaaatcctaatggttggtggtattgccagattctcgatggagtgaagccatttaaaggctgggtacccagcaactacctcgaaaaaaaaaactag

SEQ ID NO: 181207 - DNA, 2823 bp, Artificial Sequence
  derived and/or modified sequence
atgattttagagcaatacgtcgtggtgagcaactataagaaacaggagaacagcgaactgagtttacaggcgggagaagtagtggacgtgatcgaaaagaacgagagtgggtggtggtttgtgagcacaagcgaagagcagggctgggtgccagccacgtatctcgaggcacaaaacgggactcgcgacgattctgatattaatacctcgaaaaccggagaagaggaaaagtacgtgaccgtgcagccctatacaagccagagcaaggatgagattggcttcgagaagggagttaccgttgaagtgattagaaaaaacctcgagggatggtggtacatcagatatctgggtaaagagggatgggcccctgcatcctacctcaaaaaggcaaaggatgatctgccgacccgcaaaaagaatctggcaggtccagtagagattatcgggaatatcatggaaatctctaacctattgaacaagaaagcttcgggggacaaagagacacctcccgctgaaggcgaaggccatgaggcgccaattgctaagaaagagatttccctgcctatcctatgtaatgcttctaacggatcagcggtaggagtgcctgacagaaccgtaagccggctggcgcagggaagtcccgcagtcgccagaatcgccccacagcgcgcacagatttcctctcccaatctgcgcacccgcccacctccgaggagagagtcctctctgggattccagctgcccaaaccaccagaaccccctagcgttgaagtcgagtactatacgatagcagaatttcaaagttgtataagcgacggaatcagcttccgcggtggccagaaggcagaagtcattgacaaaaattccgggggatggtggtacgtgcagattggtgaaaaagaaggctgggctcccgcatcctatatcgataagcgcaagaaacccaatctgtcccgcaggaccagcaccctcacccgccctaaggtcccacctccagcccctccctcgaagcctaaagaggctgaagagggacctaccggcgcatccgagagccaagattcaccgagaaaactcaaatacgaagagcccgaatatgatataccagcctttggattcgacagcgaaccagaactgtccgaagagcccgttgaggaccgggcttccggggagcggaggcccgcacaaccccatagacccagccctgccagctctcttcagcgagccagattcaaggtaggcgagtcaagtgaggacgtggcgctggaagaagaaaccatctacgagaatgagggattcagaccatatgccgaggacaccctgagcgctcgaggttcaagcggagacagcgacagccctggaagttcctctctctccctgactcgaaagaacagtcccaaaagtggtagcccaaaatctagcagtctgttgaaactgaaagcagagaagaacgcccaggctgaaatggggaaaaaccatagttcggcttccttttcaagtagtatcactattaatactacttgctgttcatcctcctcatcaagctcttcttctctttccaaaacgagcggggacttgaaaccacgatctgcttcagacgccggaataagaggaactcctaaagtcagggccaagaaggacgccgacgcaaatgctgggctcacgagctgtcccagagccaagccttcagtccggccaaaaccatttctcaaccgggctgagagccagtctcaggagaaaatggacatctccaccctccggagacagctgaggccgaccggacagttacggggtggattgaaggggagcaaatccgaagattcagagcttcccccacagactgctagcgaggcgccatccgagggaagcaggcgatcgagtagcgatttgattactctaccagccacaacacccccatgccccacaaaaaaagaatgggaaggtcccgctacctcgtacatgacctgctctgcataccagaaagtacaggacagtgaaatttctttcccggctggggtggaagtccaggtccttgagaaacaggaatcgggatggtggtatgttcgcttcggtgagttagaaggctgggctccctcacactaccttgtactggacgagaatgagcaaccagatccatcgggtaaggagcttgatactgtcccggcaaagggcaggcagaatgagggtaagagtgattctctggaaaagatcgaacggagagttcaggctcttaatacagtgaatcagtctaagaaagcaactcctccaattccaagcaaaccaccaggcggattcgggaagacttccggcacccccgcagtcaagatgcggaatggagtgcggcaagtcgctgttcgcccacagtcagtttttgtatcacccccaccaaaggacaacaatctgagctgcgctctgcggaggaacgaaagtctcacagctacagatggcctgcggggagtccgaagaaatagcagctttagtactgcacggtccgccgcagccgaagccaagggtagactcgccgaacgggcagcatcccaaggtagcgacagtcctctcctgcccgctcagcgcaactcgataccagtgagccctgtgcggcctaaacccattgagaagtctcagttcatacacaacaacttgaaggatgtgtatgtgtcaatcgccgactacgaaggggatgaagagacagcgggattccaggaaggcgtgtctatggaggtactagagcggaacccgaacggctggtggtactgccagatcctcgacggtgttaaaccttttaaaggatgggtcccaagcaattacctagagaagaagaactag

SEQ ID NO: 181208 - DNA, 3318 bp, Artificial Sequence
  derived and/or modified sequence
atgctggcctactgcgtccaggacgccacggttgtggacgtggagaaacggaggaatccctccaagcactacgtctacatcataaacgtgacttggtccgactccactagtcagactatttatagaaggtactccaagttctttgacctacagatgcagctgttggataaatttcctatcgaaggagggcagaaagatcccaaacagcgcatcataccgttcttaccgggaaaaatactcttccgcaggtctcacattagggacgtggctgtgaaaagactgaaacctattgacgagtactgtcgggctctcgtcaggttacccccacacatttcgcagtgtgacgaggtgttcagattttttgaggctaggcccgaagacgtgaacccccctaaggaggattacggttcttcgaagcgcaagtccgtgtggctctcatcctgggctgaaagtcccaaaaaggacgtgactggtgctgacgcaacagctgagcccatgatattagagcagtacgtcgtagtctcaaactataagaaacaggaaaattctgaactgagtttacaggccggagaggtggtggacgttatagagaagaacgagagcggatggtggtttgtatctaccagtgaggaacagggctgggtgccggctacctacctggaagcccaaaatggaacgcgcgatgactccgacatcaatacatctaaaactggcgaggaagaaaagtatgtgacggtgcaaccatatacaagccagtccaaggacgagatcggttttgaaaaaggggtgacagtggaggttattcgtaagaacctggaagggtggtggtacattcgctatctgggtaaggagggttgggcccctgcctcttatttgaagaaggctaaagatgatctgccgacgcgcaaaaagaatctggctgggccagttgagatcattggaaacatcatggagattagtaatttgctcaataaaaaggccagtggcgataaagagaccccacctgctgagggcgaagggcacgaggctccaatcgctaagaaggaaatatccttgccaattctttgtaatgcatccaatggaagcgctgtgggtgtgccagacaggaccgtctcccgcctagctcagggaagccccgcagtagcgaggattgcccctcagcgcgctcaaatcagttcaccgaaccttagaacacgacctccgcctcgtcgggaatcctccctgggattccaactccctaagcccccagagcctcccagcgtagaggtggagtattacacgatcgctgagttccagagctgtattagtgatggtatttctttccggggaggccaaaaggcagaggtgattgataagaactctggcggatggtggtacgttcaaattggggagaaggagggatgggcccctgccagctatattgacaagaggaaaaagcccaacttgtcccggaggacctctaccttgacccggccaaaggttccgcctccagcgcctccgtctaaaccaaaagaggctgaggagggtcccactggcgcaagcgagagtcaggatagccccagaaagctgaagtacgaggaacctgagtacgacatacccgcattcggtttcgatagtgaacccgaactgagcgaagaaccagtggaggatcgagctagcggcgaaaggaggcccgcacagcctcatagaccctccccagcgagtagcttgcagagagcaaggttcaaagtcggagagtcttccgaggacgttgccctggaggaggagaccatttacgagaatgaaggattccggccatacgcagaggatacacttagcgcaagagggtcatccggcgattcggacagtcccggttcgtcctctctttctctgacccggaagaattccccaaaaagtggtagccctaagtcgtcctctctgctcaagctgaaggcagaaaaaaatgcccaggcggagatgggcaaaaaccacagctcagcatcatttagtagttctatcaccatcaacaccacctgctgtagtagcagctcttctagctcatcctctttgtccaagacctctggcgacctgaaaccacgcagtgcaagcgacgccggaattcgcggaacaccgaaggtgagagcaaagaaagatgccgatgccaatgctggtctcaccagttgtccccgagcgaagccctccgtaagacctaagcccttcctgaatagggccgagagtcagtctcaggagaagatggacatctctacactgcggagacaattaagaccgaccggacagctgcggggaggcctgaaagggtctaaatccgaggattccgagcttccccctcagactgcctcagaggctcctagcgagggatccaggagatcgtcgagtgatctgatcaccctgcccgcaacaaccccgccttgtcccactaaaaaggaatgggaagggcctgccaccagctatatgacctgcagcgcataccagaaagtgcaggatagcgagatctcgttccctgcgggagtcgaagtgcaagtgttagagaaacaggaatctgggtggtggtatgtgaggttcggcgagctcgagggctgggccccaagccattacttggtgctggatgagaatgagcagcctgacccctctgggaaagagctcgacacagtgccagcgaagggcaggcagaacgagggcaaaagtgatagcctggagaagattgagcgacgagtccaggctctgaacaccgttaatcagtctaaaaaggcgaccccccctattccttcaaagcctccaggcggatttggtaaaacctccggaacacctgcagtgaagatgaggaatggtgtcagacaggttgcggtgcggcctcaaagcgtttttgtatccccgccaccgaaggataacaatctcagttgcgcactacgacggaacgagagtctgacagctacagatggactccgcggtgttagacggaattctagttttagcactgccagatccgccgcagcagaagctaaaggtaggctggctgaacgtgccgcttctcagggcagcgacagcccattgctacccgcacagcggaacagtataccagtttctccagtacggccaaagcccattgaaaaatctcagtttatccataacaatctcaaggacgtgtacgtgagtattgcagattatgagggagacgaagaaacagcgggattccaggaaggggtcagcatggaagttctcgagcggaatcctaacggatggtggtattgtcagattctcgatggggtgaaaccatttaaaggttgggtgccgagcaattatctggagaaaaaaaattag

SEQ ID NO: 181209 - DNA, 3183 bp, Artificial Sequence
  derived and/or modified sequence
taattcttcgatttacaaatgcaactgctggataagttccctatcgaaggaggtcagaaggaccccaaacagaggatcattccctttctccccggaaaaatcctcttcagaaggtcacacatacgagacgtcgcggtcaaacgcctcaagcctatcgatgagtactgtcgcgctttagtgcgtcttccaccgcacatatctcagtgcgatgaggtctttcggttttttgaggctcggccagaggatgttaaccccccaaaggaggattacggatctagcaagcgcaaaagcgtctggctctcctcctgggcggagagtccaaaaaaagacgttactggcgctgatgctaccgccgagccaatgattcttgaacaatacgtcgtggtgagcaattacaaaaaacaggaaaacagcgagttatccttgcaggcaggcgaggtggtcgatgtgatcgagaaaaacgagagtggttggtggttcgtgtccactagcgaagaacagggatgggttcccgctacctacctcgaggcccagaacgggacaagggacgacagcgatataaacacgtccaaaacaggagaggaagaaaagtatgtgaccgtgcaaccttatacaagccagagcaaggacgagattggcttcgaaaagggggtaaccgtggaggtcatccgcaaaaacctggagggatggtggtacatcagatacctggggaaagagggatgggccccagcgtcctacctcaagaaagcgaaggacgacctgcctactcggaagaagaatctcgcaggcccagtggagatcatcggtaacattatggagatatccaacctactgaataagaaagcttcaggagataaggagaccccgcctgccgagggcgaaggacacgaagcacctattgctaagaaggaaatctccctcccaattctgtgtaacgcatctaacggatcagctgtcggcgtcccagaccgcacagtatcaagattagcgcagggctctcccgcagtggccagaatcgccccacagagggcgcagatttcctctccaaacctaaggactaggcctcctccaaggcgtgagtccagcttagggttccagctcccaaagccacctgagccccctagtgttgaggtcgagtactacactattgctgaatttcagagttgtattagtgacggtatctccttccggggagggcagaaagccgaagtcatcgacaagaattcgggtggatggtggtacgtacagattggcgaaaaggagggctgggccccagccagctacattgataaaagaaaaaagcctaatctgtctcggcgtaccagcacccttactcgcccaaaagtaccacctcctgccccaccctcaaagcccaaagaagccgaggaaggaccgacaggcgcaagcgagtctcaggatagcccccgtaaattgaagtacgaagagcctgagtacgacatcccagccttcggcttcgatagtgagccagaactctcggaggagcccgtagaagatcgtgctagcggcgagcggaggcctgcccaacctcataggccttcaccagcatcttctctccagcgtgcaaggttcaaagtcggagagtcaagcgaagacgtagcattggaggaagaaaccatctacgaaaacgagggctttaggccttacgctgaagacaccctgtccgcgcgaggatcgagtggggatagcgatagcccgggttcttcaagcctaagcctaacacggaagaacagtcccaagtccggcagcccaaagtcatcctcgctcctcaaactcaaggccgagaagaacgcccaagccgagatggggaagaaccatagcagcgctagctttagcagctccatcacaatcaacactacatgttgcagtagttcctctagctctagttccagccttagcaagacatctggggatcttaagccaagaagcgccagtgatgccggaatacggggtaccccaaaggtgcgtgccaaaaaggacgctgacgcaaacgcagggctgacatcttgccctcgggctaagccttcagtcagaccaaagccctttttgaatcgtgcagaatcgcagtcccaagagaaaatggatatcagcacattgcgcagacagctgcgacccaccggccagctccgtggaggcttgaagggctctaagtctgaagattcagaattgccacctcaaactgcatccgaagcaccaagcgaaggcagccggagatcaagttctgatttaataaccctgccggcaactacgccaccatgtccaactaaaaaagagtgggaaggacctgcaacctcctacatgacctgcagcgcatatcagaaggtacaagactctgagatctccttccctgctggtgtcgaagtgcaggtactggagaagcaggagagtgggtggtggtacgtccggttcggggagctggaagggtgggccccttcccattacctggttctggacgagaatgaacagccagacccctcagggaaggagctcgacactgtgcctgccaagggtcggcagaatgagggcaagtcagattccttggagaaaattgaacgcagggtacaagcgctgaatactgtgaatcaaagcaagaaggccacccctcctattccaagcaagcctccgggaggatttggtaagactagcgggacaccagcggtgaaaatgagaaacggtgtcaggcaggtcgccgttagaccacagtctgtctttgtttcccccccacctaaggataacaatctaagctgtgcactgagacgcaacgagtcgttaacagcaactgatggacttcggggagtaaggagaaacagctcctttagcacagcccgttccgctgccgcagaagccaagggcaggttggcagagagagccgcatcgcagggcagcgatagtccattgctgcccgctcagagaaattccattcctgtatcacctgtcaggccaaagcccattgaaaagagtcagtttatccataacaacctgaaggacgtgtacgtttcaatcgccgattacgagggtgatgaagaaactgccggattccaggaaggcgtctccatggaagtgcttgagagaaacccaaatggatggtggtattgtcaaatcttggacggagtcaaaccatttaaaggatgggttccttcaaactatctggagaagaagaattag

SEQ ID NO: 181210 - DNA, 5356 bp, Artificial Sequence
  derived and/or modified sequence
cacaaatctgtgattacctggcgggtgaaccgctccggtggcggggagagcgggctcccagcgctgggtaggggccgggttccggcgagcgccatcccggagcgtcagtttcccagtttgggaagtgaggagaacctgcctcgcccttccccgccaaggcttagggaagtgtggctgtccagctgggctgagtcgcccaagaaggacgtgacaggtgccgacgccaccgccgagcccatgatcctggaacagtacgtggtggtgtccaactataagaagcaggagaactcggagctgagcctccaggccggggaggtggtggatgtcatcgagaagaacgagagcggctggtggttcgtgagcacttctgaggagcagggctgggtccctgccacctacctggaggcccagaatggtactcgggatgactccgacatcaacacctctaagactggagaagaggagaagtatgtcaccgtgcagccttacaccagccaaagcaaggacgagattggctttgagaagggcgtcacagtggaggtgatccggaagaatctggaaggctggtggtatatcagatacctgggcaaagagggctgggcgccagcatcctacctgaagaaggccaaggatgacctgccaacccggaagaagaacctggccggcccagtggagatcattgggaacatcatggagatcagcaacctgctgaacaagaaggcgtctggggacaaggaaactccaccagccgaaggcgagggccatgaggcccccattgccaagaaggagatcagcctgcccatcctctgcaatgcctccaatggcagtgccgtgggcgttcctgacaggactgtctccaggctggcccagggctctccagctgtggccaggattgcccctcagcgggcccagatcagctccccgaacctacggacaagacctccaccacgcagagaatccagcctggggttccaactgccaaagccaccagagcccccttctgttgaggtggagtactacaccattgccgaattccagtcgtgcatttccgatggcatcagctttcggggtggacagaaggcagaggtcattgataagaactcaggtggctggtggtacgtgcagatcggtgagaaggagggctgggcccccgcatcatacatcgataagcgcaagaagcccaacctgagccgccgcacaagcacgctgacccggcccaaggtgcccccgccagcaccccccagcaagcccaaggaggccgaggagggccctacgggggccagtgagagccaggactccccgcggaagctcaagtatgaggagcctgagtatgacatccctgcattcggctttgactcagagcctgagctgagcgaggagcccgtggaggacagagcctcaggggagaggcggcctgcccagccccaccggccctcgccggcctcttctctgcagcgggcccgcttcaaggtgggtgagtcttcagaggatgtggccctggaagaggagaccatctatgagaatgagggcttccggccatatgcagaggacaccctgtcagccagaggctcctccggggacagcgactccccaggcagctcctcgctgtccctgaccaggaaaaactcccccaaatcaggctcccccaagtcatcatcactcctaaagctcaaggcagagaagaatgcccaggcagaaatggggaagaaccactcctcagcctccttttcctcatccatcaccatcaacaccacttgctgctcctcctcttcctcctcctcctcttccttgtccaaaaccagtggcgacctgaagccccgctctgcttcggacgcaggcatccgcggcactcccaaggtcagggcaaagaaggatgctgatgcgaacgctgggctgacctcctgtccccgggccaagccatcggtccggcccaagccattcctaaaccgagcagagtcgcagagccaagagaagatggacatcagcactttacggcgccagctgagacccacaggccagctccgtggagggctcaagggctccaagagtgaggattcggagctgcccccgcagacggcctccgaggctcccagtgaggggtctaggagaagctcatccgacctcatcaccctcccagccaccactcccccatgtcccaccaagaaggaatgggaagggccagccacctcgtacatgacatgcagcgcctaccagaaggtccaggactcggagatcagcttccccgcgggcgtggaggtgcaggtgctggagaagcaggagagcgggtggtggtatgtgaggtttggggagctggagggctgggccccttcccactatttggtgctggatgagaacgagcaacctgacccctctggcaaagagctggacacagtgcccgccaagggcaggcagaacgaaggcaaatcagacagcctggagaagatcgagaggcgcgtccaagcactgaacaccgtcaaccagagcaagaaggccacgccccccatcccctccaaacctcccgggggcttcggcaagacctcaggcactccagcggtgaagatgaggaacggagtgcggcaggtggcggtcaggccccagtcggtgtttgtgtccccgccacccaaggacaacaacctgtcctgcgccctgcggaggaatgagtcactcacggccactgatggcctccgaggcgtccgacggaactcctcctttagcactgctcgctccgctgccgccgaggccaagggccgcctggccgaacgggctgccagccagggttcagactcacccctactgcccgcccagcgcaacagcatacccgtgtcccctgtgcgccccaagcccatcgagaagtctcagttcatccacaataacctcaaagatgtgtacgtctctatcgcagactacgagggggatgaggagacagcaggcttccaggagggggtgtccatggaggttctggagaggaaccctaatggctggtggtactgccagatcctggatggtgtgaagcccttcaaaggctgggtgccttccaactaccttgagaaaaagaactagcagagggcctgggctcttccagcctcagtgtgcctctctggccgcccactggatgagcggtgagacgaacaaaagggaaaggaaaaaatgggggtggggggtggggggtggacaacattcaacactgcagaatgggtgacctcaaagatgccccctgtccaagccatcccacagctggaaggtaggggatgggggtgcccacactgagtgaggaagggaatggaccagggagtcccaggcctgggacccagagccaagaaagctgagatatcctgtgcaccatagggacttcaccaatggattacatgccatctgggacaggccatgtgggagaccccagttgtgcctttgctacagatctggaaaagacaaggtcatgggggcctccagtgtcctgcccctgcttggcccagttttgattgctggcatcttgccaccccaggtatccctggtattgtcctaagctgtatttgtgaattgtgctggtttcctgggcattgccacgcctaccacaggtgggtacattagaagccaccactggctttcaggcttgggggtgtcttctgagctcaagcctgcttctgggccaggccattgtcactgttagttgaagaaaaagcagttcccaggtgccagcaaagaccatctttcataactgtcactgtcttggccttgagaagagagcccgctctccgtggggcaccccatggaggacacagtaccagagtttacagagagggtgggcgaagccaccggtctcttcctaatctgcacagactattttgggtatttctgggcgggcagttcctttgcatgtttcgggagaggtttgttgatttggggcttatatgtcaggcctttggtttgcgtcttattttaggggttgtttgggggcctgggtggtcggcctcacatgggaaggggatgggtagtggatggggtttctgttgtatcttgtgggcgggtgattttgcttttgtttttgtttcacattcttccccctccacaagccaaagtcgtttcatttggtttccactgtgtggactgtgctggagcttggcgcctgccagaaaaatttggggctaggcaagccccaggttgcagacatggtgaagcagagaaactgttcttctggttcctgcacaacctcagaggggcaaaaaccctccccaggaaggaggagggtgttcaggagccagacttttggagagaaggcagctcccagcctgctgggtgaccgccattctgcgtgtgttccccagctgggcagggctggaagccttacgtatgaagcatggagaagcagccattgtccccactatgggcagaggggggacccggctggccccttgggtcagactggagccaacaccgccagccaccccctctggcctgctggcaatgccacaggtgcccaagaagatggaggatccctgtgccaggagccaacctggtcttcccgagggtcagtgccccagtgaagacagaagcgagagaataaagttccctgtaggtcctctgtcacctttgggttgtgtttttcaattgttgacatttcagaggggaccctccagaagcccagccggcttcccccaaggactcccccttcgctgggagtggatttccacacgtgcctttgatttcggacagattgggcctcacagccaccgattcagctgccagggtccctggactgggggttggtgttttctatagaggaggaaaggccctccctcaccctgctccccacccaggcagggcagcatgggacccagtgtctcagtgccttcaaaacccacccccacccctaccctaccccaccacaccccatcccagaggccttgcctgggcaaccctaagcccctgtccctcgccatacactgatgcctggcagctagagcaaatggctcgtgttctttgtcgaaggcctgtggtgagattgttttgtttccttttgttttgtgagtttgtttaaaattgaaattagttattttcttctgctggacagtattaaatagagcaggatgttgagttaatctgctagattgcagtactaatggtagtggtttagtgtcttcatgttaatattatttgtacttatttgaacaataatgataaagaagtggttcattattttttaattaatgcactttaaataaggtagaatggaaaaaacccagagagcaaagtgcattacttaaagatgcagtatatacttttctcatttttaaacagcacatatttattaagagaaaaaaagtaatttatgactatttaaaataaaatttaaaagtag

SEQ ID NO: 181211 - DNA, 11245 bp, Artificial Sequence
  derived and/or modified sequence
ccgggagtccgggcagcgttcggcgcgccgggccggggtggcgggcggccccgggaccccggcagctggagaaggagccggagcccggccgggatgagaaggtgacgccgccgggggcgccactcgctttgtgggggaagatgctcgcctactgcgtgcaggatgccaccgtggtggacgtggagaagcggaggaacccctccaagcactacgtatacataatcaatgtgacctggtctgactccacctcccagactatctaccggaggtacagcaagttctttgacctgcagatgcagcttttggataagtttcccattgaaggtggccagaaggaccccaagcaaaggatcatccccttcctcccaggcaagatcctcttccgcagaagccacatccgggacgtagctgtgaagagactgaagcccatcgatgaatactgccgggcacttgtccggctgcccccccacatctcacagtgtgacgaagtcttccggttcttcgaggctcgacccgaggatgtcaaccctccaaaagaggactatggcagttccaagaggaaatcagtgtggctgtccagctgggctgagtcgcccaagaaggacgtgacaggtgccgacgccaccgccgagcccatgatcctggaacagtacgtggtggtgtccaactataagaagcaggagaactcggagctgagcctccaggccggggaggtggtggatgtcatcgagaagaacgagagcggctggtggttcgtgagcacttctgaggagcagggctgggtccctgccacctacctggaggcccagaatggtactcgggatgactccgacatcaacacctctaagactggagaagaggagaagtatgtcaccgtgcagccttacaccagccaaagcaaggacgagattggctttgagaagggcgtcacagtggaggtgatccggaagaatctggaaggctggtggtatatcagatacctgggcaaagagggctgggcgccagcatcctacctgaagaaggccaaggatgacctgccaacccggaagaagaacctggccggcccagtggagatcattgggaacatcatggagatcagcaacctgctgaacaagaaggcgtctggggacaaggaaactccaccagccgaaggcgagggccatgaggcccccattgccaagaaggagatcagcctgcccatcctctgcaatgcctccaatggcagtgccgtgggcgttcctgacaggactgtctccaggctggcccagggctctccagctgtggccaggattgcccctcagcgggcccagatcagctccccgaacctacggacaagacctccaccacgcagagaatccagcctggggttccaactgccaaagccaccagagcccccttctgttgaggtggagtactacaccattgccgaattccagtcgtgcatttccgatggcatcagctttcggggtggacagaaggcagaggtcattgataagaactcaggtggctggtggtacgtgcagatcggtgagaaggagggctgggcccccgcatcatacatcgataagcgcaagaagcccaacctgagccgccgcacaagcacgctgacccggcccaaggtgcccccgccagcaccccccagcaagcccaaggaggccgaggagggccctacgggggccagtgagagccaggactccccgcggaagctcaagtatgaggagcctgagtatgacatccctgcattcggctttgactcagagcctgagctgagcgaggagcccgtggaggacagagcctcaggggagaggcggcctgcccagccccaccggccctcgccggcctcttctctgcagcgggcccgcttcaaggtgggtgagtcttcagaggatgtggccctggaagaggagaccatctatgagaatgagggcttccggccatatgcagaggacaccctgtcagccagaggctcctccggggacagcgactccccaggcagctcctcgctgtccctgaccaggaaaaactcccccaaatcaggctcccccaagtcatcatcactcctaaagctcaaggcagagaagaatgcccaggcagaaatggggaagaaccactcctcagcctccttttcctcatccatcaccatcaacaccacttgctgctcctcctcttcctcctcctcctcttccttgtccaaaaccagtggcgacctgaagccccgctctgcttcggacgcaggcatccgcggcactcccaaggtcagggcaaagaaggatgctgatgcgaacgctgggctgacctcctgtccccgggccaagccatcggtccggcccaagccattcctaaaccgagcagagtcgcagagccaagagaagatggacatcagcactttacggcgccagctgagacccacaggccagctccgtggagggctcaagggctccaagagtgaggattcggagctgcccccgcagacggcctccgaggctcccagtgaggggtctaggagaagctcatccgacctcatcaccctcccagccaccactcccccatgtcccaccaagaaggaatgggaagggccagccacctcgtacatgacatgcagcgcctaccagaaggtccaggactcggagatcagcttccccgcgggcgtggaggtgcaggtgctggagaagcaggagagcgggtggtggtatgtgaggtttggggagctggagggctgggccccttcccactatttggtgctggatgagaacgagcaacctgacccctctggcaaagagctggacacagtgcccgccaagggcaggcagaacgaaggcaaatcagacagcctggagaagatcgagaggcgcgtccaagcactgaacaccgtcaaccagagcaagaaggccacgccccccatcccctccaaacctcccgggggcttcggcaagacctcaggcactccagcggtgaagatgaggaacggagtgcggcaggtggcggtcaggccccagtcggtgtttgtgtccccgccacccaaggacaacaacctgtcctgcgccctgcggaggaatgagtcactcacggccactgatggcctccgaggcgtccgacggaactcctcctttagcactgctcgctccgctgccgccgaggccaagggccgcctggccgaacgggctgccagccagggttcagactcacccctactgcccgcccagcgcaacagcatacccgtgtcccctgtgcgccccaagcccatcgagaagtctcagttcatccacaataacctcaaagatgtgtacgtctctatcgcagactacgagggggatgaggagacagcaggcttccaggagggggtgtccatggaggttctggagaggaaccctaatggctggtggtactgccagatcctggatggtgtgaagcccttcaaaggctgggtgccttccaactaccttgagaaaaagaactagcagagggcctgggctcttccagcctcagtgtgcctctctggccgcccactggatgagcggtgagacgaacaaaagggaaaggaaaaaatgggggtggggggtggggggtggacaacattcaacactgcagaatgggtgacctcaaagatgccccctgtccaagccatcccacagctggaaggtaggggatgggggtgcccacactgagtgaggaagggaatggaccagggagtcccaggcctgggacccagagccaagaaagctgagatatcctgtgcaccatagggacttcaccaatggattacatgccatctgggacaggccatgtgggagaccccagttgtgcctttgctacagatctggaaaagacaaggtcatgggggcctccagtgtcctgcccctgcttggcccagttttgattgctggcatcttgccaccccaggtatccctggtattgtcctaagctgtatttgtgaattgtgctggtttcctgggcattgccacgcctaccacaggtgggtacattagaagccaccactggctttcaggcttgggggtgtcttctgagctcaagcctgcttctgggccaggccattgtcactgttagttgaagaaaaagcagttcccaggtgccagcaaagaccatctttcataactgtcactgtcttggccttgagaagagagcccgctctccgtggggcaccccatggaggacacagtaccagagtttacagagagggtgggcgaagccaccggtctcttcctaatctgcacagactattttgggtatttctgggcgggcagttcctttgcatgtttcgggagaggtttgttgatttggggcttatatgtcaggcctttggtttgcgtcttattttaggggttgtttgggggcctgggtggtcggcctcacatgggaaggggatgggtagtggatggggtttctgttgtatcttgtgggcgggtgattttgcttttgtttttgtttcacattcttccccctccacaagccaaagtcgtttcatttggtttccactgtgtggactgtgctggagcttggcgcctgccagaaaaatttggggctaggcaagccccaggttgcagacatggtgaagcagagaaactgttcttctggttcctgcacaacctcagaggggcaaaaaccctccccaggaaggaggagggtgttcaggagccagacttttggagagaaggcagctcccagcctgctgggtgaccgccattctgcgtgtgttccccagctgggcagggctggaagccttacgtatgaagcatggagaagcagccattgtccccactatgggcagaggggggacccggctggccccttgggtcagactggagccaacaccgccagccaccccctctggcctgctggcaatgccacaggtgcccaagaagatggaggatccctgtgccaggagccaacctggtcttcccgagggtcagtgccccagtgaagacagaagcgagagaataaagttccctgtaggtcctctgtcacctttgggttgtgtttttcaattgttgacatttcagaggggaccctccagaagcccagccggcttcccccaaggactcccccttcgctgggagtggatttccacacgtgcctttgatttcggacagattgggcctcacagccaccgattcagctgccagggtccctggactgggggttggtgttttctatagaggaggaaaggccctccctcaccctgctccccacccaggcagggcagcatgggacccagtgtctcagtgccttcaaaacccacccccacccctaccctaccccaccacaccccatcccagaggccttgcctgggcaaccctaagcccctgtccctcgccatacactgatgcctggcagctagagcaaatggctcgtgttctttgtcgaaggcctgtggtgagattgttttgtttccttttgttttgtgagtttgtttaaaattgaaattagttattttcttctgctggacagtattaaatagagcaggatgttgagttaatctgctagattgcagtactaatggtagtggtttagtgtcttcatgttaatattatttgtacttatttgaacaataatgataaagaagtggttcattattttttaattaatgcactttaaataaggtagaatggaaaaaacccagagagcaaagtgcattacttaaagatgcagtatatacttttctcatttttaaacagcacatatttattaagagaaaaaaagtaatttatgactatttaaaataaaatttaaaagtagagtgactgtcaggtaaagaaccttcaatgtagctatcttccagggggagggccctgcagcctcgctcctcagatgtctgcactgagccagttcagtcactagtgcgccagccaggccaggagggagtgcagagcatgtctgccaagcacagagcatctcagttggactggaccacagtgctcccgagagcctgcctttcctgcccttccccaccacctgcactgccccccacattctcccagccccccccaaggaccccctctccttgacccccagtgctgtaagtaatagagtcattaaaatgcaggactgaaagagacctcagaggtctctatcccatcccttcctgttactgcggcccaaggacaggaaacaacttttccaaaatcccacagctagttaatgacagatctccccactacattaatcccgtgctcctcctcactgccattatagtttattgtgtggtcatgtttacattgtgacatccagccccaaggatggctgggagttgctcaggcatccaggaaaagtggggaatgctgccatctggtgacagcatgtagatttgggcagtgaacagggattgccatgccccagtcttcgcacctcgccccctcaccccctaactcacagcacaaaccctgcaaacccaaagagaatattaatacttgaagcaagaagggtgcatgccagtccttctccgacatggccagggggtaccaggccttgtgcgcctggcctcctagccctagccagggcgagagggcctttcccttgagctactgagctgctttgtgatgctgaaggatactgccggcagcaggcagaggagggagggggcctagggctctgacccatctggaggaaaaccagatcggactaaaaaaggaaaaagaaaaacaaaatctccgcagtgtccaaacctagtttcccatgagttgcgactgaaaatgtgaaacgacactgtattgctgtatactgcaactttaaccataatgagcccttctgaggtcattattgaggttcatataatgcccgaagatgcagcatttggtgctttgttttcctttccgtttcaagacctttttcttttattgcaaggggaaaaaaatgtcatctccccccacctcatccctctttgtgacagcagacctggctgtgttgcccctctcctcctcactattctcaccaggccatgggactttgggggcagtgagagagagctggaaaggggcaaccctgagcagcaggtgtgccccatgccctgtgggtttcccctatgtccaatgactgtagacgggctgtcttgccaggcctcagccccgtctaccctaagcctggccccaaaggtttctctttcttcctccttgattttccatcttgacgaaggcattatatagaatcattttaatcactttcagatgttagagcagcgtattttacaggcatttatatccattgctttcctcagcaaggcatgttactacttttatcatctaaggaaaaaagacaagggaattccagtcaggcattattttcctattactagtgtttgcagaataggtgtaggactatttaagtttagaccttggtttggtagttcttgtttttaataaggggaaaaagataaaataacccctatttttcctgttattgtatttaactaatatattatttctttaaggttactcacttcccctacccctccaaataccttgcattctcaatcaaaaatggaaacaatctgagagacaggaaaagtgcaatattaccaagatggatgccagggctcattggggacaatggagggaataccagtggcgctcagagagcaagaggcagggagcggggtgctgaaggaatcctagctgtggaacaggtgggtgggttggtggagtttgatcttgtggcgttctcctctcccccttctttgggaagatgataggggtccctgccagatccacccagaagaaagggattcaggcatggggcccttgacctctaggccccagtccctggagcagaggcaggccctcgggagctgttccttgttttgatttctgttgtggtgcagccagctgctcagagagacctggcctaaaaatgactcccagcagccctctctcaccccagtgtcctgatatttgggctgtgatccttctggtgtatgtttgaatctttctaaaactgggtgccctcagttcagtttctaggcaggaagcctagaagtcaccagatctttttgggggatgtgagaaccttgagccgcgcacaccctggtgagacaccaattcccacaagcctgcagcagggcctggggctgagcctgggctgcccattcatctcagcgacttcagcctgagaagtgagccctgcctgggctccacacccagagagtccatacaaattctgctccgggaagagtcggggggtctattcaagtttctctgcagacaaaacttcccacaacaggtaccaatctggcctccttcctcagcaccggtagagaaagcaacagaatgggaagtttcctctgggttggagcctcagagctctgcccctcaaggtgacagggacgtccctgtggcttgttccctccacctccagtactgtatgcttgctacttcaaccccctatttggtgaatttctgcacagacacagatctctgtgcctggaatgggactgtgccctgtgcgggtctctcccttggcgtatatccatctagatatttagtctttgagaatctcaaagcagagctctctgggaagagaactgtccacattgctaaataattaagattccctcacttttttgagggccatgtgttgtgagagagagagagagagagagagtgtgtgtgtgtgtgtgtgtgtgtgtgtgtctgtgtatgcaagtgttggtaacttcccacttgaactaaataacatggggttagagaaaaaaaaataccaggcaagctgtctccattgaacaagtccttggcaatgggcaggtcccaagggactcacagcttctggcagcaagtgtgtcattcacacacatcattctggctggagagtgcaatgtgtcatttttttttctttttgtaattattttattaagtatttagttggaaatttcacactggcattaacaggtctagcataagtggcctaggcagtcatcccaggctccaaaatgaagatgtgcaaaagagatgccactgggaatagaaacactgagttggttcagttaggtcatcccctgcagacgtgtcatcgagcaggctgactcccacccctcagccatgccatgggtatgagaagccccttataatgaaagctgccagccctttcgtccttgtttcagagggtgggtcaggtggttggggtgagaacttgctcacggtgcacccaacaagacctgcaggtgcatataagtttagtcccaactgcagggccagaccaaacacttcctgggaagtgtgtggagggctgtgctagaccttcctgagtttctggctaaatcatcagccctgtttggtgcagtctcatgtctctgtggttcccaagctgcatgatcagagccagtgagaagacaggatcagtgacccacagctttggggaaaaacagccccactgttaacttccctcctgcaaacctgggtccccaggccataaggtgggcacactggtgcttacagactgggtggagagccctaccttccaaggtcttgatcccagcctgcctataaggttgggattagcatgcaatcccccttccccaatcctgtctttttaaaatctcaagtttgcacttaaccttgacaacagcaccctctcctactccagtcctagaactcagtggccttagagaatggggtcccctgcactgaaggtccccgccttgctcccagttccatcctggccaataggctgcgcctcaagaggtgaaagagaaaaaagggagggagggaggaagaattatttagaacaaaaggatggctcgagcacgttagaggcaagtgagaggcacgttggtgagaagagcatgtgcatgtttggggtagctggggcctactgtcccttcattagggaaggaggcttccagaagcggatgtcttctagaaagaaaaattgtgtgaaggctgaaaaggggcttggagttttgtctttgttgattagaaagaaggaagaagtcagctctgagtgtttcaggaagaagagagcaggtagaaagggaatttagtgatttaacacccaagggtccagccatagcaggttggaaaatcctccaaatttggccacagaaactggctaggaaaaaactgccactcattgggccacacgctgggtccccatcagttctcaatgaatggtcattgatttacttagcagagagaagtcaccagccacaaaccaatctttgagtttgcaggccctgattccagaatatatgcatccagctcccgggttctcagctggttttgcccacttccctttgactgtccaatccaaagccagtctctcaagttgtatggctcaaagagcagtgaccacaatgggtcatacagtagggacccacctccacaaattagaaccagagttcagactccattgggcacatctgggaggaaggcaacctcctttgtcgtcttgttggtaccagtcattctcaagtatctctgacacctgtggtggttcagtttgctgagcctgccacctggtatgaattagactgggtgtgatgaacattcatccatggatataccctaccattttgcgttgccttataaccaaggcacactccccataagagtttactgcagagaaagaacagcaaaacagccaccctccttgaatttacaactcattatctgcaacaggttttctttaaatccaagacacaggatgggaaatgggtttccccaccaggtactcagaggtctgcaggaagtgactcccgggcaaggcagacttcagtaatccctgaagcgtgagcatgtggactgcatggctgggtggggactggtggatgtctctggagctccagaaccttggagaattcctcatggaattcccctcccagctcttagtgggctctgtggggtcaggaggagcccttcctccaggttttccttctttcctcctcagcagagaaactggagaaaggacattaaactcagtgcagtcgatttgagtgctgaaatatttccagaatcaatggtggtgctaaactatctccatgtttctagcatttttaatagtggagttggtttgtttttaatctcatcacaaaaatgcagtgcccttggggaagggaccagccccttggcctgccactttccaggtgtcctttatcactttgacgggactctttggtctgcagaaaatgctctgtcttggcatgcttctagactgtaagatttgggttttgttttgtattttatgtttacatgcatcttatatttccctgaaaactaaataaagttttgggcctttttaaccg

SEQ ID NO: 181212 - DNA, 3251 bp, Artificial Sequence
  derived and/or modified sequence
gttctttgacctgcagatgcagcttttggataagtttcccattgaaggtggccagaaggaccccaagcaaaggatcatccccttcctcccaggcaagatcctcttccgcagaagccacatccgggacgtagctgtgaagagactgaagcccatcgatgaatactgccgggcacttgtccggctgcccccccacatctcacagtgtgacgaagtcttccggttcttcgaggctcgacccgaggatgtcaaccctccaaaagaggactatggcagttccaagaggaaatcagtgtggctgtccagctgggctgagtcgcccaagaaggacgtgacaggtgccgacgccaccgccgagcccatgatcctggaacagtacgtggtggtgtccaactataagaagcaggagaactcggagctgagcctccaggccggggaggtggtggatgtcatcgagaagaacgagagcggctggtggttcgtgagcacttctgaggagcagggctgggtccctgccacctacctggaggcccagaatggtactcgggatgactccgacatcaacacctctaagactggagaagaggagaagtatgtcaccgtgcagccttacaccagccaaagcaaggacgagattggctttgagaagggcgtcacagtggaggtgatccggaagaatctggaaggctggtggtatatcagatacctgggcaaagagggctgggcgccagcatcctacctgaagaaggccaaggatgacctgccaacccggaagaagaacctggccggcccagtggagatcattgggaacatcatggagatcagcaacctgctgaacaagaaggcgtctggggacaaggaaactccaccagccgaaggcgagggccatgaggcccccattgccaagaaggagatcagcctgcccatcctctgcaatgcctccaatggcagtgccgtgggcgttcctgacaggactgtctccaggctggcccagggctctccagctgtggccaggattgcccctcagcgggcccagatcagctccccgaacctacggacaagacctccaccacgcagagaatccagcctggggttccaactgccaaagccaccagagcccccttctgttgaggtggagtactacaccattgccgaattccagtcgtgcatttccgatggcatcagctttcggggtggacagaaggcagaggtcattgataagaactcaggtggctggtggtacgtgcagatcggtgagaaggagggctgggcccccgcatcatacatcgataagcgcaagaagcccaacctgagccgccgcacaagcacgctgacccggcccaaggtgcccccgccagcaccccccagcaagcccaaggaggccgaggagggccctacgggggccagtgagagccaggactccccgcggaagctcaagtatgaggagcctgagtatgacatccctgcattcggctttgactcagagcctgagctgagcgaggagcccgtggaggacagagcctcaggggagaggcggcctgcccagccccaccggccctcgccggcctcttctctgcagcgggcccgcttcaaggtgggtgagtcttcagaggatgtggccctggaagaggagaccatctatgagaatgagggcttccggccatatgcagaggacaccctgtcagccagaggctcctccggggacagcgactccccaggcagctcctcgctgtccctgaccaggaaaaactcccccaaatcaggctcccccaagtcatcatcactcctaaagctcaaggcagagaagaatgcccaggcagaaatggggaagaaccactcctcagcctccttttcctcatccatcaccatcaacaccacttgctgctcctcctcttcctcctcctcctcttccttgtccaaaaccagtggcgacctgaagccccgctctgcttcggacgcaggcatccgcggcactcccaaggtcagggcaaagaaggatgctgatgcgaacgctgggctgacctcctgtccccgggccaagccatcggtccggcccaagccattcctaaaccgagcagagtcgcagagccaagagaagatggacatcagcactttacggcgccagctgagacccacaggccagctccgtggagggctcaagggctccaagagtgaggattcggagctgcccccgcagacggcctccgaggctcccagtgaggggtctaggagaagctcatccgacctcatcaccctcccagccaccactcccccatgtcccaccaagaaggaatgggaagggccagccacctcgtacatgacatgcagcgcctaccagaaggtccaggactcggagatcagcttccccgcgggcgtggaggtgcaggtgctggagaagcaggagagcgggtggtggtatgtgaggtttggggagctggagggctgggccccttcccactatttggtgctggatgagaacgagcaacctgacccctctggcaaagagctggacacagtgcccgccaagggcaggcagaacgaaggcaaatcagacagcctggagaagatcgagaggcgcgtccaagcactgaacaccgtcaaccagagcaagaaggccacgccccccatcccctccaaacctcccgggggcttcggcaagacctcaggcactccagcggtgaagatgaggaacggagtgcggcaggtggcggtcaggccccagtcggtgtttgtgtccccgccacccaaggacaacaacctgtcctgcgccctgcggaggaatgagtcactcacggccactgatggcctccgaggcgtccgacggaactcctcctttagcactgctcgctccgctgccgccgaggccaagggccgcctggccgaacgggctgccagccagggttcagactcacccctactgcccgcccagcgcaacagcatacccgtgtcccctgtgcgccccaagcccatcgagaagtctcagttcatccacaataacctcaaagatgtgtacgtctctatcgcagactacgagggggatgaggagacagcaggcttccaggagggggtgtccatggaggttctggagaggaaccctaatggctggtggtactgccagatcctggatggtgtgaagcccttcaaaggctgggtgccttccaactaccttgagaaaaagaactagcagagggcctgggctcttccagcctcagtgtgcctctctggccgcccactggatgagcggtgagacgaac

SEQ ID NO: 181213 - protein, 1173 aa, Artificial Sequence
  derived and/or modified sequence
MSRGSIEIPLRDTDEVIELDFDQLPEGDEVISILKQEHTQLHIWIALALEYYKQGKTEEFVKLLEAARIDGNLDYRDHEKDQMTCLDTLAAYYVQQARKEKNKDNKKDLITQATLLYTMADKIIMYDQNHLLGRACFCLLEGDKMDQADAQFHFVLNQSPNNIPALLGKACISFNKKDYRGALAYYKKALRTNPGCPAEVRLGMGHCFVKLNKLEKARLAFSRALELNSKCVGALVGLAVLELNNKEADSIKNGVQLLSRAYTIDPSNPMVLNHLANHFFFKKDYSKVQHLALHAFHNTEVEAMQAESCYQLARSFHVQEDYDQAFQYYYQATQFASSSFVLPFFGLGQMYIYRGDKENASQCFEKVLKAYPNNYETMKILGSLYAASEDQEKRDIAKGHLKKVTEQYPDDVEAWIELAQILEQTDIQGALSAYGTATRILQEKVQADVPPEILNNVGALHFRLGNLGEAKKYFLASLDRAKAEAEHDEHYYNAISVTTSYNLARLYEAMCEFHEAEKLYKNILREHPNYVDCYLRLGAMARDKGNFYEASDWFKEALQINQDHPDAWSLIGNLHLAKQEWGPGQKKFERILKQPSTQSDTYSMLALGNVWLQTLHQPTRDREKEKRHQDRALAIYKQVLRNDAKNLYAANGIGAVLAHKGYFREARDVFAQVREATADISDVWLNLAHIYVEQKQYISAVQMYENCLRKFYKHQNTEVVLYLARALFKCGKLQECKQTLLKARHVAPSDTVLMFNVALVLQRLATSVLKDEKSNLKEVLNAVKELELAHRYFSYLSKVGDKMRFDLALAATEARQCSDLLSQAQYHVARARKQDEEERELRAKQEQEKELLRQKLLKEQEEKRLREKEEQKKLLEQRAQYVEKTKNILMFTGETEATKEKKRGGGGGRRSKKGGEFDEFVNDDTDDDLPISKKKKRRKGSGSEQEGEDEEGGERKKKKRRRHPKGEEGSDDDETENGPKPKKRRPPKAEKKKAPKPERLPPSMKGKIKSKAIISSSDDSSDEDKLKIADEGHPRNSNSNSDSDEDEQRKKCASSESDSDENQNKSGSEAGSPRRPRRQRSDQDSDSDQPSRKRRPSGSEQSDNESVQSGRSHSGVSENDSRPASPSAESDHESERGSDNEGSGQGSGNESEPEGSNNEASDRGSEHGSDDSD

SEQ ID NO: 181214 - DNA, 3522 bp, Artificial Sequence
  derived and/or modified sequence
atgagtcgtggctctatagagattccgctgagggatacagacgaggtcatcgaacttgactttgaccagctcccagagggcgatgaagttataagcattctcaagcaggaacatactcagctgcatatctggatcgctctcgctttggaatactacaaacaaggaaaaactgaagagttcgttaaattgctcgaggccgctagaatcgatggcaatctcgattaccgcgatcatgaaaaggatcagatgacctgccttgatacactggctgcttattacgtgcaacaggcacgtaaggaaaagaacaaagataacaagaaggatctgatcacccaggccacactcttatataccatggctgacaaaatcatcatgtacgaccagaaccacctgttgggccgcgcctgcttctgtctgctggagggcgacaaaatggaccaagcagacgctcagttccattttgtccttaaccagtctcctaacaatatccccgctctgctgggcaaggcttgtatctctttcaataagaaggattaccggggtgccctggcctactacaagaaagccctgagaactaacccggggtgccctgctgaggtaaggcttggcatgggccactgcttcgtgaagctgaacaagttggaaaaagcgcgcctggccttctctcgggcactggaactgaactctaaatgtgtcggggcactggttggtctggcagtgctggagctgaacaacaaggaagcggatagtattaagaatggcgtgcagttgctgtcccgagcttacaccatcgacccctctaacccaatggttcttaaccatctcgccaaccacttcttcttcaagaaggactacagcaaggtgcagcatttggcattgcacgcgttccacaacactgaggtggaggccatgcaggctgaaagctgttatcagctagcccgcagctttcatgtgcaggaggactatgaccaggcatttcagtactactatcaagccacccagttcgcatcatctagcttcgtacttccctttttcgggttgggccagatgtatatctatcgcggcgacaaggaaaacgcctctcagtgctttgaaaaggtgttaaaggcctatccaaataattatgagacaatgaaaattcttgggtctctctacgccgcatccgaggatcaggagaaacgcgacatcgcaaaaggccatctgaaaaaagttaccgaacagtatccagacgatgtggaggcctggatagaactggcgcaaatactggagcagactgacattcagggtgccctgagtgcctatggtactgccacccgcattctgcaggaaaaggttcaagccgacgtgccgcctgaaattcttaataatgtgggggctctgcattttcgactgggaaatcttggcgaggcgaaaaaatactttctggcctcactggacagagccaaagccgaagccgagcatgacgagcattattacaatgccatttccgtcaccacatcgtacaacttagcaagactttatgaagctatgtgcgaattccacgaggctgaaaaactgtacaagaatattctgcgggaacatcccaattatgttgactgctatctccggctgggtgctatggcgcgtgataagggtaacttctacgaagccagcgattggttcaaggaggccctccaaatcaatcaggaccatcctgatgcatggtccctcatcgggaatctgcacttagcaaaacaggagtgggggccaggacaaaaaaaattcgaacgcattctgaagcagccctcgacacagtctgacacctactccatgctggcactgggcaatgtgtggctgcagacacttcatcaacctacacgcgatagggagaaggagaagaggcaccaggaccgggccctggcaatatataaacaggtgctccgcaacgacgccaaaaacctttatgcagctaatggaattggggccgtgcttgcacataaggggtatttccgggaggcgcgcgacgtattcgcgcaggttcgcgaagctacggccgatattagtgatgtatggctgaatttagctcatatctacgtggagcagaagcaatacatttcggccgtgcagatgtacgaaaactgcctgcgcaaattctacaagcatcagaatacagaggttgttctatatctggcccgagccctgtttaaatgcggaaagctgcaggagtgtaagcaaaccctgttaaaggcgaggcacgtggctccctcagatactgtgttaatgtttaatgtcgccttggtcttgcagaggctagccacttcagtgctgaaggacgagaagtctaacttgaaagaggtgctgaacgctgtcaaggagttggagttggcccatcgatatttttcctacttgtccaaggtgggagacaagatgagattcgatctcgcactcgcagcgacggaggcccggcagtgctctgaccttctgagtcaagcccaatatcacgtggcacgggctcgaaagcaagacgaggaagagcgggaactccgagcaaagcaggagcaggaaaaggagttgttaaggcagaagcttctgaaggagcaggaagagaagaggcttcgagagaaggaagagcagaagaagctcctggaacagcgcgcacaatatgtggaaaagacaaaaaacattcttatgtttacaggcgaaactgaggcaacgaaagagaagaagcggggtgggggcggaggaaggcggagtaaaaaaggcggcgaatttgacgaattcgtaaatgacgataccgacgacgatctgcctatcagtaaaaagaagaagaggagaaaggggagcggttctgaacaggaaggcgaagacgaggagggcggcgagcggaagaagaagaaaagacgccggcatcccaagggcgaggaaggatcagatgatgacgaaactgagaacggtcccaaacccaagaaaaggcgaccccccaaagccgagaagaagaaggcgcctaagccggaacgattgccgccttccatgaagggcaagattaagagtaaggccataatctcctctagcgacgatagttcagacgaagacaagctcaagatcgccgatgaggggcacccacggaactccaactcaaattccgactcagacgaggacgaacagagaaaaaagtgtgcgtcatctgaatctgactctgatgagaatcaaaataaaagcggctccgaggctgggagccctcgcaggcctcgccggcagcggagcgaccaggattccgactcggaccagccgtcacggaaacggaggccttctgggagcgagcaatccgataatgaaagcgtacaatccggccgcagtcattccggtgtgtctgaaaatgactctcggccagcatctccttccgctgagtctgaccacgagtctgagaggggaagcgataacgaaggctccggccagggaagcgggaacgagtcagagcctgaggggtcaaataatgaggccagcgaccgtgggtcggaacatggcagcgatgattctgattag

SEQ ID NO: 181215 - DNA, 3522 bp, Artificial Sequence
  derived and/or modified sequence
atgagccggggcagcattgagatccccctgcgggacacagatgaggtgattgagctggactttgaccagctgcctgaaggagatgaggtgatcagcatcctgaagcaggagcacacccagctgcacatctggatcgccctggccctggagtactacaagcagggcaagacagaggagtttgtgaagctgctggaggccgccagaattgatggcaacctggactacagagaccacgagaaggaccagatgacctgcctggacaccctggccgcctactacgtgcagcaggccaggaaggagaagaacaaggacaacaagaaggacctgatcacccaggccaccctgctgtacaccatggctgacaagatcatcatgtatgaccagaaccacctgctgggccgggcctgcttctgcctgctggagggggacaagatggaccaggctgatgcccagttccactttgtgctgaaccagagccccaacaacatcccagccctgctgggcaaggcctgcatctccttcaacaagaaggactacagaggagccctggcctactacaagaaggccctgcggaccaaccctggctgcccagctgaggtgcggctgggcatgggccactgctttgtgaagctgaacaagctggagaaggcccggctggccttcagccgggccctggagctgaacagcaaatgtgtgggcgccctggtgggcctggccgtgctggagctgaacaacaaggaggccgacagcatcaagaatggagtgcagctgctgagccgggcctacaccatcgaccccagcaaccccatggtgctgaaccacctggccaaccacttcttcttcaagaaggactacagcaaggtgcagcacctggccctgcacgccttccacaacacagaggtggaggccatgcaggccgagagctgctaccagctggcccgctccttccacgtgcaggaggactatgaccaggccttccagtactactaccaggccacccagtttgccagcagcagctttgtgctgcccttcttcggcctgggccagatgtacatctacagaggagacaaggaaaatgccagccagtgctttgagaaggtgctgaaggcctaccccaacaactatgagaccatgaagatcctgggcagcctgtatgctgccagcgaggaccaggagaagagggacatcgccaagggccacctgaagaaggtgacagagcagtacccagatgatgtggaggcctggattgagctggcccagatcctggagcagacagacatccagggcgccctgagcgcctacggcacagccacccgcatcctgcaggagaaggtgcaggctgatgtgcccccagagatcctgaacaacgtgggcgccctgcacttccggctgggcaacctgggggaggccaagaagtacttcctggccagcctggaccgggccaaggccgaggccgagcatgatgagcactactacaatgccatctctgtgaccaccagctacaacctggcccggctgtatgaggccatgtgtgagttccacgaggccgagaagctgtacaagaacatcctgcgggagcaccccaactacgtggactgctacctgcggctgggcgccatggcccgggacaagggcaacttctatgaggccagtgactggttcaaggaggccctgcagatcaaccaggaccacccagatgcctggagcctgattggcaacctgcacctggccaagcaggagtggggccctggccagaagaagtttgagcgcatcctgaagcagcccagcacccagagcgacacctacagcatgctggccctgggcaatgtgtggctgcagaccctgcaccagcccacccgggaccgggagaaggagaagaggcaccaggaccgggccctggccatctacaagcaggtgctgagaaatgatgccaagaacctgtatgctgccaatggaattggagctgtgctggcccacaagggctacttccgggaggccagagatgtgtttgcccaggtgcgggaggccacagctgacatcagtgatgtgtggctgaacctggcccacatctacgtggagcagaagcagtacatctctgctgtgcagatgtatgagaactgcctgaggaagttctacaagcaccagaacacagaggtggtgctgtacctggcccgggccctcttcaagtgtgggaagctgcaggagtgcaagcagaccctgctgaaggcccggcacgtggcccccagcgacacagtgctgatgttcaacgtggccctggtgctgcagaggctggccacctctgtgctgaaggatgagaagagcaacctgaaggaggtgctgaatgctgtgaaggagctggagctggcccaccgctacttctcctacctgagcaaggtgggggacaagatgagatttgacctggccctggccgccacagaggcccggcagtgcagcgacctgctgagccaggcccagtaccacgtggcccgggccaggaagcaggatgaggaggagcgggagctgcgggccaagcaggagcaggagaaggagctgctgcggcagaagctgctgaaggagcaggaggagaagaggctgcgggagaaggaggagcagaagaagctgctggagcagagggcccagtatgtggagaagaccaagaacatcctgatgttcaccggggagacagaggccaccaaggagaagaagaggggcggcggcggcggcagaagaagcaagaagggcggggagtttgatgaatttgtgaatgatgacacagatgatgacctgcccatcagcaagaagaagaagagaagaaaaggaagtggcagcgagcaggagggggaggatgaggagggcggggagaggaagaagaagaagagaagaagacaccccaagggggaggagggcagtgatgatgatgaaacagaaaatggccccaagcccaagaagaggcggccccccaaggccgagaagaagaaggcccccaagccagagcggctgcccccatccatgaagggcaagatcaagagcaaggccatcatcagcagcagtgatgacagcagtgatgaggacaagctgaagattgctgatgagggccaccccaggaacagcaacagcaacagcgacagtgatgaagatgagcagaggaagaagtgtgccagcagcgagagtgacagtgatgagaaccagaacaagagcggcagcgaggccggcagcccccggcggccccggcggcagaggagtgaccaggacagcgacagcgaccagcccagcaggaagaggcggcccagcggcagcgagcagagcgacaatgaatctgtgcagagcggccgcagccacagcggcgtgtctgaaaatgacagcaggcctgccagccccagcgctgagagtgaccacgagagcgagcggggcagtgacaatgaaggcagcggccagggcagcggaaatgaaagtgagcctgagggcagcaacaatgaggccagtgaccggggcagcgagcacggcagtgatgacagcgactag

SEQ ID NO: 181216 - DNA, 3522 bp, Artificial Sequence
  derived and/or modified sequence
atgagccggggcagcatcgagatccccctgcgggacaccgacgaggtgatcgaacttgacttcgaccaactaccggaaggcgacgaagtcatcagtatcctgaaacaggagcatacccagctacatatctggatagctctagccctagagtactataaacagggaaagaccgaggagttcgttaaactcttggaagccgcccgcatcgacggaaacctagattacagggaccacgagaaggaccagatgacctgtcttgacaccctcgcagcgtattacgttcagcaggcacgtaaggaaaagaacaaggataataagaaagatcttattacacaagctactctcctgtataccatggctgataagatcatcatgtacgatcagaatcacctgctcgggagagcctgcttctgcttgctcgagggcgataagatggaccaggccgatgcccagtttcattttgtccttaaccagtcccctaacaatatccctgctttgctgggcaaagcctgcatttcgttcaacaaaaaggactatcgtggagctttggcctattataagaaggctctcagaactaatccaggttgtccagcagaggtgagattagggatgggacattgtttcgtgaagctgaataagctcgaaaaggccagactggccttttctcgcgccttagagcttaacagcaagtgtgtgggcgcactggtcgggcttgctgtgttagagctgaacaataaagaggctgatagcattaaaaacggtgttcagttgcttagtagggcttacaccattgacccatcgaacccgatggtgctcaatcacttggcaaatcactttttctttaagaaggattactcaaaagtccaacatcttgcgctacatgccttccacaacactgaagtcgaagctatgcaagcagagtcttgctatcagctcgccaggagtttccatgtgcaggaggattatgatcaagcatttcagtattactaccaagctactcaatttgcctccagttcatttgtgcttcctttcttcggcctgggccagatgtacatctatcgcggcgacaaggaaaatgctagccagtgcttcgaaaaggtattgaaagcataccccaataactacgagaccatgaagatccttgggagtctttacgctgcttcagaagaccaggaaaaacgcgatatagctaagggccatctgaaaaaagtgactgaacagtacccagatgacgtggaggcttggatcgagctggcacagattctggagcagaccgacatacaaggagcgctcagtgcatatggcaccgctaccagaattctgcaagaaaaagtgcaggctgatgtccctcctgaaattctcaacaatgtcggcgcactccattttcgcctaggaaacctcggggaagccaagaagtacttcttagcgagccttgatagagcaaaggcagaagccgagcacgatgagcattactacaatgcaatcagtgtgacaacgtcgtacaatctcgcccgcctgtacgaggccatgtgtgaattccacgaggccgagaagctatataaaaatattcttcgcgagcatccaaattacgtagactgctatctaagactgggtgctatggcacgcgataaggggaacttttacgaggcatccgattggttcaaggaagccctccagattaaccaagatcatccagacgcctggtcgctcattggaaatctgcatttagccaagcaggagtggggcccaggccagaaaaagttcgagcgaatcctcaagcagccctccacacaaagcgatacatacagcatgctggccctcgggaacgtgtggctgcagacccttcatcagccgacacgtgatcgtgagaaggaaaagcgccatcaggaccgggctctggcaatttacaaacaggtgttaaggaatgatgcaaagaacctgtatgcagcaaacggaatcggcgcagtgctggctcataaagggtacttccgcgaggccagagacgtgttcgcccaggtgagagaggccactgccgatatctccgacgtatggctaaacctagcccatatttacgtggagcagaagcagtacataagcgcagttcagatgtacgaaaactgcttgcggaagttctacaagcatcagaatactgaggtagtactgtacctcgcccgggctctctttaaatgtggaaagctgcaggagtgcaaacaaactctcctgaaagcgagacatgtggccccaagcgacactgtgttgatgttcaacgtggctctggtcctccagaggctcgcaacctctgtccttaaggatgaaaagtcaaacctaaaagaggtcctgaacgccgtcaaggagctggagctggctcaccgttactttagctacctgtcgaaggttggcgacaagatgcgcttcgacctagcacttgccgctaccgaggcacgtcagtgttctgatcttttgtctcaggcacagtatcatgtggcacgtgcccggaagcaagacgaagaggagagagagttgcgcgccaaacaggaacaggagaaggaattgctgagacagaagctgctcaaggaacaagaagaaaagcgactccgggagaaagaagaacagaagaagctgttagagcaacgggctcagtacgttgagaaaactaagaatatcttgatgtttactggagaaacggaggccacgaaagaaaaaaaacgaggaggcggcggaggccggcggagcaagaaagggggagaattcgatgaatttgtcaatgacgacaccgacgatgatctgcctatatctaaaaaaaaaaagcggaggaagggttctggctcagaacaggagggagaagatgaggagggtggcgaaaggaaaaagaagaagcgtcgacggcatcccaaaggggaggagggcagcgatgacgacgaaaccgaaaacggaccaaaacccaaaaagcgcagaccccccaaggcagagaaaaagaaggcacccaagcccgagcggttaccgccatctatgaagggaaaaatcaaatcgaaggctatcatttccagcagcgacgattcttcggacgaagacaagctgaaaattgccgatgaaggacatccgcgcaattccaacagcaattctgattctgatgaggatgagcagaggaagaaatgcgcttcaagtgagtcagatagcgacgaaaaccagaataagtcgggcagtgaagccgggtccccacgccggccacgccggcaaagaagcgatcaagatagtgatagcgatcagccatcgcgaaagagacgccctagtggctctgagcaatccgataatgaatcagtgcagtcgggaagatcccatagcggcgtttcagaaaacgattccagaccagcatcaccgagcgcagagtccgaccatgagtccgaaagggggagcgacaacgagggatctggccaagggtccgggaacgaaagcgaaccagaaggcagtaacaacgaggcttctgacaggggctcggagcatggctctgatgactcggattag

SEQ ID NO: 181217 - DNA, 3522 bp, Artificial Sequence
  derived and/or modified sequence
atgtcgcgtggatccatcgaaattcccctgcgcgacacggatgaagtcatcgaactcgactttgaccagctgcccgagggtgatgaggttatctccattctgaagcaagaacacacccaactccatatctggattgcattggcactggagtactacaaacagggcaaaacagaggagtttgtcaagttgctagaggctgctcgcattgacggaaacttggactaccgggatcacgaaaaagaccagatgacatgtttggacacacttgccgcttattatgtacagcaggcgagaaaagagaagaacaaggacaataagaaggacttaataactcaggcaacacttctctacaccatggccgacaagataatcatgtacgatcagaatcacctactcggacgtgcctgcttttgccttctggaaggagacaaaatggatcaagccgacgcgcagtttcatttcgttttgaaccagagccccaataacattccagctctgctgggaaaggcatgcatttcctttaacaaaaaggattatagaggcgcactggcttattataagaaagctctcaggacgaaccccggatgccccgctgaagtgcgtctgggaatgggacactgtttcgttaaacttaataaactggagaaggccagacttgccttctcccgggctctcgaactgaactcaaagtgtgttggggctctggttggcctggctgtcctcgagctgaataacaaagaggcggatagcatcaagaacggagtccagctgctgagtcgcgcatacacgatcgacccatctaaccccatggtgctcaatcacctggcgaatcatttcttctttaagaaggattattctaaggtgcagcacttggctcttcacgcatttcacaacacggaggttgaggctatgcaggcagagtcctgctatcagctggctaggtctttccatgtccaggaggactacgatcaggccttccagtattactaccaagcaacccaattcgcttccagttctttcgttctcccattcttcggcctgggacagatgtacatctaccgcggagataaagagaatgcctcccagtgctttgaaaaggtgctaaaagcttaccccaataattatgagacaatgaagattctcgggagtttatatgctgcaagcgaagaccaggaaaagagagatatcgccaagggtcacctcaaaaaggtgaccgaacagtatccagatgacgtggaggcctggattgaactggcccaaatactggaacagactgacatccagggtgcactgtctgcctatggcacagcaacacggatcctgcaggaaaaggttcaagccgacgtccctcctgaaatattaaataacgtgggggcactgcattttagacttgggaacctcggcgaggcaaaaaaatattttttggcgtcactggatagggccaaagcagaagcagaacatgacgagcattactacaacgccatatccgtgactaccagttacaatttagccaggctttacgaggccatgtgcgagttccacgaagccgaaaagctttataagaatatcttgagggaacatcccaattacgtcgactgctatcttcgccttggagctatggccagagataagggcaacttctacgaggcgtccgattggtttaaagaagctttgcagatcaaccaagatcaccctgatgcatggagtctgatcggcaatctgcatctggccaagcaggaatgggggcctggccaaaaaaaattcgaacgaatcctcaagcagcccagtacccagtccgatacctatagtatgctggctcttgggaacgtgtggctgcaaacactgcaccagccaactagggatcgggaaaaagagaagcggcatcaagaccgcgcactagcgatctacaagcaagtcctgagaaatgacgccaagaatctgtatgcagcaaatggaatcggggcagtcttagcccacaagggctattttagggaagcgcgagatgtgtttgcccaggttagggaggcgacggccgatataagcgatgtgtggctgaatctcgcacacatctatgtggagcagaagcagtacatttcggctgtacagatgtatgagaactgtttacggaaattttacaagcaccagaacaccgaagtggtcctttacctggccagagctttgttcaaatgtggcaagctgcaggagtgcaagcaaaccctgctgaaagctaggcacgtcgctccttcggacaccgtactgatgtttaatgtcgccctcgtgcttcagcgtttggccaccagtgtcctgaaggatgagaaaagtaacctgaaggaagtgctgaatgccgtcaaagaactcgagttagctcaccggtacttctcctatctctctaaggtaggtgacaaaatgcggtttgacctggccctggccgcaactgaggcgcgacagtgctctgatcttctctcccaggcacagtatcacgtagcgcgtgcaaggaaacaggatgaggaggagcgggaactgcgggcaaaacaggagcaggagaaggagcttctgcggcagaaactgctgaaagagcaggaggagaaacgtctgcgggagaaggaggaacagaagaaattattagaacagcgcgctcaatacgtggagaagactaaaaacatcctgatgtttaccggagagacagaagccacaaaagagaagaagaggggaggcggagggggtaggcgcagtaagaaggggggtgagtttgacgagttcgtgaatgatgataccgacgacgatctccctatttccaagaaaaagaagaggcggaaaggatctgggtctgagcaggagggggaggacgaggagggtggggagcggaagaagaagaaacggaggcgacacccgaagggcgaggaaggatccgacgatgacgagaccgagaacggtccgaagcctaagaaaaggcggccaccgaaggctgaaaaaaaaaaggcaccaaagccagaacgtctgccgccttccatgaaaggtaagatcaaaagtaaggctatcatcagtagctctgatgattcatctgacgaggataaacttaaaattgcagacgaagggcatcccaggaacagtaattctaattctgattctgatgaagatgagcagcggaagaaatgtgcgtcctcagaaagcgattctgatgagaatcagaataaaagcgggagcgaggccggttcccctcgtcggcctaggagacaaagatctgaccaggacagcgactcggaccagccttctcgaaaaaggcggccatcaggatccgaacaatccgataatgaaagcgtgcaatctgggaggagtcactcaggggtaagcgagaacgattcccgaccggctagtcctagcgcggaatccgaccacgaaagcgaacggggatctgacaacgaagggtctggccaaggctccggaaacgagtcagagcctgagggctccaacaacgaagcctccgatcggggatctgaacatgggtcagacgattctgactag

SEQ ID NO: 181218 - DNA, 4586 bp, Artificial Sequence
  derived and/or modified sequence
accaagcggctacgccttccaagttttcattcggggccgcgccagcgctgaggagagtcagacgccagatggttccgaaggtcctgcaggctctcggggcaccctacagccgacacgccaacaaaagcttcggagccgccaaccccaaaacggaaacaccggagccacaagctgagctcgcgtagggcacgctcccccgggagtgcttccgggacagggggcggggtcgccggaagtggccgtccgccgtccgctgctcgttgtttaagcggctgacgggaaggagaagccagagctccagcggcgccgcggggcggcagtcaagaccagagccggagccgtcactcacctctggattagcctgaagcggagactaccggctgcggagcggcggggcgagacacttgctcgccttttgaccccatcatgtcgcggggctccatcgagattcccctccgggacactgacgaggtcattgaacttgacttcgatcagttaccggagggagatgaagttatcagtattctgaaacaggaacacacacaactgcacatatggattgctttggcgctggaatactacaagcaaggaaaaacagaagagtttgtaaaattgttggaagcagcacgtatagatggcaatttggactatagagaccatgaaaaagaccagatgacttgcttggatacattggcagcgtattatgtacaacaggctcggaaagaaaagaataaggacaataaaaaggatcttattacacaggccaccttgttgtatacaatggccgataaaattattatgtatgatcagaaccatttgttgggaagagcctgcttctgcctacttgagggtgacaaaatggatcaagctgatgcacagtttcattttgtactcaatcagtctccaaataatattccagcccttcttggtaaagcttgcatttccttcaacaagaaggattacagaggagctcttgcttactataagaaagcattgcgtactaacccaggatgtccagcggaagttcgtttaggaatgggtcattgctttgtgaaacttaacaaactggaaaaagctcgtctggcattcagcagagccctggaactcaattccaaatgcgtgggagcattggttggactggctgttctagaactcaacaataaagaggctgattccattaaaaatggtgtccagcttctttccagagcctatactattgatcctagcaaccctatggtattgaaccatttggcaaatcactttttcttcaaaaaggattatagtaaagtccagcatctggccctccatgcattccataatacagaagtggaagctatgcaagcagagagctgctatcagctagctagatcattccatgttcaggaagattatgaccaagcttttcagtactattatcaagccacacagtttgcctcatcctcttttgtgctcccattttttggtttgggacaaatgtatatttatcgaggtgacaaagaaaatgcatctcagtgctttgagaaggttttgaaagcttatcctaataattacgaaactatgaaaattctcggctctctctatgctgcctcagaagatcaagaaaaacgagatattgccaagggccatttgaagaaggtcacagaacagtatcccgatgatgttgaagcttggattgaattggcacaaatcttagaacagactgatatacagggtgccctttcagcctatggaacagcaacacgaatccttcaggagaaagtgcaggccgatgttcctccagagattctcaataatgtgggtgccctccattttagacttggaaacctaggggaggctaagaaatattttttggcgtcattggaccgtgcaaaagcagaagcggaacacgatgagcattactataacgccatttccgttaccacgtcatataatctcgccaggctatatgaggcgatgtgtgaattccatgaagcagaaaaactgtataaaaacatcttacgcgaacatcctaattatgttgactgctatttgcgcctaggagccatggctagagataagggaaacttttatgaggcttcagattggtttaaggaagctcttcagattaatcaggatcatccagatgcttggtctttgattggcaatcttcatttggcaaaacaagaatggggtcctgggcagaagaagtttgagaggatattaaaacagccatccacacagagtgatacctattctatgctagcccttggcaacgtgtggctccaaactttacatcagcccacccgagatcgagaaaaggaaaagcgtcatcaagatcgtgctctggccatctacaaacaagtactcagaaatgatgcaaagaatctgtatgctgccaatggcataggagctgttttggcccacaaaggatattttcgtgaagctcgtgatgtatttgcccaagtaagagaagcaacagcagatattagtgatgtgtggctgaacttagcacacatctatgtggagcaaaagcagtacatcagcgccgttcagatgtatgaaaactgcctccgaaagttctataagcaccaaaacactgaagttgtactctatttggcccgggccctcttcaagtgtggcaagttacaggaatgcaaacagactttgctgaaggctagacatgtggcacccagtgatacagttcttatgtttaatgtggccttggtcctgcaaagattagctacctctgtcctgaaagatgaaaaaagtaatctgaaggaagtacttaatgctgtgaaagaactggagcttgcacatagatacttcagttatttgagtaaagtgggagataaaatgagatttgatttggcccttgctgctacagaagccaggcagtgttctgacttactgagccaggcccagtaccatgtggcccgggcacgcaaacaagatgaagaagagcgggagctgcgggccaagcaagagcaagaaaaggagctgttaaggcagaaacttcttaaagaacaggaagagaaacgtctcagagaaaaggaagagcaaaagaaacttttggaacagcgggcccagtatgtggagaagaccaaaaatattcttatgtttactggtgagactgaagcaacaaaagagaagaaaagaggtggtggtggtggacggcgttctaagaagggaggagagtttgatgaatttgtcaatgatgacactgatgatgacctacctatatccaaaaagaagaagagaagaaagggtagtggcagtgaacaagaaggtgaagatgaggagggtggtgagagaaagaagaaaaagaggagaagacatccaaagggagaagaaggatctgatgatgatgaaacagaaaatggccccaaaccaaaaaaacgacgtccaccaaaagcagagaagaaaaaggctcccaagccagaacgtctgcctccatcaatgaagggaaaaataaaatccaaagccataatttcatcaagtgatgactcttcggatgaggataaacttaaaattgctgatgaaggacatcccaggaacagcaacagcaacagtgactcagacgaggacgaacaacgaaagaaatgtgcctcatcagagagtgattccgatgagaaccagaacaagtctggcagcgaggccggcagtccccggaggccacgaagacagcggtcagatcaggactcagacagtgaccagccatccagaaagagaaggccctccggttctgagcagtctgacaatgaatctgtgcagtcagggagaagccactcaggagtttctgagaacgactctcgcccagcttctccaagtgccgaatcagatcacgaatcggagagaggatctgataatgagggttctggccaaggctctggaaatgaatcggaaccagagggatccaacaatgaggcctcagatagaggctcagaacatgggtcagatgatagtgactaggttttatttcatcaataagcttcatctctggaggaaacttttttaatatatgaaagctgtgataaaaatgtttcagatgtttagtcaattgtgaaatttttcttaaggcaattttcttttctatcagtttgtatattactaagccccaagagacatttcctgtgctagagtccaatatttgagtctctcgtgcaaatgagactattctttgtggtacaattccacctatcatatgtgaaaactgcagtaaaaataaacccagatgctaaatcattcctacaaaggtttgactgaaactgtggcagatgtctcatcttctttatatgttaagcagcatactcttctgatttttattgcaatcttttaccaagtggtgcacaaacttggtattgatgtctttattccattttgagtttagattgagaatatttttattttctgaaggcagagatatctactgtataattgcaccaaagtacatttgaaaggaaggttttcaatagtgtaatactgcagcgatgtagataaaatcacaaatgtataatgtgttaggttgaataaggtgtggaaaatgcttttctgttagtagaatgcaaaaacctacctaagccacataataataaaattcttttaccaac

SEQ ID NO: 181219 - DNA, 3522 bp, Artificial Sequence
  derived and/or modified sequence
atgagcagaggcagcatcgagatccccctgagagacaccgacgaggtgatcgagctggacttcgaccagctgcccgagggcgacgaggtgatcagcatcctgaagcaggagcacacccagctgcacatctggatcgccctggccctggagtactacaagcagggcaagaccgaggagttcgtgaagctgctggaggccgccagaatcgacggcaacctggactacagagaccacgagaaggaccagatgacctgcctggacaccctggccgcctactacgtgcagcaggccagaaaggagaagaacaaggacaacaagaaggacctgatcacccaggccaccctgctgtacaccatggccgacaagatcatcatgtacgaccagaaccacctgctgggcagagcctgcttctgcctgctggagggcgacaagatggaccaggccgacgcccagttccacttcgtgctgaaccagagccccaacaacatccccgccctgctgggcaaggcctgcatcagcttcaacaagaaggactacagaggcgccctggcctactacaagaaggccctgagaaccaaccccggctgccccgccgaggtgagactgggcatgggccactgcttcgtgaagctgaacaagctggagaaggccagactggccttcagcagagccctggagctgaacagcaagtgcgtgggcgccctggtgggcctggccgtgctggagctgaacaacaaggaggccgacagcatcaagaacggcgtgcagctgctgagcagagcctacaccatcgaccccagcaaccccatggtgctgaaccacctggccaaccacttcttcttcaagaaggactacagcaaggtgcagcacctggccctgcacgccttccacaacaccgaggtggaggccatgcaggccgagagctgctaccagctggccagaagcttccacgtgcaggaggactacgaccaggccttccagtactactaccaggccacccagttcgccagcagcagcttcgtgctgcccttcttcggcctgggccagatgtacatctacagaggcgacaaggagaacgccagccagtgcttcgagaaggtgctgaaggcctaccccaacaactacgagaccatgaagatcctgggcagcctgtacgccgccagcgaggaccaggagaagagagacatcgccaagggccacctgaagaaggtgaccgagcagtaccccgacgacgtggaggcctggatcgagctggcccagatcctggagcagaccgacatccagggcgccctgagcgcctacggcaccgccaccagaatcctgcaggagaaggtgcaggccgacgtgccccccgagatcctgaacaacgtgggcgccctgcacttcagactgggcaacctgggcgaggccaagaagtacttcctggccagcctggacagagccaaggccgaggccgagcacgacgagcactactacaacgccatcagcgtgaccaccagctacaacctggccagactgtacgaggccatgtgcgagttccacgaggccgagaagctgtacaagaacatcctgagagagcaccccaactacgtggactgctacctgagactgggcgccatggccagagacaagggcaacttctacgaggccagcgactggttcaaggaggccctgcagatcaaccaggaccaccccgacgcctggagcctgatcggcaacctgcacctggccaagcaggagtggggccccggccagaagaagttcgagagaatcctgaagcagcccagcacccagagcgacacctacagcatgctggccctgggcaacgtgtggctgcagaccctgcaccagcccaccagagacagagagaaggagaagagacaccaggacagagccctggccatctacaagcaggtgctgagaaacgacgccaagaacctgtacgccgccaacggcatcggcgccgtgctggcccacaagggctacttcagagaggccagagacgtgttcgcccaggtgagagaggccaccgccgacatcagcgacgtgtggctgaacctggcccacatctacgtggagcagaagcagtacatcagcgccgtgcagatgtacgagaactgcctgagaaagttctacaagcaccagaacaccgaggtggtgctgtacctggccagagccctgttcaagtgcggcaagctgcaggagtgcaagcagaccctgctgaaggccagacacgtggcccccagcgacaccgtgctgatgttcaacgtggccctggtgctgcagagactggccaccagcgtgctgaaggacgagaagagcaacctgaaggaggtgctgaacgccgtgaaggagctggagctggcccacagatacttcagctacctgagcaaggtgggcgacaagatgagattcgacctggccctggccgccaccgaggccagacagtgcagcgacctgctgagccaggcccagtaccacgtggccagagccagaaagcaggacgaggaggagagagagctgagagccaagcaggagcaggagaaggagctgctgagacagaagctgctgaaggagcaggaggagaagagactgagagagaaggaggagcagaagaagctgctggagcagagagcccagtacgtggagaagaccaagaacatcctgatgttcaccggcgagaccgaggccaccaaggagaagaagagaggcggcggcggcggcagaagaagcaagaagggcggcgagttcgacgagttcgtgaacgacgacaccgacgacgacctgcccatcagcaagaagaagaagagaagaaagggcagcggcagcgagcaggagggcgaggacgaggagggcggcgagagaaagaagaagaagagaagaagacaccccaagggcgaggagggcagcgacgacgacgagaccgagaacggccccaagcccaagaagagaagaccccccaaggccgagaagaagaaggcccccaagcccgagagactgccccccagcatgaagggcaagatcaagagcaaggccatcatcagcagcagcgacgacagcagcgacgaggacaagctgaagatcgccgacgagggccaccccagaaacagcaacagcaacagcgacagcgacgaggacgagcagagaaagaagtgcgccagcagcgagagcgacagcgacgagaaccagaacaagagcggcagcgaggccggcagccccagaagacccagaagacagagaagcgaccaggacagcgacagcgaccagcccagcagaaagagaagacccagcggcagcgagcagagcgacaacgagagcgtgcagagcggcagaagccacagcggcgtgagcgagaacgacagcagacccgccagccccagcgccgagagcgaccacgagagcgagagaggcagcgacaacgagggcagcggccagggcagcggcaacgagagcgagcccgagggcagcaacaacgaggccagcgacagaggcagcgagcacggcagcgacgacagcgactag

SEQ ID NO: 181220 - protein, 454 aa, Artificial Sequence
  derived and/or modified sequence
MSSGAPQKSSPMASGAEETPGFLDTLLQDFPALLNPEDPLPWKAPGTVLSQEEVEGELAELAMGFLGSRKAPPPLAAALAHEAVSQLLQTDLSEFRKLPREEEEEEEDDDEEEKAPVTLLDAQSLAQSFFNRLWEVAGQWQKQVPLAARASQRQWLVSIHAIRNTRRKMEDRHVSLPSFNQLFGLSDPVNRAYFAVFDGHGGVDAARYAAVHVHTNAARQPELPTDPEGALREAFRRTDQMFLRKAKRERLQSGTTGVCALIAGATLHVAWLGDSQVILVQQGQVVKLMEPHRPERQDEKARIEALGGFVSHMDCWRVNGTLAVSRAIGDVFQKPYVSGEADAASRALTGSEDYLLLACDGFFDVVPHQEVVGLVQSHLTRQQGSGLRVAEELVAAARERGSHDNITVMVVFLRDPQELLEGGNQGEGDPQAEGRRQDLPSSLPEPETQAPPRS

SEQ ID NO: 181221 - protein, 361 aa, Artificial Sequence
  derived and/or modified sequence
MSSGAPQKSSPMASGAEETPGFLDTLLQDFPALLNPEDPLPWKAPGTVLSQEEVEGELAELAMGFLGSRKAPPPLAAALAHEAVSQLLQTDLSEFRKLPREEEEEEEDDDEEEKAPVTLLDAQSLAQSFFNRLWEVAGQWQKQVPLAARASQRQWLVSIHAIRNTRRKMEDRHVSLPSFNQLFGLSDPVNRAYFAVFDGHGGVDAARYAAVHVHTNAARQPELPTDPEGALREAFRRTDQMFLRKAKRERLQSGTTGVCALIAGATLHVAWLGDSQVILVQQGQVVKLMEPHRPERQDEKARIEALGGFVSHMDCWRVNGTLAVSRAIGESQRGRPKWEKVSRKPRPRVWPAAHQGFREAV

SEQ ID NO: 181222 - protein, 286 aa, Artificial Sequence
  derived and/or modified sequence
MEDRHVSLPSFNQLFGLSDPVNRAYFAVFDGHGGVDAARYAAVHVHTNAARQPELPTDPEGALREAFRRTDQMFLRKAKRERLQSGTTGVCALIAGATLHVAWLGDSQVILVQQGQVVKLMEPHRPERQDEKARIEALGGFVSHMDCWRVNGTLAVSRAIGDVFQKPYVSGEADAASRALTGSEDYLLLACDGFFDVVPHQEVVGLVQSHLTRQQGSGLRVAEELVAAARERGSHDNITVMVVFLRDPQELLEGGNQGEGDPQAEGRRQDLPSSLPEPETQAPPRS

SEQ ID NO: 181223 - protein, 350 aa, Artificial Sequence
  derived and/or modified sequence
MGLCPSTRETAPPAVLDAQSLAQSFFNRLWEVAGQWQKQVPLAARASQRQWLVSIHAIRNTRRKMEDRHVSLPSFNQLFGLSDPVNRAYFAVFDGHGGVDAARYAAVHVHTNAARQPELPTDPEGALREAFRRTDQMFLRKAKRERLQSGTTGVCALIAGATLHVAWLGDSQVILVQQGQVVKLMEPHRPERQDEKARIEALGGFVSHMDCWRVNGTLAVSRAIGDVFQKPYVSGEADAASRALTGSEDYLLLACDGFFDVVPHQEVVGLVQSHLTRQQGSGLRVAEELVAAARERGSHDNITVMVVFLRDPQELLEGGNQGEGDPQAEGRRQDLPSSLPEPETQAPPRS

SEQ ID NO: 181224 - DNA, 1365 bp, Artificial Sequence
  derived and/or modified sequence
atgagcagcggcgccccccagaagagcagccccatggccagcggcgccgaggagacccccggcttcctggacaccctgctgcaggacttccccgccctgctgaaccccgaggaccccctgccctggaaggcccccggcaccgtgctgagccaggaggaggtggagggcgagctggccgagctggccatgggcttcctgggcagcagaaaggcccccccccccctggccgccgccctggcccacgaggccgtgagccagctgctgcagaccgacctgagcgagttcagaaagctgcccagagaggaggaggaggaggaggaggacgacgacgaggaggagaaggcccccgtgaccctgctggacgcccagagcctggcccagagcttcttcaacagactgtgggaggtggccggccagtggcagaagcaggtgcccctggccgccagagccagccagagacagtggctggtgagcatccacgccatcagaaacaccagaagaaagatggaggacagacacgtgagcctgcccagcttcaaccagctgttcggcctgagcgaccccgtgaacagagcctacttcgccgtgttcgacggccacggcggcgtggacgccgccagatacgccgccgtgcacgtgcacaccaacgccgccagacagcccgagctgcccaccgaccccgagggcgccctgagagaggccttcagaagaaccgaccagatgttcctgagaaaggccaagagagagagactgcagagcggcaccaccggcgtgtgcgccctgatcgccggcgccaccctgcacgtggcctggctgggcgacagccaggtgatcctggtgcagcagggccaggtggtgaagctgatggagccccacagacccgagagacaggacgagaaggccagaatcgaggccctgggcggcttcgtgagccacatggactgctggagagtgaacggcaccctggccgtgagcagagccatcggcgacgtgttccagaagccctacgtgagcggcgaggccgacgccgccagcagagccctgaccggcagcgaggactacctgctgctggcctgcgacggcttcttcgacgtggtgccccaccaggaggtggtgggcctggtgcagagccacctgaccagacagcagggcagcggcctgagagtggccgaggagctggtggccgccgccagagagagaggcagccacgacaacatcaccgtgatggtggtgttcctgagagacccccaggagctgctggagggcggcaaccagggcgagggcgacccccaggccgagggcagaagacaggacctgcccagcagcctgcccgagcccgagacccaggccccccccagaagctag

SEQ ID NO: 181225 - DNA, 1086 bp, Artificial Sequence
  derived and/or modified sequence
atgagcagcggcgccccccagaagagcagccccatggccagcggcgccgaggagacccccggcttcctggacaccctgctgcaggacttccccgccctgctgaaccccgaggaccccctgccctggaaggcccccggcaccgtgctgagccaggaggaggtggagggcgagctggccgagctggccatgggcttcctgggcagcagaaaggcccccccccccctggccgccgccctggcccacgaggccgtgagccagctgctgcagaccgacctgagcgagttcagaaagctgcccagagaggaggaggaggaggaggaggacgacgacgaggaggagaaggcccccgtgaccctgctggacgcccagagcctggcccagagcttcttcaacagactgtgggaggtggccggccagtggcagaagcaggtgcccctggccgccagagccagccagagacagtggctggtgagcatccacgccatcagaaacaccagaagaaagatggaggacagacacgtgagcctgcccagcttcaaccagctgttcggcctgagcgaccccgtgaacagagcctacttcgccgtgttcgacggccacggcggcgtggacgccgccagatacgccgccgtgcacgtgcacaccaacgccgccagacagcccgagctgcccaccgaccccgagggcgccctgagagaggccttcagaagaaccgaccagatgttcctgagaaaggccaagagagagagactgcagagcggcaccaccggcgtgtgcgccctgatcgccggcgccaccctgcacgtggcctggctgggcgacagccaggtgatcctggtgcagcagggccaggtggtgaagctgatggagccccacagacccgagagacaggacgagaaggccagaatcgaggccctgggcggcttcgtgagccacatggactgctggagagtgaacggcaccctggccgtgagcagagccatcggcgagagccagagaggcagacccaagtgggagaaggtgagcagaaagcccagacccagagtgtggcccgccgcccaccagggcttcagagaggccgtgtag

SEQ ID NO: 181226 - DNA, 1053 bp, Artificial Sequence
  derived and/or modified sequence
atgggcctgtgccccagcaccagagagaccgccccccccgccgtgctggacgcccagagcctggcccagagcttcttcaacagactgtgggaggtggccggccagtggcagaagcaggtgcccctggccgccagagccagccagagacagtggctggtgagcatccacgccatcagaaacaccagaagaaagatggaggacagacacgtgagcctgcccagcttcaaccagctgttcggcctgagcgaccccgtgaacagagcctacttcgccgtgttcgacggccacggcggcgtggacgccgccagatacgccgccgtgcacgtgcacaccaacgccgccagacagcccgagctgcccaccgaccccgagggcgccctgagagaggccttcagaagaaccgaccagatgttcctgagaaaggccaagagagagagactgcagagcggcaccaccggcgtgtgcgccctgatcgccggcgccaccctgcacgtggcctggctgggcgacagccaggtgatcctggtgcagcagggccaggtggtgaagctgatggagccccacagacccgagagacaggacgagaaggccagaatcgaggccctgggcggcttcgtgagccacatggactgctggagagtgaacggcaccctggccgtgagcagagccatcggcgacgtgttccagaagccctacgtgagcggcgaggccgacgccgccagcagagccctgaccggcagcgaggactacctgctgctggcctgcgacggcttcttcgacgtggtgccccaccaggaggtggtgggcctggtgcagagccacctgaccagacagcagggcagcggcctgagagtggccgaggagctggtggccgccgccagagagagaggcagccacgacaacatcaccgtgatggtggtgttcctgagagacccccaggagctgctggagggcggcaaccagggcgagggcgacccccaggccgagggcagaagacaggacctgcccagcagcctgcccgagcccgagacccaggccccccccagaagctag

SEQ ID NO: 181227 - DNA, 1365 bp, Artificial Sequence
  derived and/or modified sequence
atgtcctccggggctcctcagaaatcttcccccatggcctcgggcgctgaagagacacccggattcttagacacgctgctccaggacttccccgcactgctgaacccagaggaccccctcccttggaaggctcctggcacagtactgtcacaggaggaagtggagggcgaactggcggaacttgcgatgggcttcctcggctcccgtaaagctccccctccgttggccgccgcactagcccacgaagccgtgagtcagctcctacaaactgatctcagtgagttcaggaagcttcctagggaggaggaggaagaggaggaagacgacgatgaagaggaaaaggcacctgtgacactcctggacgctcagagcctggcacagtcttttttcaatcgactctgggaagttgccgggcagtggcagaaacaggtgccccttgcagcccgcgcctctcagcgccagtggcttgtttcaatccacgcaatcagaaacacccggcgcaaaatggaggaccggcacgtctccctgccctcttttaaccagcttttcgggctgtcggaccccgttaacagggcatactttgcagtcttcgacggacacggtggagtggacgctgctagatacgcagcagtccacgtgcacacaaacgctgcacgccagccagaactgcccacggatcctgagggggcattgagggaagctttccggcggaccgaccagatgttccttagaaaggctaaacgcgaacgacttcagtcggggacaaccggagtgtgcgctctgattgcaggcgccaccctccacgtggcctggctgggtgactcacaagttattttggtacagcaaggtcaggtcgtgaagctaatggagccccataggcccgagagacaggacgagaaggcacgcatcgaagccctcggcggctttgtctcccatatggactgctggcgagtcaacggtacactggccgtcagtcgcgccatcggagacgtgtttcaaaaaccgtacgtgtctggcgaggccgacgcagccagcagagcgcttaccggcagcgaagattatttacttctggcctgcgacggcttttttgacgtggttccccaccaggaggtcgtgggacttgtccagtcccatttgacaagacagcaagggagcggacttagggttgccgaggagctcgtcgctgctgcgcgcgagcggggcagtcacgacaatatcacagtgatggtagtgtttctgcgggatcctcaggagctgctggagggcgggaatcagggcgagggcgatccacaggccgaaggtagaaggcaggacctgccctcttcattgcctgagcctgaaacacaggcccccccaaggtcttag

SEQ ID NO: 181228 - DNA, 1086 bp, Artificial Sequence
  derived and/or modified sequence
atgtcgtctggtgcaccccaaaaatccagtccgatggcctccggggccgaagagacacccggatttctggatactttgctacaagacttccctgccttgctcaatcccgaagatcctctgccctggaaggcacccggcactgtactttcccaggaagaagttgagggggaattagccgaactcgccatgggcttccttggttcccgaaaagcccccccgccactggcagctgccttggcacatgaagcggtttctcaattgctccagaccgatctatcggaatttaggaaactacctcgagaggaagaggaggaggaggaggacgacgacgaggaggaaaaggccccagttaccctgcttgatgcccaaagcctggcacagagtttctttaatcggctatgggaggtggccggacagtggcagaagcaagtcccgctggctgcccgggcgtctcagcggcaatggctcgtcagcatccacgctataagaaacacacgtaggaaaatggaagatcgccacgtttcgctgccttcctttaatcaacttttcgggctctccgatccagttaaccgcgcttatttcgctgtcttcgacgggcatggaggggtcgacgcagcccgatacgcggccgttcacgtccacacgaatgcggcccgccaaccagaactgcccacggaccctgagggcgccttacgggaggctttccgcaggaccgatcagatgttcttacgtaaggccaaaagagagcggctgcagtccggtactacgggtgtgtgcgcgttaatcgccggtgccactttgcatgtggcctggttaggggacagccaggtgattctcgtgcagcagggccaggtagtcaagctgatggaaccacatagacccgaaagacaggacgagaaggccagaatcgaagccctggggggctttgtgtcacatatggactgctggcgcgtgaacgggaccctggccgtgtcaagggctatcggggagagccaacgcggtagacccaagtgggagaaagtctccagaaaacctagacccagggtctggcctgctgcacaccagggctttcgcgaagctgtctag

SEQ ID NO: 181229 - DNA, 1053 bp, Artificial Sequence
  derived and/or modified sequence
atgggtctttgtccctccacgcgggaaaccgccccaccagctgtgttggatgcccagtccttggcccagtcattctttaaccgactgtgggaggtggctggacagtggcagaagcaggtacccctggcagcccgggcttcccagcgacagtggctggtgtcaatccatgctatacggaataccagacgtaagatggaagaccgccacgtgtctctaccaagttttaaccagctctttgggctcagtgaccccgtgaaccgagcctacttcgccgtcttcgacggacacggcggagttgacgctgctaggtacgccgccgtgcatgttcatactaatgctgcccgccagcctgaactcccaacagatccggagggcgcactcagagaagctttccgacgaactgaccagatgttcctgaggaaggcaaagagagagcgcctacagtctggaaccaccggcgtttgcgcattgatcgcgggtgctacattacatgttgcatggctgggggactcccaggttattttagtgcagcagggtcaggtcgtgaagttaatggagcctcataggcccgagaggcaggacgagaaggccagaatagaagcccttggcggctttgtttcccacatggactgttggcgggtcaatggaaccctcgccgtttcccgcgctatcggtgacgtctttcaaaaaccctacgtctcaggggaagccgacgcggcctcccgagctttaacaggctccgaagattacctacttcttgcctgcgacgggttttttgatgtcgttcctcaccaagaggtggtgggtctggtgcagtctcaccttaccaggcagcagggatcggggttgagggtcgccgaggagttggtggctgcagctagagagcggggctcccatgacaatatcaccgtaatggtggtttttctgagagatccccaagagttactcgagggcggcaatcagggagaaggcgatccacaggccgaaggacgtcgccaagaccttcccagttccctaccagagcctgaaacccaggctccccctcggagctag

SEQ ID NO: 181230 - DNA, 1365 bp, Artificial Sequence
  derived and/or modified sequence
atgagcagcggggccccccagaagagcagccccatggccagcggggctgaggagaccccaggcttcctggacaccctgctgcaggacttccctgccctgctgaaccctgaggaccccctgccctggaaggcccctggcaccgtgctgagccaggaggaggtggagggggagctggccgagctggccatgggcttcctgggcagcaggaaggcccccccacccctggccgccgccctggcccatgaagctgtgtcccagctgctgcagacagacctgtctgagttcaggaagctgccccgggaggaggaggaggaggaggaggatgatgatgaggaggagaaggcccctgtgaccctgctggatgcccagagcctggcccagagcttcttcaaccggctgtgggaggtggccggccagtggcagaagcaggtgcccctggccgcccgggccagccagaggcagtggctggtgtccatccacgccatccggaacaccaggaggaagatggaggacagacatgtgtccctgcccagcttcaaccagctgtttggcctgagtgaccctgtgaacagagcctactttgctgtgtttgatggccacggcggcgtggatgctgcccgctatgctgctgtgcacgtgcacaccaatgctgcccggcagcctgagctgcccacagatcctgagggcgccctgcgggaggccttccggaggacagaccagatgttcctgaggaaggccaagcgggagcggctgcagagcggcaccaccggggtgtgtgccctgattgctggggccaccctgcacgtggcctggctgggggacagccaggtgatcctggtgcagcagggccaggtggtgaagctgatggagccccacaggcctgagcggcaggatgagaaggccagaattgaggccctgggcggctttgtgagccacatggactgctggagggtgaatggcaccctggccgtgtcccgggccatcggagatgtgttccagaagccctacgtgtctggagaggctgatgctgccagccgggccctgactggaagtgaggactacctgctgctggcctgtgatggcttctttgatgtggtgccccaccaggaggtggtgggcctggtgcagagccacctgacccggcagcagggcagcggcctgcgggtggccgaggagctggtggccgccgcccgggagcggggcagccatgacaacatcaccgtgatggtggtgttcctgcgggacccccaggagctgctggagggcggcaaccagggcgagggggacccccaggccgagggccggcggcaggacctgcccagcagcctgcctgagcctgagacccaggccccacccaggagctag

SEQ ID NO: 181231 - DNA, 1086 bp, Artificial Sequence
  derived and/or modified sequence
atgagcagcggggccccccagaagagcagccccatggccagcggggctgaggagaccccaggcttcctggacaccctgctgcaggacttccctgccctgctgaaccctgaggaccccctgccctggaaggcccctggcaccgtgctgagccaggaggaggtggagggggagctggccgagctggccatgggcttcctgggcagcaggaaggcccccccacccctggccgccgccctggcccatgaagctgtgtcccagctgctgcagacagacctgtctgagttcaggaagctgccccgggaggaggaggaggaggaggaggatgatgatgaggaggagaaggcccctgtgaccctgctggatgcccagagcctggcccagagcttcttcaaccggctgtgggaggtggccggccagtggcagaagcaggtgcccctggccgcccgggccagccagaggcagtggctggtgtccatccacgccatccggaacaccaggaggaagatggaggacagacatgtgtccctgcccagcttcaaccagctgtttggcctgagtgaccctgtgaacagagcctactttgctgtgtttgatggccacggcggcgtggatgctgcccgctatgctgctgtgcacgtgcacaccaatgctgcccggcagcctgagctgcccacagatcctgagggcgccctgcgggaggccttccggaggacagaccagatgttcctgaggaaggccaagcgggagcggctgcagagcggcaccaccggggtgtgtgccctgattgctggggccaccctgcacgtggcctggctgggggacagccaggtgatcctggtgcagcagggccaggtggtgaagctgatggagccccacaggcctgagcggcaggatgagaaggccagaattgaggccctgggcggctttgtgagccacatggactgctggagggtgaatggcaccctggccgtgtcccgggccatcggggagagccagaggggccggcccaagtgggagaaggtgtccaggaagccccggccccgggtgtggccagctgcccaccagggcttccgggaggccgtgtag

SEQ ID NO: 181232 - DNA, 1053 bp, Artificial Sequence
  derived and/or modified sequence
atgggcctgtgccccagcacccgggagacagcccccccagctgtgctggatgcccagagcctggcccagagcttcttcaaccggctgtgggaggtggccggccagtggcagaagcaggtgcccctggccgcccgggccagccagaggcagtggctggtgtccatccacgccatccggaacaccaggaggaagatggaggacagacatgtgtccctgcccagcttcaaccagctgtttggcctgagtgaccctgtgaacagagcctactttgctgtgtttgatggccacggcggcgtggatgctgcccgctatgctgctgtgcacgtgcacaccaatgctgcccggcagcctgagctgcccacagatcctgagggcgccctgcgggaggccttccggaggacagaccagatgttcctgaggaaggccaagcgggagcggctgcagagcggcaccaccggggtgtgtgccctgattgctggggccaccctgcacgtggcctggctgggggacagccaggtgatcctggtgcagcagggccaggtggtgaagctgatggagccccacaggcctgagcggcaggatgagaaggccagaattgaggccctgggcggctttgtgagccacatggactgctggagggtgaatggcaccctggccgtgtcccgggccatcggagatgtgttccagaagccctacgtgtctggagaggctgatgctgccagccgggccctgactggaagtgaggactacctgctgctggcctgtgatggcttctttgatgtggtgccccaccaggaggtggtgggcctggtgcagagccacctgacccggcagcagggcagcggcctgcgggtggccgaggagctggtggccgccgcccgggagcggggcagccatgacaacatcaccgtgatggtggtgttcctgcgggacccccaggagctgctggagggcggcaaccagggcgagggggacccccaggccgagggccggcggcaggacctgcccagcagcctgcctgagcctgagacccaggccccacccaggagctag

SEQ ID NO: 181233 - DNA, 1365 bp, Artificial Sequence
  derived and/or modified sequence
atgagcagcggcgccccccagaagagcagccccatggccagcggcgcggaagagacacccgggttccttgataccctcctgcaggacttccccgccttattgaatccagaagaccctctgccatggaaggctcccgggacagtgctttcccaggaggaagttgagggggaacttgctgaactcgcaatgggatttctgggatctcgcaaggcaccgcccccactcgcagccgctctcgcacacgaagcggtgagccaactcctgcagactgatctgtctgaattccggaagctgcccagagaggaggaagaggaagaagaggacgatgatgaggaagagaaggcccccgtcactctgttggacgcccagtcactcgctcaatccttctttaaccgcctctgggaagtggccgggcagtggcagaagcaagtccccctcgcggccagagcctcccagaggcagtggctggtatccattcacgccatccgcaacacccgccgcaagatggaagatcgccacgtctccctgccttcttttaaccagctgtttggattgtccgaccctgtgaacagggcttatttcgctgtgttcgacggccacggaggggtggatgctgcacgctatgccgctgtccatgtgcataccaacgcggcccgacagccagagctcccgaccgacccggagggagcattacgtgaagccttccggcggaccgaccagatgtttctgaggaaggctaagcgcgagcgcctgcagagcggcaccaccggagtctgcgcccttattgctggggctactttgcacgtggcttggctgggggattcacaggtgatcctcgttcaacagggacaagtggtcaagctgatggaaccacaccggccagagcggcaggatgagaaagcacgcatcgaagctctaggaggctttgtgagccatatggattgttggagggtgaatggaactctggccgtttctcgcgcgattggggacgtttttcagaagccttatgtgagtggagaggccgacgccgcgtccagagccctcacaggctcagaggactatctcctgttggcctgcgacggattttttgatgtggtgcctcatcaggaagtggttggtctagttcagagccacctcacccgccagcaggggtccggccttagagttgcagaagaattagtcgctgcagctcgcgagagagggtcacatgataacatcaccgtgatggttgtcttcttgcgcgacccacaggaacttctggagggaggcaaccagggcgagggagatccacaggcggagggcagacgacaggatctgcccagtagtctgccagagcccgagacacaggcccccccacgcagttag

SEQ ID NO: 181234 - DNA, 1086 bp, Artificial Sequence
  derived and/or modified sequence
atgagcagcggcgccccccagaagagcagccccatggccagcggcgctgaggagacccccggttttctggacactctcttgcaggatttccccgcccttctgaaccccgaagaccctctaccatggaaggctcccggcactgtcctgtcccaggaagaagtggagggcgaattagcagaattagccatgggttttttaggatctcgcaaagctcctccccccttagccgccgccctggcacatgaggctgtgagccagctcctgcagactgaccttagcgaatttcgaaaactcccgcgagaagaagaagaagaggaggaggatgatgatgaggaagagaaggccccagtgacactgcttgatgcacaatccctcgcacagtcttttttcaaccggctttgggaagtggctggccaatggcaaaagcaggtccctctggcggctagagcctcacaaaggcagtggctggtctctattcatgctatcagaaacacgcggagaaagatggaggaccgccacgtgtcacttccctcatttaaccagttatttgggctgtccgacccagtcaatagggcctactttgccgtgttcgatggtcacgggggagtcgacgccgcccgctatgctgccgtccacgttcacacaaatgccgcacggcagccggagctgccaacagatcccgaaggggccttacgcgaggcctttcggaggacggaccaaatgtttttgcgaaaggcaaaaagggagcgccttcagtctggaacgaccggcgtgtgtgccttgatcgcaggggccacattgcatgtggcctggttaggcgatagtcaagtgatactcgtccaacaggggcaggtggtcaaattgatggagcctcaccgcccagagagacaggacgagaaagccaggattgaggccttggggggcttcgtaagccatatggactgctggcgcgtgaatggaacattggccgtatcacgggcaatcggggagtctcagcgcgggcgcccgaaatgggaaaaggtgtcaaggaagcctcgaccacgggtgtggcctgccgcacatcagggcttccgtgaggccgtttag

SEQ ID NO: 181235 - DNA, 1053 bp, Artificial Sequence
  derived and/or modified sequence
atgggcctgtgccccagcacccgggagaccgccccccccgccgtgctggacgcacagtctttggcacagagcttctttaacaggctctgggaagttgctggacaatggcaaaagcaagtgccactcgcggcccgagcctcgcaaagacagtggctggtaagcatccacgcaatccggaacactcgaagaaagatggaggatcgacacgtgtccctgccctcgtttaatcaattgtttgggctctccgacccagtgaatcgagcttattttgcagttttcgacgggcatgggggcgttgatgctgccaggtatgcggccgtgcacgtgcatacaaatgccgccagacagcccgaactgccgacagatccagagggcgcccttcgggaggcattccggcgcaccgaccagatgttccttcggaaggcgaagagggaacgcttgcagtctggtaccactggcgtttgtgctctaatagctggagccaccctgcatgttgcgtggctcggagactctcaggttatcctggtacagcaaggccaagttgtgaagttaatggagccacatcgtccagaacggcaggatgagaaggcaagaatcgaggccctcggtggattcgtgagccatatggactgctggagggtcaatggcaccctcgccgtgtcccgagccattggagacgtttttcaaaaaccctacgtatctggcgaggccgatgccgcatcgcgggccttaaccggttccgaggactacctcttactggcctgtgacggcttttttgatgtggtgccacaccaggaagtggtcggtttggtccaatcccacctaactaggcagcagggctctggcctgagagttgccgaagagcttgtcgcagctgcccgcgagcgcggaagccacgacaacataaccgtcatggttgtgttcttacgcgaccctcaagagctgttggagggaggaaatcagggggagggggaccctcaagctgaaggacgtcgccaggacctcccctcttcccttccggagcctgagacccaggcaccgccccgctcctag

SEQ ID NO: 181236 - DNA, 1365 bp, Artificial Sequence
  derived and/or modified sequence
atgagttccggcgctccacagaaatcctcccctatggcctctggagcagaagaaacccctggatttctcgacacacttctccaggattttcccgcactgctcaaccctgaggatccgctgccttggaaggctcccggaacggttctttcccaggaggaggtcgaaggtgaacttgccgaattagccatgggattcctgggatcgcgaaaagcgcctccaccactggctgctgcactggcccacgaagccgtctcccagctcttgcagacagacctgtcggagttccgaaagttgcccagagaagaagaagaagaagaagaggacgacgacgaagaagaaaaggcgcctgtgaccttactcgacgcacagtctctggcccagtccttctttaaccgcctctgggaagtggccggacagtggcagaagcaagtccccctggccgcaagagcctctcagaggcagtggttggtgagtatacacgcaattcgcaatacccgacgtaagatggaggataggcatgtgtcactccctagttttaatcagcttttcggcctcagcgacccagttaatcgcgcttactttgccgtctttgatgggcacggaggcgtcgatgccgctagatatgccgcagtccacgttcacacaaacgccgcaagacagccagaattgccaacagatcctgaaggcgctctgagggaggccttccggagaacagaccagatgttcctaaggaaggctaagcgcgaaaggctacagtctggcactaccggagtgtgcgccttgatcgctggcgcaacgctacacgtggcatggctgggggactcacaggtgatcctggtgcaacaggggcaagtggtcaaactgatggagccccatagacctgaaaggcaggatgagaaggccagaattgaggctctcggagggttcgtctcccacatggattgttggcgggtgaacgggactctggcagtctctcgtgcgatcggagacgtgtttcaaaaaccatacgtgtccggcgaggctgacgcagctagccgggctttgaccgggtcggaagattatctgctcctggcgtgtgacggattttttgatgtcgtgccccaccaggaagttgtaggcctcgtacagagtcatcttaccaggcaacaggggtctggactgcgggtagctgaggagctcgtggcagccgcacgtgagagaggttctcatgataatataaccgttatggttgtcttcctacgggacccgcaggaattactcgagggcggaaaccagggcgaaggcgacccacaagccgaggggaggagacaggaccttcccagttccctgcctgaaccagaaacccaagctcctccccgatcatag

SEQ ID NO: 181237 - DNA, 1086 bp, Artificial Sequence
  derived and/or modified sequence
atgtcctcaggagctccacagaaatcatcacctatggcgagtggagccgaagagaccccaggctttctggacacactgttacaggacttcccagcccttctgaaccccgaagaccccctgccgtggaaggcacccggaaccgtcctgtcccaggaagaggtcgaaggcgaactcgcggaattagccatgggattcctgggctcacgcaaagccccacctcctctggcagctgcactagcccatgaggctgtctctcagctgctccagaccgatctgtctgagttcagaaagctccccagagaagaggaagaggaagaggaagatgatgatgaggaagagaaggcccctgtcactctgctggacgcacagtcgctggctcagtctttctttaatcgcctttgggaggtagccggacagtggcagaagcaggttcctttagcagcaagggctagccaacgccagtggctggtgtcaatccacgccattcggaatactcggaggaagatggaagatcggcacgtcagcttgccatccttcaatcagctttttgggctctcagaccccgttaaccgtgcctactttgccgtttttgacggtcacgggggagtcgatgctgctcgatacgcagcagtacacgtgcacacgaatgctgcgcgtcaacctgagctgcctaccgaccctgagggagcattgcgagaggcatttcggcgaacagaccagatgtttctcagaaaggcaaagagagagaggctgcagtccggcacaactggagtgtgcgccctgatagcaggcgcaactttgcatgtggcctggcttggcgactcacaggtgatcctggtgcagcagggacaggtggtcaaactgatggaaccccatcggcctgaacgtcaagatgagaaggcacggatcgaggccttgggtggctttgttagccatatggattgttggcgagttaatgggactctggcagtttcccgcgcaatcggagagtcacaaagaggccgacctaaatgggagaaagtcagccgaaaacccagacctagagtttggcccgcagcacatcagggctttcgcgaggccgtgtag

SEQ ID NO: 181238 - DNA, 1053 bp, Artificial Sequence
  derived and/or modified sequence
atgggtctgtgcccttctacgcgagaaacagcaccgcctgcggtactggacgctcagtccctggctcagtcttttttcaacagactgtgggaagtggccggtcagtggcagaagcaggtgccactggccgcacgcgctagtcagcgtcagtggctggtgtccatacatgccatccggaacacaagacgtaagatggaggatcggcacgtctctcttccatccttcaatcagctcttcggactaagtgatcccgtcaaccgtgcctattttgcggtgttcgacgggcatggtggggttgacgccgctcgttatgccgctgtgcacgtgcacactaacgccgctaggcaacccgagcttcctacggaccccgagggggctctccgggaagcattccgacgcacggaccagatgttcctgcgtaaggctaagcgagagaggttgcaatctggcaccactggcgtgtgcgcattaattgccggagccaccctgcacgttgcatggctaggcgactctcaagtgattctggttcagcagggccaggtcgtgaagctcatggagcctcaccggcctgagaggcaagatgagaaagcacggatcgaagccctgggaggcttcgtctctcacatggactgttggagggtcaacggcacattggcagtctcaagagccattggtgacgtgtttcaaaaaccctacgtgtcaggagaggctgacgcagcctccagagctctgactggttccgaggattacctcctgctcgcctgcgatggattttttgatgtggtcccacatcaggaggtggtggggctggttcagtcacacctgacccgccagcaggggagcggactccgtgtggcagaggaactggtagcagctgcgcgtgagcgcggatcccatgacaacatcacagtcatggtggtctttctgcgagaccctcaagagctgttggaaggagggaaccagggtgagggggatcctcaggccgaaggacgccgtcaggatcttccatcctcactgcccgaaccagagacccaagcacccccacgcagttag

SEQ ID NO: 181239 - DNA, 5143 bp, Artificial Sequence
  derived and/or modified sequence
ggacacggagccgcgaggagacagctgaggcccgcggagaccagggggtgaagcctggagaccctcttgccctggcctagctgcaggcccccgggatgctttgggcatgtcctctggagccccacagaagagcagcccaatggccagtggagctgaggagaccccaggcttcctggacacgctcctgcaagacttcccagccctgctgaacccagaggaccctctgccatggaaggccccagggacggtgctcagccaggaggaggtggagggcgagctggctgagctggccatgggctttctgggcagcaggaaggccccgccaccacttgctgctgctctggcccacgaagcagtttcacagctgctacagacagacctttccgaattcaggaagttgcccagggaggaagaagaagaggaggaggacgatgacgaggaggaaaaggcccctgtgaccttgctggatgcccaaagcctggcacagagtttctttaaccgcctttgggaagtcgccggccagtggcagaagcaggtgccattggctgcccgggcctcacagcggcagtggctggtctccatccacgccatccggaacactcgccgcaagatggaggaccggcacgtgtccctcccttccttcaaccagctcttcggcttgtctgaccctgtgaaccgcgcctactttgctgtgtttgatggtcacggaggcgtggatgctgcgaggtacgccgctgtccacgtgcacaccaacgctgcccgccagccagagctgcccacagaccctgagggagccctcagagaagccttccggcgcaccgaccagatgtttctcaggaaagccaagcgagagcggctgcagagcggcaccacaggtgtgtgtgcgctcattgcaggagcgaccctgcacgtcgcctggctcggggattcccaggtcattttggtacagcagggacaggtggtgaagctgatggagccacacagaccagaacggcaggatgagaaggcgcgcattgaagcattgggtggctttgtgtctcacatggactgctggagagtcaacgggaccctggccgtctccagagccatcggggatgtcttccagaagccctacgtgtctggggaggccgatgcagcttcccgggcgctgacgggctccgaggactacctgctgcttgcctgtgatggcttctttgacgtcgtaccccaccaggaagttgttggcctggtccagagccacctgaccaggcagcagggcagcgggctccgtgtcgccgaggagctggtggctgcggcccgggagcggggctcccacgacaacatcacggtcatggtggtcttcctcagggacccccaagagctgctggagggcgggaaccagggagaaggggacccccaggcagaagggaggaggcaggacttgccctccagccttccagaacctgagacccaggctccaccaagaagctaggtggtttccaggcccctgccctccccttcctcccatccttgtccttctctccctcagaagcctcaggacccaacaggtggcaggcagtggacagggtgcccgccccacagtgctttccccagcaccccagagccagtcgggacaccccccgcagcccgtcctggtggctgtggaactgcactgggtggcgggcagatggtggaaggcagcttaggagacctcaccaaagagaagatggaccggctcttgctcccagctcctattaggcccggggtgggaccagaggtcataggtgcccaacggcagccaaaccaaagacactggtgtgcatggggcagcatggttgtgcacgtgggaccctggggcggacccaggagccaaactcttgaagcaccccctgggtcaggcccagcagcggagtggccagccccagtttcccattgctcctctctgcggccagggccaggtgggttcatatttacagatatgcccagccagtcctggtcggccacaccagtgtcccaaagaggagagcgcagcagagccaggggtctgttctgtagcagccacccccctgcccccactccagggcagccatgatgtgcttgggcccaccagggccttccgggctgctctcttccctgagcccggaaccggcgacgcacatgtgtcttttgttggtgtgtttgtttttttccagggaggtctaattccgaagcagtattccaggttttctctttgttttatcagtgccaagatgacctgttgtgtcatataatttaagcagagcttagcatttattttattctttagaaaacttaagtatttacttttttaaagctatttttcaaggaacctttttttgcagtattattgaatttattttctaaatcaggattgaaacaggaacttttccaggtggtgttaataagccattcaagtgccttacacagctttgaagaaactaggactgcagtgggctcggataggcccattgaggtttttagaaaagcaggatttgttttgttagggaggcatgattttggtgagatctttctggaagagttttccgcctctttgtgatgctgaacacccccaaggttctcccctccccccgctgcccaggtgactggcaggagctgcgactgccacgtagtggtgcctgggcccgacagcggggctctgggcatcccgggtgaccttggcccatctgcctgcattcccacccccttgggcctggctggatcccaggcagagggaccttgctgctgtgtgattggaacattcccaaatatcttgtgaatttgtaatcaaattggtctcattgggaaagactcttaattaagaggctcaggcaagcacagaggcagcccgtgggtctctgtctcagtctggaggcagcagggatgctgctgggagtccatggcacaggccacagcccctcaccttgccgcggtggctggcagcacgcctgccttgctctgccccatgccctgaacaggcatgagagctccacgtcccctagtgcaccctgagagggggctcacaagtgaccgatcctgggtgcctcagggagctcactgagggcgtgcaaagttgaaagtggcaaggctgggggagggtgtcgggtagagggaagagggcagggggctaggggaggactcagaggccatctgcagggccaagccacaggaagggctgagctggaggtgggcagggctgctccaggcaggtcagagcagtgcagggggaggagaggagaaagggaggaagctgggctgtgtggtccccatgaaggcattcagagtccacctgcagacagcgagagccccaggaaggtttgcacagctgtgccccaagcaccttggcctcctctcagctcgccgaggaggcacgctagagccgccttcccggtgggagccctctgtcccacagggagcggggagccagctttgctggggccctacctgcatgcccagccttacccctcattctcacagcacagatgaggttgagaccatgcagtcaatgcattgcttaaggtctcttatttacaaaaaaaaaccttaaacatagtcgctgtcattcagacattcagagaatggttggccacaaacaatgaccaagtattgcttggcttaacttgaaggcctgctgtctccttctgggggtcagggacgcagctccaccctcaccactagcccaccctgcccgtgggcataaccttgacgaagagagagaatgattggcatctgcttttctcttttctttgctaataattctgttcctggctgccgagagtgaagtttcaccatgtggaggtttggctcctatcacctggtggtctgattcataccctagcctgaggctccactggaagatctcgcagcctcagtgtatgggaaaccctttccccaggcttgtcccagcactgccgctccccacccctgagccaggaccccagaggatggccatgccccgtgcctggcagaggtctggtgccagcactgggagctgctccgcccttgccttggggccgagggagccctcgtccacccctgcacagcagctgggcacagaggagcgctcttccatcttgaccaggactgcaccaagaagcaccaggtgtcttcagcctccaacctccggggcgaccttctcttccagccacagtcccatgagggcccctagccagggacactggtctgtaaattgtaatcctttctccagcccagctctccacttgttccttgtgtgagctgagcaggcagtgcacctctgagtgtcccttttgtaaggcccaggggttgcactgagtctgcagaggccgcgacctcctagaacgctgtgggtgcaggtgagccggcgtgtcctggggagatgctgccagcacacaggggccctcctgctgccagcaggttggggtggttaagtcttattagtgtctattcttaaaattaagtgggctggagaagaatggagctccacatgccagcaccgtatatggaatacaaaagctggggaagcagggcctgccttacaggtgtggctgactctgagcccaggcctgcaggggtggagggcagtccctcagaatcccagaggcagtcccagcctcagaacccaggataggaaatgggtgtgtttagtggggaaagggacggggtgcagacggcagggccagtatggggccccctccctctcctctcctctcctatggtgagcccagcgtgggcaccgggccgtctcagccgtgttcccagggctgggaggacagctctggcccttcttaggcctagcctcgtcccaagctaaatgtaagccagttgggctgtgttaaaggaagcagtgtttttggttcgattctgcctctgtagctcaaggggggcagcccccagagtcctgtgcattctgccaaggctccatagctttgccaaatgcacggagctctgccattccggtgcagtgcaggccttgcgaagggtttatctgcgttcgtctcggtgggcttctcctgcatgggagttgtgttcctgtgcaagggggagctttgctccaggacaggatgactgtcttccctattcttagggacaagtcccaagatgccagaaaggcagtctcccaaggacccaccatgcagaagtgtcaataaaccacaagttctgaactctg

SEQ ID NO: 181240 - DNA, 1778 bp, Artificial Sequence
  derived and/or modified sequence
ggagccgcgaggagacagctgaggcccgcggagaccagggggtgaagcctggagaccctcttgccctggcctagctgcaggcccccgggatgctttgggcatgtcctctggagccccacagaagagcagcccaatggccagtggagctgaggagaccccaggcttcctggacacgctcctgcaagacttcccagccctgctgaacccagaggaccctctgccatggaaggccccagggacggtgctcagccaggaggaggtggagggcgagctggctgagctggccatgggctttctgggcagcaggaaggccccgccaccacttgctgctgctctggcccacgaagcagtttcacagctgctacagacagacctttccgaattcaggaagttgcccagggaggaagaagaagaggaggaggacgatgacgaggaggaaaaggcccctgtgaccttgctggatgcccaaagcctggcacagagtttctttaaccgcctttgggaagtcgccggccagtggcagaagcaggtgccattggctgcccgggcctcacagcggcagtggctggtctccatccacgccatccggaacactcgccgcaagatggaggaccggcacgtgtccctcccttccttcaaccagctcttcggcttgtctgaccctgtgaaccgcgcctactttgctgtgtttgatggtcacggaggcgtggatgctgcgaggtacgccgctgtccacgtgcacaccaacgctgcccgccagccagagctgcccacagaccctgagggagccctcagagaagccttccggcgcaccgaccagatgtttctcaggaaagccaagcgagagcggctgcagagcggcaccacaggtgtgtgtgcgctcattgcaggagcgaccctgcacgtcgcctggctcggggattcccaggtcattttggtacagcagggacaggtggtgaagctgatggagccacacagaccagaacggcaggatgagaaggcgcgcattgaagcattgggtggctttgtgtctcacatggactgctggagagtcaacgggaccctggccgtctccagagccatcggtgagagccaaagaggccgacccaagtgggagaaggtctctcggaagcccaggcctcgagtgtggcccgcggctcaccaggggttcagggaggcagtgtgatgggccgagggggatttgtcatgcactggggtgataccctcgtagtgtgaagggaacagggcagattcagagactgcagcaccagtgtctgagtgtaagttacactgtatgttattatctcacctaaaacagctcctacaaatctcatagaaacctgtggctcaccaccctatgggctggaagtagagcttccaatattccggaaatgaggtttatcctcctcccgcgttcatgctgacaatccttttttctcttttgggaaaaaagtgggttcgctgggcgcggtggctcacgcctgtaatcccagcactttgggaggccgaggtgggtggatcacctgaggtcgggagttcgagaccagcctgatgaaaccccatgtctactaaaaaaaaaatacaaaaaattagccaggcatggtagtgagcccctgtaattccagctattcagaaggctgaggcaggagaatcacttgaacccagaaggcggaggttgcagtgagctgagatcgcgccactccactccagcctggataacgaggaaaactctgtctcaaaaaataataataaaaataaataaaaattttaaaaagtaa

SEQ ID NO: 181241 - DNA, 5245 bp, Artificial Sequence
  derived and/or modified sequence
tccctgttgttctaaattcggcattactagtgcatgcgtgcatccggggaaaaggaacaaggtgggagaagagagagaaagcgaatacccgaggccgccagcatcagtgggtgcccgcgctctcctcctcgctctcgtcctctgccctccgccctggctccctgcccgcattccctgggagcgcagccttgccttagcctgggagacagctgtccacagtgacaggcggccattgttctcggccgagccagcaggcttccggccggtggcagctgctgctcctccgctctgcggccccaccaagggggcgccgccaccgcccaggccctccccgcctgatgggtctctgtccgtccacgcgggagacagcgccacctgccggtgagaaggagcgttgctgcgccggcaccagcccagtcctacgctcggggctcctgcaggcctgggaaggagggagggcgcagctagaaggaagtctcgcctgcccttgcttccccgtctgtcagagtgcctcgcatgcaggcctgcctagcggccttgatcatgctctccctgtcacggaagtagaatgtagtcaagtttttggactccaagccattcttacaaaattgcgtcagagtggggattgtattataagaattgccactgaagagcagcgagtggctgaaacctctgtgtggctgccagtcagcccctccccggtgactggatcagcgaagaatccagaagcgaggttgcggggctgcagcccttggcatggggagtccgtgggctgggcagcactgcctcagccgctggcctttcctgagcagagtctaggctaagcggctgttggaaatagcagtagcacccggggcgagaccgtgagccacagcggcggccggagtctcccccagcccgagctcaggcctgtgctggatgcccaaagcctggcacagagtttctttaaccgcctttgggaagtcgccggccagtggcagaagcaggtgccattggctgcccgggcctcacagcggcagtggctggtctccatccacgccatccggaacactcgccgcaagatggaggaccggcacgtgtccctcccttccttcaaccagctcttcggcttgtctgaccctgtgaaccgcgcctactttgctgtgtttgatggtcacggaggcgtggatgctgcgaggtacgccgctgtccacgtgcacaccaacgctgcccgccagccagagctgcccacagaccctgagggagccctcagagaagccttccggcgcaccgaccagatgtttctcaggaaagccaagcgagagcggctgcagagcggcaccacaggtgtgtgtgcgctcattgcaggagcgaccctgcacgtcgcctggctcggggattcccaggtcattttggtacagcagggacaggtggtgaagctgatggagccacacagaccagaacggcaggatgagaaggcgcgcattgaagcattgggtggctttgtgtctcacatggactgctggagagtcaacgggaccctggccgtctccagagccatcggggatgtcttccagaagccctacgtgtctggggaggccgatgcagcttcccgggcgctgacgggctccgaggactacctgctgcttgcctgtgatggcttctttgacgtcgtaccccaccaggaagttgttggcctggtccagagccacctgaccaggcagcagggcagcgggctccgtgtcgccgaggagctggtggctgcggcccgggagcggggctcccacgacaacatcacggtcatggtggtcttcctcagggacccccaagagctgctggagggcgggaaccagggagaaggggacccccaggcagaagggaggaggcaggacttgccctccagccttccagaacctgagacccaggctccaccaagaagctaggtggtttccaggcccctgccctccccttcctcccatccttgtccttctctccctcagaagcctcaggacccaacaggtggcaggcagtggacagggtgcccgccccacagtgctttccccagcaccccagagccagtcgggacaccccccgcagcccgtcctggtggctgtggaactgcactgggtggcgggcagatggtggaaggcagcttaggagacctcaccaaagagaagatggaccggctcttgctcccagctcctattaggcccggggtgggaccagaggtcataggtgcccaacggcagccaaaccggcgacgcacatgtgtcttttgttggtgtgtttgtttttttccagggaggtctaattccgaagcagtattccaggttttctctttgttttatcagtgccaagatgacctgttgtgtcatataatttaagcagagcttagcatttattttattctttagaaaacttaagtatttacttttttaaagctatttttcaaggaacctttttttgcagtattattgaatttattttctaaatcaggattgaaacaggaacttttccaggtggtgttaataagccattcaagtgccttacacagctttgaagaaactaggactgcagtgggctcggataggcccattgaggtttttagaaaagcaggatttgttttgttagggaggcatgattttggtgagatctttctggaagagttttccgcctctttgtgatgctgaacacccccaaggttctcccctccccccgctgcccaggtgactggcaggagctgcgactgccacgtagtggtgcctgggcccgacagcggggctctgggcatcccgggtgaccttggcccatctgcctgcattcccacccccttgggcctggctggatcccaggcagagggaccttgctgctgtgtgattggaacattcccaaatatcttgtgaatttgtaatcaaattggtctcattgggaaagactcttaattaagaggctcaggcaagcacagaggcagcccgtgggtctctgtctcagtctggaggcagcagggatgctgctgggagtccatggcacaggccacagcccctcaccttgccgcggtggctggcagcacgcctgccttgctctgccccatgccctgaacaggcatgagagctccacgtcccctagtgcaccctgagagggggctcacaagtgaccgatcctgggtgcctcagggagctcactgagggcgtgcaaagttgaaagtggcaaggctgggggagggtgtcgggtagagggaagagggcagggggctaggggaggactcagaggccatctgcagggccaagccacaggaagggctgagctggaggtgggcagggctgctccaggcaggtcagagcagtgcagggggaggagaggagaaagggaggaagctgggctgtgtggtccccatgaaggcattcagagtccacctgcagacagcgagagccccaggaaggtttgcacagctgtgccccaagcaccttggcctcctctcagctcgccgaggaggcacgctagagccgccttcccggtgggagccctctgtcccacagggagcggggagccagctttgctggggccctacctgcatgcccagccttacccctcattctcacagcacagatgaggttgagaccatgcagtcaatgcattgcttaaggtctcttatttacaaaaaaaaaccttaaacatagtcgctgtcattcagacattcagagaatggttggccacaaacaatgaccaagtattgcttggcttaacttgaaggcctgctgtctccttctgggggtcagggacgcagctccaccctcaccactagcccaccctgcccgtgggcataaccttgacgaagagagagaatgattggcatctgcttttctcttttctttgctaataattctgttcctggctgccgagagtgaagtttcaccatgtggaggtttggctcctatcacctggtggtctgattcataccctagcctgaggctccactggaagatctcgcagcctcagtgtatgggaaaccctttccccaggcttgtcccagcactgccgctccccacccctgagccaggaccccagaggatggccatgccccgtgcctggcagaggtctggtgccagcactgggagctgctccgcccttgccttggggccgagggagccctcgtccacccctgcacagcagctgggcacagaggagcgctcttccatcttgaccaggactgcaccaagaagcaccaggtgtcttcagcctccaacctccggggcgaccttctcttccagccacagtcccatgagggcccctagccagggacactggtctgtaaattgtaatcctttctccagcccagctctccacttgttccttgtgtgagctgagcaggcagtgcacctctgagtgtcccttttgtaaggcccaggggttgcactgagtctgcagaggccgcgacctcctagaacgctgtgggtgcaggtgagccggcgtgtcctggggagatgctgccagcacacaggggccctcctgctgccagcaggttggggtggttaagtcttattagtgtctattcttaaaattaagtgggctggagaagaatggagctccacatgccagcaccgtatatggaatacaaaagctggggaagcagggcctgccttacaggtgtggctgactctgagcccaggcctgcaggggtggagggcagtccctcagaatcccagaggcagtcccagcctcagaacccaggataggaaatgggtgtgtttagtggggaaagggacggggtgcagacggcagggccagtatggggccccctccctctcctctcctctcctatggtgagcccagcgtgggcaccgggccgtctcagccgtgttcccagggctgggaggacagctctggcccttcttaggcctagcctcgtcccaagctaaatgtaagccagttgggctgtgttaaaggaagcagtgtttttggttcgattctgcctctgtagctcaaggggggcagcccccagagtcctgtgcattctgccaaggctccatagctttgccaaatgcacggagctctgccattccggtgcagtgcaggccttgcgaagggtttatctgcgttcgtctcggtgggcttctcctgcatgggagttgtgttcctgtgcaagggggagctttgctccaggacaggatgactgtcttccctattcttagggacaagtcccaagatgccagaaaggcagtctcccaaggacccaccatgcagaagtgtcaataaaccacaagttctg

SEQ ID NO: 181242 - DNA, 5587 bp, Artificial Sequence
  derived and/or modified sequence
tccctgttgttctaaattcggcattactagtgcatgcgtgcatccggggaaaaggaacaaggtgggagaagagagagaaagcgaatacccgaggccgccagcatcagtgggtgcccgcgctctcctcctcgctctcgtcctctgccctccgccctggctccctgcccgcattccctgggagcgcagccttgccttagcctgggagacagctgtccacagtgacaggcggccattgttctcggccgagccagcaggcttccggccggtggcagctgctgctcctccgctctgcggccccaccaagggggcgccgccaccgcccaggccctccccgcctgatgggtctctgtccgtccacgcgggagacagcgccacctgccggtgagaaggagcgttgctgcgccggcaccagcccagtcctacgctcggggctcctgcaggcctgggaaggagggagggcgcagctagaaggaagtctcgcctgcccttgcttccccgtctgtcagagtgcctcgcatgcaggcctgcctagcggccttgatcatgctctccctgtcacggaagtagaatgtagtcaagtttttggactccaagccattcttacaaaattgcgtcagagtggggattgtattataagaattgccactgaagagcagcgagtggctgaaacctctgtgtggctgccagtcagcccctccccggtgactggatcagcgaagaatccagaagcgaggttgcggggctgcagcccttggcatggggagtccgtgggctgggcagcactgcctcagccgctggcctttcctgagcagagtctaggctaagcggctgttggaaatagcagtagcacccggggcgagaccgtgagccacagcggcggccggagtctcccccagcccgagctcaggcctgtgctggatgcccaaagcctggcacagagtttctttaaccgcctttgggaagtcgccggccagtggcagaagcaggtgccattggctgcccgggcctcacagcggcagtggctggtctccatccacgccatccggaacactcgccgcaagatggaggaccggcacgtgtccctcccttccttcaaccagctcttcggcttgtctgaccctgtgaaccgcgcctactttgctgtgtttgatggtcacggaggcgtggatgctgcgaggtacgccgctgtccacgtgcacaccaacgctgcccgccagccagagctgcccacagaccctgagggagccctcagagaagccttccggcgcaccgaccagatgtttctcaggaaagccaagcgagagcggctgcagagcggcaccacaggtgtgtgtgcgctcattgcaggagcgaccctgcacgtcgcctggctcggggattcccaggtcattttggtacagcagggacaggtggtgaagctgatggagccacacagaccagaacggcaggatgagaaggcgcgcattgaagcattgggtggctttgtgtctcacatggactgctggagagtcaacgggaccctggccgtctccagagccatcggggatgtcttccagaagccctacgtgtctggggaggccgatgcagcttcccgggcgctgacgggctccgaggactacctgctgcttgcctgtgatggcttctttgacgtcgtaccccaccaggaagttgttggcctggtccagagccacctgaccaggcagcagggcagcgggctccgtgtcgccgaggagctggtggctgcggcccgggagcggggctcccacgacaacatcacggtcatggtggtcttcctcagggacccccaagagctgctggagggcgggaaccagggagaaggggacccccaggcagaagggaggaggcaggacttgccctccagccttccagaacctgagacccaggctccaccaagaagctaggtggtttccaggcccctgccctccccttcctcccatccttgtccttctctccctcagaagcctcaggacccaacaggtggcaggcagtggacagggtgcccgccccacagtgctttccccagcaccccagagccagtcgggacaccccccgcagcccgtcctggtggctgtggaactgcactgggtggcgggcagatggtggaaggcagcttaggagacctcaccaaagagaagatggaccggctcttgctcccagctcctattaggcccggggtgggaccagaggtcataggtgcccaacggcagccaaaccaaagacactggtgtgcatggggcagcatggttgtgcacgtgggaccctggggcggacccaggagccaaactcttgaagcaccccctgggtcaggcccagcagcggagtggccagccccagtttcccattgctcctctctgcggccagggccaggtgggttcatatttacagatatgcccagccagtcctggtcggccacaccagtgtcccaaagaggagagcgcagcagagccaggggtctgttctgtagcagccacccccctgcccccactccagggcagccatgatgtgcttgggcccaccagggccttccgggctgctctcttccctgagcccggaaccggcgacgcacatgtgtcttttgttggtgtgtttgtttttttccagggaggtctaattccgaagcagtattccaggttttctctttgttttatcagtgccaagatgacctgttgtgtcatataatttaagcagagcttagcatttattttattctttagaaaacttaagtatttacttttttaaagctatttttcaaggaacctttttttgcagtattattgaatttattttctaaatcaggattgaaacaggaacttttccaggtggtgttaataagccattcaagtgccttacacagctttgaagaaactaggactgcagtgggctcggataggcccattgaggtttttagaaaagcaggatttgttttgttagggaggcatgattttggtgagatctttctggaagagttttccgcctctttgtgatgctgaacacccccaaggttctcccctccccccgctgcccaggtgactggcaggagctgcgactgccacgtagtggtgcctgggcccgacagcggggctctgggcatcccgggtgaccttggcccatctgcctgcattcccacccccttgggcctggctggatcccaggcagagggaccttgctgctgtgtgattggaacattcccaaatatcttgtgaatttgtaatcaaattggtctcattgggaaagactcttaattaagaggctcaggcaagcacagaggcagcccgtgggtctctgtctcagtctggaggcagcagggatgctgctgggagtccatggcacaggccacagcccctcaccttgccgcggtggctggcagcacgcctgccttgctctgccccatgccctgaacaggcatgagagctccacgtcccctagtgcaccctgagagggggctcacaagtgaccgatcctgggtgcctcagggagctcactgagggcgtgcaaagttgaaagtggcaaggctgggggagggtgtcgggtagagggaagagggcagggggctaggggaggactcagaggccatctgcagggccaagccacaggaagggctgagctggaggtgggcagggctgctccaggcaggtcagagcagtgcagggggaggagaggagaaagggaggaagctgggctgtgtggtccccatgaaggcattcagagtccacctgcagacagcgagagccccaggaaggtttgcacagctgtgccccaagcaccttggcctcctctcagctcgccgaggaggcacgctagagccgccttcccggtgggagccctctgtcccacagggagcggggagccagctttgctggggccctacctgcatgcccagccttacccctcattctcacagcacagatgaggttgagaccatgcagtcaatgcattgcttaaggtctcttatttacaaaaaaaaaccttaaacatagtcgctgtcattcagacattcagagaatggttggccacaaacaatgaccaagtattgcttggcttaacttgaaggcctgctgtctccttctgggggtcagggacgcagctccaccctcaccactagcccaccctgcccgtgggcataaccttgacgaagagagagaatgattggcatctgcttttctcttttctttgctaataattctgttcctggctgccgagagtgaagtttcaccatgtggaggtttggctcctatcacctggtggtctgattcataccctagcctgaggctccactggaagatctcgcagcctcagtgtatgggaaaccctttccccaggcttgtcccagcactgccgctccccacccctgagccaggaccccagaggatggccatgccccgtgcctggcagaggtctggtgccagcactgggagctgctccgcccttgccttggggccgagggagccctcgtccacccctgcacagcagctgggcacagaggagcgctcttccatcttgaccaggactgcaccaagaagcaccaggtgtcttcagcctccaacctccggggcgaccttctcttccagccacagtcccatgagggcccctagccagggacactggtctgtaaattgtaatcctttctccagcccagctctccacttgttccttgtgtgagctgagcaggcagtgcacctctgagtgtcccttttgtaaggcccaggggttgcactgagtctgcagaggccgcgacctcctagaacgctgtgggtgcaggtgagccggcgtgtcctggggagatgctgccagcacacaggggccctcctgctgccagcaggttggggtggttaagtcttattagtgtctattcttaaaattaagtgggctggagaagaatggagctccacatgccagcaccgtatatggaatacaaaagctggggaagcagggcctgccttacaggtgtggctgactctgagcccaggcctgcaggggtggagggcagtccctcagaatcccagaggcagtcccagcctcagaacccaggataggaaatgggtgtgtttagtggggaaagggacggggtgcagacggcagggccagtatggggccccctccctctcctctcctctcctatggtgagcccagcgtgggcaccgggccgtctcagccgtgttcccagggctgggaggacagctctggcccttcttaggcctagcctcgtcccaagctaaatgtaagccagttgggctgtgttaaaggaagcagtgtttttggttcgattctgcctctgtagctcaaggggggcagcccccagagtcctgtgcattctgccaaggctccatagctttgccaaatgcacggagctctgccattccggtgcagtgcaggccttgcgaagggtttatctgcgttcgtctcggtgggcttctcctgcatgggagttgtgttcctgtgcaagggggagctttgctccaggacaggatgactgtcttccctattcttagggacaagtcccaagatgccagaaaggcagtctcccaaggacccaccatgcagaagtgtcaataaaccacaagttctg

SEQ ID NO: 181243 - DNA, 1634 bp, Artificial Sequence
  derived and/or modified sequence
attactagtgcatgcgtgcatccggggaaaaggaacaaggtgggagaagagagagaaagcgaatacccgaggccgccagcatcagtgggtgcccgcgctctcctcctcgctctcgtcctctgccctccgccctggctccctgcccgcattccctgggagcgcagccttgccttagcctgggagacagctgtccacagtgacaggcggccattgttctcggccgagccagcaggcttccggccggtggcagctgctgctcctccgctctgcggccccaccaagggggcgccgccaccgcccaggccctccccgcctgatgggtctctgtccgtccacgcgggagacagcgccacctgccgtgctggatgcccaaagcctggcacagagtttctttaaccgcctttgggaagtcgccggccagtggcagaagcaggtgccattggctgcccgggcctcacagcggcagtggctggtctccatccacgccatccggaacactcgccgcaagatggaggaccggcacgtgtccctcccttccttcaaccagctcttcggcttgtctgaccctgtgaaccgcgcctactttgctgtgtttgatggtcacggaggcgtggatgctgcgaggtacgccgctgtccacgtgcacaccaacgctgcccgccagccagagctgcccacagaccctgagggagccctcagagaagccttccggcgcaccgaccagatgtttctcaggaaagccaagcgagagcggctgcagagcggcaccacaggtgtgtgtgcgctcattgcaggagcgaccctgcacgtcgcctggctcggggattcccaggtcattttggtacagcagggacaggtggtgaagctgatggagccacacagaccagaacggcaggatgagaaggcgcgcattgaagcattgggtggctttgtgtctcacatggactgctggagagtcaacgggaccctggccgtctccagagccatcggggatgtcttccagaagccctacgtgtctggggaggccgatgcagcttcccgggcgctgacgggctccgaggactacctgctgcttgcctgtgatggcttctttgacgtcgtaccccaccaggaagttgttggcctggtccagagccacctgaccaggcagcagggcagcgggctccgtgtcgccgaggagctggtggctgcggcccgggagcggggctcccacgacaacatcacggtcatggtggtcttcctcagggacccccaagagctgctggagggcgggaaccagggagaaggggacccccaggcagaagggaggaggcaggacttgccctccagccttccagaacctgagacccaggctccaccaagaagctaggtggtttccaggcccctgccctccccttcctcccatccttgtccttctctccctcagaagcctcaggacccaacaggtggcaggcagtggacagggtgcccgccccacagtgctttccccagcaccccagagccagtcgggacaccccccgcagcccgtcctggtggctgtggaactgcactgggtggcgggcagatggtggaaggcagcttaggagacctcaccaaagagaagatggaccggctcttgctcccagctcctatta

SEQ ID NO: 181244 - protein, 557 aa, Artificial Sequence
  derived and/or modified sequence
MYKRNGLMASVLVTSATPQGSSSSDSLEGQSCDYASKSYDAVVFDVLKVTPEEFASQITLMDIPVFKAIQPEELASCGWSKKEKHSLAPNVVAFTRRFNQVSFWVVREILTAQTLKIRAEILSHFVKIAKKLLELNNLHSLMSVVSALQSAPIFRLTKTWALLNRKDKTTFEKLDYLMSKEDNYKRTREYIRSLKMVPSIPYLGIYLLDLIYIDSAYPASGSIMENEQRSNQMNNILRIIADLQVSCSYDHLTTLPHVQKYLKSVRYIEELQKFVEDDNYKLSLRIEPGSSSPRLVSSKEDLAGPSAGSGSARFSRRPTCPDTSVAGSLPTPPVPRHRKSHSLGNNMMCQLSVVESKSATFPSEKARHLLDDSVLESRSPRRGLALTSSSAVTNGLSLGSSESSEFSEEMSSGLESPTGPCICSLGNSAAVPTMEGPLRRKTLLKEGRKPALSSWTRYWVILSGSTLLYYGAKSLRGTDRKHYKSTPGKKVSIVGWMVQLPDDPEHPDIFQLNNPDKGNVYKFQTGSRFHAILWHKHLDDACKSNRPQVPANLMSFE

SEQ ID NO: 181245 - DNA, 1674 bp, Artificial Sequence
  derived and/or modified sequence
atgtataagcgaaacggacttatggcctctgtactcgtgacctccgcgactccacagggtagctctagctctgatagcctagagggccagtcctgcgattacgcctctaagagctacgatgctgtcgtctttgatgtgctcaaagtgacccccgaggagttcgcctcgcagatcacccttatggacattccagtgtttaaggcgatccagccggaggagctggcttcgtgcgggtggagtaaaaaagagaagcatagcctcgcccccaatgtggttgcctttacccgacgattcaatcaggtgagtttctgggttgtccgcgaaatactaacagcccagaccctgaagatacgagctgaaattttaagccactttgtaaaaattgcaaaaaagttactagagctgaataatctgcattctctcatgtccgtggtctcagcactgcagtctgcccctatcttccggctgacaaaaacatgggccttgctaaaccgtaaggacaaaacaactttcgagaagctggattatctgatgagcaaagaggataactataagcggacgagggagtatataagatctctgaagatggtaccctcaattccttatctgggcatctacctgcttgatctgatatatattgattcggcttatcccgccagcggaagcatcatggagaacgaacagcggagtaaccagatgaacaacattctgcggattattgccgatctacaggtcagctgttcgtatgaccacctgaccaccctgccgcacgttcagaagtacctgaaaagcgtgaggtacattgaagagctccagaagttcgtggaggatgataactataagctctctcttaggatcgagccaggatcttcctcaccacgcctcgtctccagtaaggaggacctagcagggccatcagccggttccgggagcgcccggttctcccggcgccctacctgtccggacacttccgtcgctgggtcattgcccacccctcccgttccccgccacaggaaatcgcattctcttggaaataacatgatgtgtcaactgtccgtagttgaatccaagagcgcaacattccccagtgaaaaggccaggcacttgctagacgactccgtgctggaaagccgtagccctaggcgcggcctggcactaacctcgagcagtgccgtgaccaacggcctgagcctggggagtagtgagagctctgaattttccgaggagatgtcgagcgggctggagtctcctactggaccgtgcatttgctctctgggtaattctgcagccgtgcccacaatggaaggacctctcaggagaaaaacactgcttaaagagggacggaagcctgccctgtctagctggactcgctactgggtgatcctgtcaggcagtacattattgtattatggtgccaagtccctgagaggtaccgacaggaaacactacaaaagcacccccgggaagaaggtttccatcgtgggctggatggtacagctgccggacgacccagaacacccagacatcttccagcttaacaaccccgacaaaggtaatgtgtacaaattccagactgggtctcgcttccatgctattctgtggcataaacacctggatgatgcttgcaagtctaacaggccacaagtcccagccaacttaatgagcttcgagtag

SEQ ID NO: 181246 - DNA, 1674 bp, Artificial Sequence
  derived and/or modified sequence
atgtacaagagaaatggcctgatggcctctgtgctggtgaccagcgccaccccccagggcagcagcagcagtgacagcctggagggccagagctgtgactatgccagcaagagctatgatgctgtggtgtttgatgtgctgaaggtgaccccagaggagtttgccagccagatcaccctgatggacatccctgtgttcaaggccatccagcctgaggagctggccagctgtggctggagcaagaaggagaagcacagcctggcccccaacgtggtggccttcacccggcgcttcaaccaggtgtccttctgggtggtgcgggagatcctgacagcccagaccctgaagatccgggcagagatcctgagccactttgtgaagatcgccaagaagctgctggagctgaacaacctgcacagcctgatgtctgtggtgtctgccctgcagagcgcccccatcttccggctgaccaagacctgggccctgctgaacaggaaggacaagaccacctttgagaagctggactacctgatgagcaaagaagacaactacaagaggacccgggagtacatccgcagcctgaagatggtgcccagcatcccctacctgggcatctacctgctggacctgatctacattgattctgcctacccagccagcggcagcatcatggagaatgagcagaggagcaaccagatgaacaacatcctgcgcatcatcgctgacctgcaggtgtcctgcagctatgaccacctgaccaccctgccccacgtgcagaagtacctgaagtctgtgcgctacatcgaggagctgcagaagtttgtggaggatgacaactacaagctgagcctgcgcatcgagcccggcagcagcagcccccggctggtgagcagcaaggaggacctggccggccccagcgctggcagcggcagcgcccgcttcagccggcggcccacctgcccagacacctctgtggccggcagcctgcccaccccacctgtgcccaggcacaggaagagccacagcctgggcaacaacatgatgtgccagctgtctgtggtggagagcaagagcgccaccttccccagcgagaaggcccggcacctgctggatgattctgtgctggagagccgcagcccccggcggggcctggccctgaccagcagcagcgctgtgaccaacggcctgagcctgggcagcagcgagagcagcgagttcagcgaggagatgagcagcggcctggagagccccaccggcccctgcatctgcagcctgggcaacagcgctgctgtgcccaccatggagggccccctgcggaggaagaccctgctgaaggagggcaggaagccagccctgagctcctggacccgctactgggtgatcctgagcggcagcaccctgctgtactacggggccaagagcctgcggggcacagacaggaagcactacaagagcaccccaggcaagaaggtgtccatcgtgggctggatggtgcagctgcctgatgatcctgagcacccagacatcttccagctgaacaacccagacaagggaaatgtgtacaagttccagacaggcagccgcttccacgccatcctgtggcacaagcacctggatgatgcctgcaagagcaaccggccccaggtgcctgccaacctgatgagctttgaatag

SEQ ID NO: 181247 - DNA, 1674 bp, Artificial Sequence
  derived and/or modified sequence
atgtacaagcggaacggcctgatggccagcgtgctggtgaccagcgctaccccgcagggtagtagttctagtgattcattggaaggacagagttgcgattatgcgtctaaatcctatgacgcagtggtgtttgacgtcttaaaagtcacccccgaggagtttgcatcgcagatcaccctcatggatattcccgtgtttaaagctattcaacctgaggaactggcatcatgtggttggtctaagaaggagaagcactctctggctccgaacgtagtagcctttacacggcgatttaatcaggtgagcttctgggtggttcgggaaatcctcacagcccagacattgaagatacgggccgaaatcctcagccactttgttaagattgctaaaaagctcctagaactgaataacctgcattctctcatgtctgttgtgtctgcgctgcagagtgcccccatcttccgcttgactaagacatgggctctgctgaataggaaagataaaacaacgtttgaaaagcttgactacctgatgtcaaaggaagacaattacaaacgcacccgggaatatattagatccctcaaaatggtcccctccattccttacctgggaatatacttgctcgatctcatctacattgattcagcctaccccgctagtggcagcattatggaaaatgaacagcgtagtaatcagatgaacaacatcctccgaattattgcagatctgcaggttagttgctcctacgaccatctaactaccctcccccacgtgcaaaagtacctcaaatcagtgcggtacatcgaagaactgcagaagttcgtcgaagacgacaattacaaactttctctgcgcatcgagcccggttcctcctcccctcgtctggttagctccaaggaggatctggccggcccatctgctgggtctggttcagctcgattcagtaggcgacctacgtgccctgacaccagcgtggcgggaagcttgccaactcctccagtccctagacatcgcaagtctcactccctcggtaacaacatgatgtgtcaactctccgtggtggaaagtaagtcagcaactttcccctcagagaaagccaggcatctcctcgatgactccgtgctcgagagccgctccccgcggcgagggctcgctctcacttcttcctccgctgttaccaatggactctctcttggatcgagcgagagtagcgagttcagcgaagagatgagctctgggctggaatccccaacagggccctgtatttgctctctgggtaattctgccgcagtccctactatggagggaccacttcggaggaagaccctgctcaaagagggccgaaagcccgccctgtcgtcgtggactcggtactgggtgatactctccggaagcaccctgctgtattacggagctaaaagtttgcgggggactgaccgaaaacattataaatcaacacccggaaaaaaggtttctatcgtgggctggatggttcagctgcccgacgatcctgaacatccggacatattccagctcaataatcccgacaagggcaacgtctataagtttcagacagggtcaagatttcatgcaatcctctggcacaaacaccttgacgatgcctgcaagtccaataggcctcaggtacctgctaatttaatgtcattcgaatag

SEQ ID NO: 181248 - DNA, 1674 bp, Artificial Sequence
  derived and/or modified sequence
atgtataaacgtaacgggctaatggccagtgtgctcgttacctctgcaactcctcagggctcctcctcttccgacagcctggaggggcaatcttgcgactatgcctctaaatcctatgatgctgtggtatttgatgtcttgaaagtgacgcctgaggaatttgcttcacagataacgttgatggatatcccagtgtttaaggccatccagccggaggaacttgctagttgtggctggtcaaagaaggagaagcattctctagcgccaaacgtggtcgcttttaccaggcgcttcaaccaagtgtccttttgggtggtccgtgaaatcctgaccgcgcagacactaaagattcgggcagagattctgagtcacttcgtcaagatcgcaaagaagctgctggaactgaataatctacatagtctgatgagcgtcgtgtcagcccttcagagcgcccctattttcagactgacgaagacttgggccctgttaaacaggaaggacaagactaccttcgagaaactggattatctgatgtctaaggaggataactataagcgcaccagagaatacattcggtccctgaagatggtgccatccatcccatacctcggaatttatctactggacctcatttacattgattccgcttatccggcttccggtagtataatggaaaatgaacagcgcagtaatcaaatgaacaatatcctccgaatcatagccgatttgcaagtttcctgctcgtacgatcatctgacgacactcccgcacgtacagaaatatctgaagagcgtgaggtacatcgaggagcttcagaagtttgtggaggatgacaactacaaattgtccttgcgtatcgaacccggaagctcgagcccacggctggtgtcatcaaaggaggacctggctggcccttctgctggctcagggtctgcacgattctcacgcagacccacctgccccgacaccagtgtggctgggtcactcccaacaccgcctgtgccacggcacagaaagtctcatagtctaggcaacaacatgatgtgtcagttgtctgtcgtggagtccaaatcagctacctttccttccgaaaaagccaggcatctgctcgatgactcggtgctggagtccagaagcccgaggagggggctggccctcacttctagctccgccgtgaccaatggactgagcctgggctcttctgaaagctctgagttcagtgaagaaatgtccagtggactggagagccctaccggtccatgcatttgctcactaggtaattcagccgctgtgccaacgatggaaggcccactccgccgaaaaaccctcctcaaggagggcagaaaacctgctcttagtagctggacccggtactgggtaatcctgagcggctccacactcctctattatggagccaaatctctcagaggtacagatagaaagcattacaagtccacaccaggaaaaaaggtgtcaatagtagggtggatggtacaactgcccgatgacccggaacatccggatatctttcagcttaataatcccgataagggcaatgtatataaatttcaaaccggtagtcggttccacgctatcctgtggcataagcacctggatgacgcgtgtaaatcaaacagacctcaggtccccgctaatcttatgtccttcgagtag

SEQ ID NO: 181249 - DNA, 6336 bp, Artificial Sequence
  derived and/or modified sequence
cgccgctcaggccctggagcggacggttcctactgcggctgggcaccggctccgctcccgcgtctgcccgcgctccagctgcgcctggcccggccccggcccggctcggcgtggccccggcctccaagcgaaggcgccgctgccgctgggccgctcccagggccatgaggaagcggcggcagccactgcggcccgcgtcaaggacttctccagacaggttatgttacctgcagaggctgccctgaagctccctgtggcctggagactatgtacaagaggaatggtctgatggctagcgtgttggtcacctctgccactccacagggcagcagcagctcggactctctggagggccagagctgcgactatgccagcaagagctatgatgccgttgtcttcgatgtcttgaaagtgaccccagaggagtttgctagccagattacattaatggatatacctgtgtttaaagctatccagccggaggaactagccagctgtggatggagtaagaaggagaaacacagtcttgcccctaacgttgtggcctttacccggaggtttaaccaggtcagtttttgggttgtacgagaaattctaacagcacagactttaaaaataagggcagaaatcctcagccattttgtgaaaatagccaagaaacttctagaactcaacaaccttcattctctcatgtctgtggtatcagcattacaaagtgctcccatcttcaggctgacaaaaacctgggctcttttaaatcgaaaagacaagactacctttgagaaattggactacctgatgtcgaaagaagataattacaagcggacacgggaatatatccgaagcctgaagatggttccaagtattccctatctaggaatctatcttctggatttaatctacattgattctgcatatcctgcctcaggcagtatcatggaaaatgaacaaagatccaatcagatgaacaatattcttcgaataattgctgatttacaagtttcctgcagctatgatcacctcaccaccctgccccatgtgcagaagtacctgaagtccgtacgctacattgaagagctccagaagtttgtggaagacgacaactacaaactgtcgctcagaatcgaaccaggaagcagctctccaagactagtctcttccaaggaagatcttgcaggtccctctgctggctccggttctgcgaggttcagccggaggcccacctgtcctgacacatctgttgctggcagcctccccacacctccagtccccagacacaggaagagccacagcctaggcaacaatatgatgtgtcagttgagtgtagttgagagtaaaagtgcgacattcccatcggagaaagcaaggcacctactggacgacagtgtcctagagtcccgcagcccccgaaggggcctggctctgacctcctcctctgctgtcaccaatggactctccctaggcagtagtgagagctcagagtttagtgaagagatgtcttcagggctggaaagccccaccggcccgtgcatctgttctctggggaactccgcagctgtgcccaccatggaggggcctctgagaagaaaaaccctgctcaaggaagggcggaagcctgcgctgtcctcgtggaccaggtactgggtcatactctcaggatccaccctcctgtactacggagccaagtccttgcggggcacagacagaaaacactataaatccacacctggcaaaaaggtttccatcgtgggctggatggtgcagctgcccgatgaccccgagcacccagatatcttccagctgaacaaccctgacaaaggcaatgtttacaagtttcagactggttcccgatttcatgcaatactgtggcacaagcatttggatgatgcatgtaaaagcaacaggcctcaggtacctgcaaaccttatgtcatttgagtaagtctctgcaggacgtggcatgacttcagaggcttctgggaacccaggctgggcctggtggtgaagagcagtcctgggcacaggctgtgagccagggtgctgggaaactcacagctggactcaggggacacggcctgtggcctcaccatcccagagggcttcaccagtgtgggatccacctgtcagtccccagcgactctcatgacactcattctgcagcaccgcctcttggggcagtggtcagaccccacacgccctctctgggcccaccacctgcatctgcgactagagagcacccggcccacgttgggttctcagtgctttctactgcacagagtggacagcgctaactaacctgtgagaggggcccgagagaaggaacagctgtggaacaggctttttacaccccaagtgcatggggttgctcgcccacagggctgcctcagattttgtacaaccccgaagcgtcctctgcgtgtgcgtgctgtacgtgtgtgtgtgtgtgtgagcgagtgtgaactcttcaagaaacatgcattttggcacaagactcgtgacatcacacacttcattcgctttgaggccctgctttaaccttaagttatagccctgtccaccgaggaaggtcagggtgagagcctagattcctcctgtgtcaagggtccctcgcattcttttactgtaaacaaacaatgccttaaattgtgtcttgttttctgttcctatgggtgctattcatctggaaggcctgcttccaggcctctttgctgtcagcccttctgagacaggacctggcttcaggactgtggactgggctgctggcctgcttgcttcctcccttccccattcctagcagggcctgaggccctcctcttctcgcccttcccaccatgccagaatgggaagttgtgacgttgcagctccaaccgacgtgctcatagtgatcagctgtgcaggagccatgaggcaccaacctctccccgcagggcaaagcctgtgcccccatcatctcactcctttgcctgcactgccagggtggggcccaccaagattcctgatcatgacgggaagctgagtgaccctgaggccttaagcttccccagtcttggccccaaatgcagtcaccagcaagttttccattttccaagtccaagggcacaattgttgatgaccgtgtgacaatagagcgaagccccggggagtgaacggtccaacctctgcattcagttaggagctcttcacatgaatcacatccttatctgtcaccttgtgtcacattttaaagtgacttttattttgcacaaataatttttattcagaataataaatcactctttatcatagtatcttctcttccctcttcccctttagtttggatagcctaactctgagaagttaacccttaaacagttttctggaagagactgaatttctgggtccttgcagctgtgatggtttcagagctcagactgatcaggcatcaagctaccctcaagagtttctgggctggatgtttcagaacaacatctacaccagtaaagtgtaataggtcagtttcaaaacgaccaaaagacccaccactgtattttgaccaaataatgacaacttctttagaaatttgaatggcttggtgaggaaagtagttgtcaccagggcctcattttgtagttgagccttacaatgcttagtagttcatcttctttttgagcaaagactagaatactttcctcctaagagaaactcccaggtgataaaagttgatgccatcaaaccttgacaccgggtgctctgcacacccacgcggatgttgcacctcattctcccgatgactattcaaatcagcatctagaggctgaatgacaatgccaaacactccacctctgatcagaaccatgcagtgttaacactttaacctacattgaatctgattctacctgttaacttttaaaaagtcgtaagtttggatgaaagtgcaagatgtggaacatcaactacctattttccttgggtttttccactctgcaaactgtcctggtttttcacaccaatgaagtattatagatgccaatccaaaacctcagaatttcaggcaccacaaaaacaggtaattttctatcccttataagtttgtcttttctttcagaaacatctcttagcctaatttgaaatagcacaatcacaattcaaaatgtttagtcttctcactaattgagtctgcttccacgtcctctcccaggaacattcttagctcggactcttgaagaatctctttagattttgttggcaaaagccttatagaagcagtaagaggcttgaccacgccggaagagtcctggagctaaagctggaagacactcagctctctaagcaggggctcggccaaacatgggagttaagtgctgcttgtcttcccagtgttggtttgaaccctgtgagcctgagacagagagggccaggcaccaaccacaaggcgggaaagtccatgggtagaccctccccctggagggaagcatttctagtttttgctccttgactgtccagagtgtacaaatgttcataacgccattgaagggattatttcttgcatgcatatgctgaatttttttaagcaaatggatcatggcaccccaaaatgaaagttatagaaagctgtctacaactgtggagttggtagctggtaacattgttgtctcaagaacaactcacctctctccctaggactaatttttgtctctctcagttgaacatgttttgtcattcaagatcagtcaggtgcattctggcaactgacatacttgatggaggattgattcggtagagagcagtagaaatcttgttctaactgtgcctggtgagagactttggccccctccctccctataaggctgtggaacctgaggaagtagatacttgaagagattctgtttaggaagaaactcactctcttttgccagttgaatttatagagcattttttttcttaccaagatggccagtatcattttacccccacctcccaagccccaagaggtgtaccttttcagatgccattttacaggcggaaatgctccatgaaacaggaagccacttgcaagcaacatctgctctgttcctcaggtggggcccagagcccttccccgagactgctgatgtctgtaaccactggggagcactgccaaaaatacagctttctggtttgtgagcccataaatgacttaaatcagctttacatcatttttacatatcaagtggtttcatgttaaaaaacaaactcctagtcctttagaaataacagattctctgcacaaaaccacccattcattcatttattcattcacagcactagcaagtgctgcctatgctgagaacaagtcagatctgatccctgccctcatggacctgaccactcaacaaacagtccccaccacacctatctccttaggcaagactttgcctctctcctagtcctgagtataaatcctgtgcatagattcctctagaaaggcatcaaaaggctcaacagactgaatggcctcttggtctgcgaaaattcagttgcaatgaggatgaagtcactatcctagaggctgcttggcccagaagagccaggcacagagctgcagttgggcacgccaaggattccaaaggtggaatgagagagtagggtcaaactgtcacagtatctgctccataggtttctgtttttaatttcaatgttaaatacaactacaatatgagcgagaactgcattttcttgggtgttgagaacttgtaccatggacttcagaccgccttgcagccgtatgctgcacaagcgtgtacaccccctgggcagcctcaaaaccccgcttacagcagcaacacaggagatcatctgtccattttagaaccattaatctctttatccattgctgaacgactgtgactattcagtaacgaagtaatagtaattaattagtatggtataatctttaataaatttcgtgccaaaatgcatggttttccacttagcattcaaaatgttgcatagagagtagttttcaatttcttatgtactcttcgaagtaagttgaaaatcagtttctacattttaattcgtttcctgttaaatctgttgcactctcctgggctgtctttttctccagcagacccctgcatgcagttgtgtaaggactttctctaattcttgtgaatcgtctcacccgcagtaaccactgaacgtcaatcagccctccatggggttctttcgatttttggtgaagtattttgttacctcagtcttgtatcaagttgctgtatttttcagcttgttacattgataataattatttcactaattaaatactttaatgtacaaacatctttgtttactttgaaattaaatgtgttttccaatg

SEQ ID NO: 181250 - DNA, 1674 bp, Artificial Sequence
  derived and/or modified sequence
atgtacaagagaaacggcctgatggccagcgtgctggtgaccagcgccaccccccagggcagcagcagcagcgacagcctggagggccagagctgcgactacgccagcaagagctacgacgccgtggtgttcgacgtgctgaaggtgacccccgaggagttcgccagccagatcaccctgatggacatccccgtgttcaaggccatccagcccgaggagctggccagctgcggctggagcaagaaggagaagcacagcctggcccccaacgtggtggccttcaccagaagattcaaccaggtgagcttctgggtggtgagagagatcctgaccgcccagaccctgaagatcagagccgagatcctgagccacttcgtgaagatcgccaagaagctgctggagctgaacaacctgcacagcctgatgagcgtggtgagcgccctgcagagcgcccccatcttcagactgaccaagacctgggccctgctgaacagaaaggacaagaccaccttcgagaagctggactacctgatgagcaaggaggacaactacaagagaaccagagagtacatcagaagcctgaagatggtgcccagcatcccctacctgggcatctacctgctggacctgatctacatcgacagcgcctaccccgccagcggcagcatcatggagaacgagcagagaagcaaccagatgaacaacatcctgagaatcatcgccgacctgcaggtgagctgcagctacgaccacctgaccaccctgccccacgtgcagaagtacctgaagagcgtgagatacatcgaggagctgcagaagttcgtggaggacgacaactacaagctgagcctgagaatcgagcccggcagcagcagccccagactggtgagcagcaaggaggacctggccggccccagcgccggcagcggcagcgccagattcagcagaagacccacctgccccgacaccagcgtggccggcagcctgcccaccccccccgtgcccagacacagaaagagccacagcctgggcaacaacatgatgtgccagctgagcgtggtggagagcaagagcgccaccttccccagcgagaaggccagacacctgctggacgacagcgtgctggagagcagaagccccagaagaggcctggccctgaccagcagcagcgccgtgaccaacggcctgagcctgggcagcagcgagagcagcgagttcagcgaggagatgagcagcggcctggagagccccaccggcccctgcatctgcagcctgggcaacagcgccgccgtgcccaccatggagggccccctgagaagaaagaccctgctgaaggagggcagaaagcccgccctgagcagctggaccagatactgggtgatcctgagcggcagcaccctgctgtactacggcgccaagagcctgagaggcaccgacagaaagcactacaagagcacccccggcaagaaggtgagcatcgtgggctggatggtgcagctgcccgacgaccccgagcaccccgacatcttccagctgaacaaccccgacaagggcaacgtgtacaagttccagaccggcagcagattccacgccatcctgtggcacaagcacctggacgacgcctgcaagagcaacagaccccaggtgcccgccaacctgatgagcttcgagtag

SEQ ID NO: 181251 - protein, 1564 aa, Artificial Sequence
  derived and/or modified sequence
MSSKEVKTALKSARDAIRNKEYKEALKHCKTVLKQEKNNYNAWVFIGVAAAELEQPDQAQSAYKKAAELEPDQLLAWQGLANLYEKYNHINAKDDLPGVYQKLLDLYESVDKQKWCDVCKKLVDLYYQEKKHLEVARTWHKLIKTRQEQGAENEELHQLWRKLTQFLAESTEDQNNETQQLLFTAFENALGLSDKIPSEDHQVLYRHFIQSLSKFPHESARLKKACEGMINIYPTVQYPLEVLCLHLIESGNLTDEGQQYCCRLVEMDSKSGPGLIGLGIKALQDKKYEDAVRNLTEGLKESPVCTSGWYHLAEAQVKMHRPKEAVLSCSQALKIVDNLGASGNSLYQRNLCLHLKAEALIKLSDYDSSEEAIRTLDQISDADNIPGLLVLKSLAYRNKGSFDEAAKIMEDLLSSYPDLAEVHALEALIHFTKKDYLQAEKCFQRALEKDTEVAEYHYQLGLTYWFMGEETRKDKTKALTHFLKAARLDTYMGKVFCYLGHYYRDVVGDKNRARGCYRKAFELDDTDAESGAAAVDLSVELEDMEMALAILTTVTQKASAGTAKWAWLRRGLYYLKAGQHSQAVADLQAALRADPKDFNCWESLGEAYLSRGGYTTALKSFTKASELNPESIYSVFKVAAIQQILGKYKEAVAQYQMIIKKKEDYVPALKGLGECHLMMAKAALVDYLDGKAVDYIEKALEYFTCALQHRADVSCLWKLAGDACTCLYAVAPSKVNVHVLGVLLGQKEGKQVLKKNELLHLGGRCYGRALKLMSTSNTWCDLGINYYRQAQHLAETGSNMNDLKELLEKSLHCLKKAVRLDSNNHLYWNALGVVACYSGIGNYALAQHCFIKSIQSEQINAVAWTNLGVLYLTNENIEQAHEAFKMAQSLDPSYLMCWIGQALIAEAVGSYDTMDLFRHTTELNMHTEGALGYAYWVCTTLQDKSNRETELYQYNILQMNAIPAAQVILNKYVERIQNYAPAFTMLGYLNEHLQLKKEAANAYQRAILLLQTAEDQDTYNVAIRNYGRLLCSTGEYDKAIQAFKSTPLEVLEDIIGFALALFMKGLYKESSKAYERALSIVESEQDKAHILTALAITEYKQGKTDVAKTLLFKCSILKEPTTESLQALCALGLAMQDATLSKAALNELLKHIKHKDSNYQRCLLTSAIYALQGRSVAVQKQISKAVHSNPGDPALWSLLSRVVAQYAQRNAKGGVVAGNVAHILDSNHGKKALLYTAVNQLAMGSSSAEDEKNTALKTIQKAALLSPGDPAIWAGLMAACHADDKLALVNNTQPKRIDLYLALLSAVSASIKDEKFFENYNQSLEKWSLSQAVTGLIDTGRISEAETLCTKNLKSNPDQPAVILLLRQVQCKPLLESQKPLPDAVLEELQKTVMSNSTSVPAWQWLAHVYQSQGMMRAAEMCYRKSLQLASQRGSWSGKLSSLLRLALLALKVCMANISNDHWPSLVQEATTEALKLCFCPLAVLLQALLQFKRKMGARETRRLLERVVYQPGYPKSIASTARWYLLRHLYAKDDYELIDVLVNNAKTHGDTRALELNQRLSSQ

SEQ ID NO: 181252 - protein, 95 aa, Artificial Sequence
  derived and/or modified sequence
MSSKEVKTALKSARDAIRNKEYKEALKHCKTVLKQEKNNYNAWVFIGVAAAELEQPDQAQSAYKKAAELEPDQLLAWQGLANLYEKYNHINAKDD

SEQ ID NO: 181253 - DNA, 4695 bp, Artificial Sequence
  derived and/or modified sequence
atgagcagcaaggaggtgaagaccgccctgaagagcgccagagacgccatcagaaacaaggagtacaaggaggccctgaagcactgcaagaccgtgctgaagcaggagaagaacaactacaacgcctgggtgttcatcggcgtggccgccgccgagctggagcagcccgaccaggcccagagcgcctacaagaaggccgccgagctggagcccgaccagctgctggcctggcagggcctggccaacctgtacgagaagtacaaccacatcaacgccaaggacgacctgcccggcgtgtaccagaagctgctggacctgtacgagagcgtggacaagcagaagtggtgcgacgtgtgcaagaagctggtggacctgtactaccaggagaagaagcacctggaggtggccagaacctggcacaagctgatcaagaccagacaggagcagggcgccgagaacgaggagctgcaccagctgtggagaaagctgacccagttcctggccgagagcaccgaggaccagaacaacgagacccagcagctgctgttcaccgccttcgagaacgccctgggcctgagcgacaagatccccagcgaggaccaccaggtgctgtacagacacttcatccagagcctgagcaagttcccccacgagagcgccagactgaagaaggcctgcgagggcatgatcaacatctaccccaccgtgcagtaccccctggaggtgctgtgcctgcacctgatcgagagcggcaacctgaccgacgagggccagcagtactgctgcagactggtggagatggacagcaagagcggccccggcctgatcggcctgggcatcaaggccctgcaggacaagaagtacgaggacgccgtgagaaacctgaccgagggcctgaaggagagccccgtgtgcaccagcggctggtaccacctggccgaggcccaggtgaagatgcacagacccaaggaggccgtgctgagctgcagccaggccctgaagatcgtggacaacctgggcgccagcggcaacagcctgtaccagagaaacctgtgcctgcacctgaaggccgaggccctgatcaagctgagcgactacgacagcagcgaggaggccatcagaaccctggaccagatcagcgacgccgacaacatccccggcctgctggtgctgaagagcctggcctacagaaacaagggcagcttcgacgaggccgccaagatcatggaggacctgctgagcagctaccccgacctggccgaggtgcacgccctggaggccctgatccacttcaccaagaaggactacctgcaggccgagaagtgcttccagagagccctggagaaggacaccgaggtggccgagtaccactaccagctgggcctgacctactggttcatgggcgaggagaccagaaaggacaagaccaaggccctgacccacttcctgaaggccgccagactggacacctacatgggcaaggtgttctgctacctgggccactactacagagacgtggtgggcgacaagaacagagccagaggctgctacagaaaggccttcgagctggacgacaccgacgccgagagcggcgccgccgccgtggacctgagcgtggagctggaggacatggagatggccctggccatcctgaccaccgtgacccagaaggccagcgccggcaccgccaagtgggcctggctgagaagaggcctgtactacctgaaggccggccagcacagccaggccgtggccgacctgcaggccgccctgagagccgaccccaaggacttcaactgctgggagagcctgggcgaggcctacctgagcagaggcggctacaccaccgccctgaagagcttcaccaaggccagcgagctgaaccccgagagcatctacagcgtgttcaaggtggccgccatccagcagatcctgggcaagtacaaggaggccgtggcccagtaccagatgatcatcaagaagaaggaggactacgtgcccgccctgaagggcctgggcgagtgccacctgatgatggccaaggccgccctggtggactacctggacggcaaggccgtggactacatcgagaaggccctggagtacttcacctgcgccctgcagcacagagccgacgtgagctgcctgtggaagctggccggcgacgcctgcacctgcctgtacgccgtggcccccagcaaggtgaacgtgcacgtgctgggcgtgctgctgggccagaaggagggcaagcaggtgctgaagaagaacgagctgctgcacctgggcggcagatgctacggcagagccctgaagctgatgagcaccagcaacacctggtgcgacctgggcatcaactactacagacaggcccagcacctggccgagaccggcagcaacatgaacgacctgaaggagctgctggagaagagcctgcactgcctgaagaaggccgtgagactggacagcaacaaccacctgtactggaacgccctgggcgtggtggcctgctacagcggcatcggcaactacgccctggcccagcactgcttcatcaagagcatccagagcgagcagatcaacgccgtggcctggaccaacctgggcgtgctgtacctgaccaacgagaacatcgagcaggcccacgaggccttcaagatggcccagagcctggaccccagctacctgatgtgctggatcggccaggccctgatcgccgaggccgtgggcagctacgacaccatggacctgttcagacacaccaccgagctgaacatgcacaccgagggcgccctgggctacgcctactgggtgtgcaccaccctgcaggacaagagcaacagagagaccgagctgtaccagtacaacatcctgcagatgaacgccatccccgccgcccaggtgatcctgaacaagtacgtggagagaatccagaactacgcccccgccttcaccatgctgggctacctgaacgagcacctgcagctgaagaaggaggccgccaacgcctaccagagagccatcctgctgctgcagaccgccgaggaccaggacacctacaacgtggccatcagaaactacggcagactgctgtgcagcaccggcgagtacgacaaggccatccaggccttcaagagcacccccctggaggtgctggaggacatcatcggcttcgccctggccctgttcatgaagggcctgtacaaggagagcagcaaggcctacgagagagccctgagcatcgtggagagcgagcaggacaaggcccacatcctgaccgccctggccatcaccgagtacaagcagggcaagaccgacgtggccaagaccctgctgttcaagtgcagcatcctgaaggagcccaccaccgagagcctgcaggccctgtgcgccctgggcctggccatgcaggacgccaccctgagcaaggccgccctgaacgagctgctgaagcacatcaagcacaaggacagcaactaccagagatgcctgctgaccagcgccatctacgccctgcagggcagaagcgtggccgtgcagaagcagatcagcaaggccgtgcacagcaaccccggcgaccccgccctgtggagcctgctgagcagagtggtggcccagtacgcccagagaaacgccaagggcggcgtggtggccggcaacgtggcccacatcctggacagcaaccacggcaagaaggccctgctgtacaccgccgtgaaccagctggccatgggcagcagcagcgccgaggacgagaagaacaccgccctgaagaccatccagaaggccgccctgctgagccccggcgaccccgccatctgggccggcctgatggccgcctgccacgccgacgacaagctggccctggtgaacaacacccagcccaagagaatcgacctgtacctggccctgctgagcgccgtgagcgccagcatcaaggacgagaagttcttcgagaactacaaccagagcctggagaagtggagcctgagccaggccgtgaccggcctgatcgacaccggcagaatcagcgaggccgagaccctgtgcaccaagaacctgaagagcaaccccgaccagcccgccgtgatcctgctgctgagacaggtgcagtgcaagcccctgctggagagccagaagcccctgcccgacgccgtgctggaggagctgcagaagaccgtgatgagcaacagcaccagcgtgcccgcctggcagtggctggcccacgtgtaccagagccagggcatgatgagagccgccgagatgtgctacagaaagagcctgcagctggccagccagagaggcagctggagcggcaagctgagcagcctgctgagactggccctgctggccctgaaggtgtgcatggccaacatcagcaacgaccactggcccagcctggtgcaggaggccaccaccgaggccctgaagctgtgcttctgccccctggccgtgctgctgcaggccctgctgcagttcaagagaaagatgggcgccagagagaccagaagactgctggagagagtggtgtaccagcccggctaccccaagagcatcgccagcaccgccagatggtacctgctgagacacctgtacgccaaggacgactacgagctgatcgacgtgctggtgaacaacgccaagacccacggcgacaccagagccctggagctgaaccagagactgagcagccagtag

SEQ ID NO: 181254 - DNA, 288 bp, Artificial Sequence
  derived and/or modified sequence
atgagcagcaaggaggtgaagaccgccctgaagagcgccagagacgccatcagaaacaaggagtacaaggaggccctgaagcactgcaagaccgtgctgaagcaggagaagaacaactacaacgcctgggtgttcatcggcgtggccgccgccgagctggagcagcccgaccaggcccagagcgcctacaagaaggccgccgagctggagcccgaccagctgctggcctggcagggcctggccaacctgtacgagaagtacaaccacatcaacgccaaggacgactag

SEQ ID NO: 181255 - DNA, 4695 bp, Artificial Sequence
  derived and/or modified sequence
atgagctccaaagaagtcaagaccgcattgaaatcagccagggacgccatcagaaataaagaatataaagaagcgttaaagcattgcaaaacagtgctgaagcaggaaaagaacaactataacgcctgggttttcatcggtgtagccgccgccgagctcgagcagcccgatcaggcccagtccgcatataagaaagcagccgaactggagccagaccagcttctggcctggcaagggttggctaatctatacgaaaaatataatcacattaatgccaaagatgatctgccgggcgtgtaccagaaattgctggacctgtacgagagcgtcgacaagcagaaatggtgcgatgtgtgtaaaaagctggttgacttgtactaccaggagaagaagcatcttgaggtggctcgcacctggcataaactcatcaaaacccgacaggaacaaggcgcagagaacgaagagctgcatcaactgtggagaaaactgactcaattcctagctgagagtacagaagaccagaataacgaaacacagcagctgctgttcacggctttcgaaaacgcactgggtctcagcgacaaaataccaagcgaagaccatcaggtgctgtacagacacttcattcagagcctgtccaaattcccacacgagagtgcccgcttgaagaaagcgtgtgaaggaatgattaacatctatcctacagttcagtatcctctagaggtgctctgcctgcatctgattgaaagtggaaatttgacagacgaaggccagcagtattgttgccggctcgtggagatggattccaaatctgggcctgggctgattggcttaggaattaaggccttgcaggataaaaaatacgaggatgccgtaaggaacctcaccgaaggcttgaaggaatcaccagtgtgcacctcaggatggtaccatctggcagaagctcaggttaaaatgcatcgaccgaaggaggctgtgttgtcttgttctcaggcccttaagattgtggacaatctgggggcttcaggaaacagtctctaccaaagaaatctgtgcttacacctgaaagccgaggctcttattaaactgtctgattacgactccagtgaagaggccataagaactcttgatcagatttcagacgcagataatattcccggactattggtgctgaagagtctcgcataccgaaacaaaggctccttcgacgaggcggcgaagataatggaggacctcctttcaagttatcccgacctcgctgaagtgcatgccctggaggcactgattcattttactaagaaggactacctccaggcagagaagtgttttcaacgcgccctggaaaaggatactgaggttgccgaataccactaccagttaggtctaacatactggttcatgggagaggagacccgaaaggataaaacaaaagcactgacacactttttgaaagccgccagactagacacctacatgggcaaggtgttttgttatctgggtcactattacagagacgtcgtcggcgataaaaatagggcccgcggctgttaccggaaggcttttgaactggatgacaccgatgcggagtcaggtgctgctgccgtggatctctctgttgaactcgaagatatggagatggccttggcaatactgacaaccgttacacagaaggcctccgctggcaccgcgaagtgggcctggctgcgacgaggcctatactatctgaaagccgggcagcactcgcaggcagttgcagatttgcaggccgccctgagggccgacccaaaggacttcaactgctgggaatcattgggtgaggcctacctgtcccgtggcggatacaccacagccctgaagtcttttacgaaggccagcgaattaaaccccgaaagtatctactccgtctttaaggtggccgcaattcagcagatactgggaaagtataaggaggcagttgcccagtaccagatgattattaagaaaaaggaggactacgtgccagcactgaagggtctcggtgaatgccatctaatgatggcaaaagctgcactcgtcgattatctcgatgggaaggccgtggactacattgagaaggccctcgaatattttacttgcgccctccaacacagggccgatgtgtcttgtctgtggaagctcgccggcgatgcctgtacctgcctctacgcagtagcaccctccaaagtgaatgttcacgtgcttggcgtccttctggggcagaaggaaggaaaacaggtactaaaaaagaacgaactcttacaccttggggggcgctgctacggtagggcactcaagttgatgagtaccagcaatacctggtgtgatcttggcattaactactacagacaggcccagcacctggctgagaccggcagcaatatgaatgatctcaaggaattgttagaaaaaagcttgcactgtttgaagaaggccgtccgcctagatagcaataaccatctttattggaacgccctgggcgtggttgcgtgttactctggcatcggcaactacgccctggcacagcactgtttcataaaatccattcaaagcgaacagatcaatgcagtggcctggacgaacctgggcgtgctgtatctcactaatgagaatatcgagcaggcccatgaagccttcaagatggcgcagagtctggacccctcttatctgatgtgttggattggccaggccctcatagctgaggccgtcgggagttatgataccatggatttattcaggcacacgacggaattgaatatgcatacagagggcgcactcggttacgcttattgggtctgtactacgctgcaagataagtccaacagagaaacagagttgtaccagtacaatatcctgcagatgaacgcgatacccgccgcccaggtaatactaaacaaatatgtcgagcgtatacagaactatgctccagcattcacaatgcttgggtacttgaatgagcatttacagctcaagaaggaggccgccaatgcataccaaagagcaatcctgctgcttcagacagctgaagaccaggacacatacaatgtagcgattaggaattacggcagacttctgtgcagcacaggcgaatatgataaggcaatacaggcctttaagtctaccccacttgaggttcttgaggacatcatcggatttgcattagcattgtttatgaagggcctatacaaggagagctctaaagcatacgaacgggcactgagcatcgtagagagtgagcaggacaaagcccacattttgaccgccctcgccattactgagtacaaacaggggaaaacagacgttgccaaaactttactgttcaaatgtagtatcctcaaagagcctaccaccgagtctttgcaggctctctgcgctttgggactggccatgcaggatgccactctgtcaaaggctgccctcaacgaacttttaaaacatattaagcacaaggatagtaactaccaaaggtgtctgctgacaagtgcaatttatgctctgcagggaaggtccgtggcagttcagaagcaaattagtaaagccgtgcatagcaatcccggcgatccagccctttggagcctgctgtccagagtggtagcccagtacgcgcagcgcaatgctaaaggaggtgtggttgccgggaatgtcgcgcatattctggacagcaatcatggtaaaaaggctctcctgtacacggcggtcaaccagctcgccatgggctcatcctccgccgaggacgagaagaacaccgcactcaagacaatccagaaagccgccttgttgtcacccggagatccagctatttgggcaggcctcatggccgcatgccatgcggacgacaagttggccctcgtcaataacacacagcccaaacggatcgacctgtacctggctctgctatccgccgtgtcagcctctattaaagatgagaaattctttgaaaactacaatcagtctttggagaagtggagcctaagtcaggcagtgactggcctcatagacaccggaagaatatcagaggcagaaacgctgtgcaccaaaaacctcaagtccaacccagatcaacccgccgtgatcctgctactcaggcaggtccagtgtaagcctctgctggagagtcagaagccactgcccgatgccgtgcttgaggagctgcagaagacagttatgtccaacagcacatctgttccagcttggcagtggttggctcacgtataccaaagtcaaggaatgatgcgcgctgctgagatgtgttaccggaagtcacttcagcttgcatcacagcgcgggtcctggtccggcaagctaagcagtttgctccgccttgccctgctcgctcttaaggtttgcatggccaatataagtaacgaccattggccgagcctcgtgcaggaggctactacggaggccctcaagctttgcttctgtccccttgctgttcttcttcaggccctgttgcaatttaagagaaaaatgggagcccgcgaaacaagacgactgttagagcgagtggtgtaccagcccggatacccgaagtcaattgctagcaccgctcgatggtacttgctgaggcatctgtatgccaaggacgattacgagctgatcgacgtcttggttaataacgccaagacacacggagatacccgggcattagaattaaatcaacggctgtctagccaatag

SEQ ID NO: 181256 - DNA, 288 bp, Artificial Sequence
  derived and/or modified sequence
atgagctctaaagaagtgaaaactgccctgaaatctgccagggacgctatccggaacaaagaatataaagaggcattgaagcactgcaagacagtgttgaagcaagaaaagaacaattacaatgcttgggtgtttattggagtcgccgctgcagaactggaacagcctgaccaggcgcaaagtgcgtacaaaaaagccgctgaactcgaaccagaccagctgctcgcctggcaggggttggcgaacctttacgaaaagtacaatcacattaatgctaaagatgattag

SEQ ID NO: 181257 - DNA, 4695 bp, Artificial Sequence
  derived and/or modified sequence
atgagcagcaaggaggtgaagacagccctgaagagcgccagagatgccatccggaacaaggagtacaaggaggccctgaagcactgcaagacagtgctgaagcaggagaagaacaactacaatgcctgggtgttcatcggcgtggccgctgctgagctggagcagcctgaccaggcccagagcgcctacaagaaggctgctgagctggagccagaccagctgctggcctggcagggcctggccaacctgtatgagaagtacaaccacatcaatgccaaggatgacctgcccggggtgtaccagaagctgctggacctgtatgaatctgtggacaagcagaagtggtgtgatgtgtgcaagaagctggtggacctgtactaccaggagaagaagcacctggaggtggcccggacctggcacaagctgatcaagacccggcaggagcagggcgcagaaaatgaggagctgcaccagctgtggaggaagctgacccagttcctggccgagagcacagaggaccagaacaatgagacccagcagctgctcttcaccgcctttgaaaatgccctgggcctgagtgacaagatccccagcgaggaccaccaggtgctgtaccgccacttcatccagagcctgagcaagttcccccatgaaagtgcccggctgaagaaggcctgtgagggcatgatcaacatctaccccaccgtgcagtaccccctggaggtgctgtgcctgcacctgattgagagcggcaacctgacagatgagggccagcagtactgctgccgcctggtggagatggacagcaagagcggccctggcctcatcggcctgggcatcaaggccctgcaggacaagaagtatgaagatgctgtgaggaacctgacagagggcctgaaggagagccctgtgtgcaccagcggctggtaccacctggccgaggcccaggtgaagatgcaccggcccaaggaggccgtgctgagctgcagccaggccctgaagatcgtggacaacctgggcgccagcggcaacagcctgtaccagaggaacctgtgcctgcacctgaaggccgaggccctgatcaagctgagtgactatgacagcagcgaggaggccatccgcaccctggaccagatcagtgatgctgacaacatccctggcctgctggtgctgaagagcctggcctacagaaataaaggcagctttgatgaagctgccaagatcatggaggacctgctgagcagctacccagacctggccgaggtgcacgccctggaggccctgatccacttcaccaagaaggactacctgcaggccgagaagtgcttccagagggccctggagaaggacacagaggtggccgagtaccactaccagctgggcctgacctactggttcatgggagaggagaccaggaaggacaagaccaaggccctgacccacttcctgaaggccgcccggctggacacctacatgggcaaggtgttctgctacctgggccactactacagagatgtggtgggggacaagaacagagcccggggctgctacaggaaggcctttgagctggatgacacagatgctgagagcggggctgctgctgtggacctgtctgtggagctggaggacatggagatggccctggccatcctgaccaccgtgacccagaaggccagcgctggaacagccaagtgggcctggctgcggcggggcctgtactacctgaaggccggccagcacagccaggccgtggccgacctgcaggccgccctgcgggctgaccccaaggacttcaactgctgggagagcctgggggaggcctacctgagccggggcggctacaccacagccctgaagagcttcaccaaggccagcgagctgaaccctgagagcatctacagcgtcttcaaggtggccgccatccagcagatcctgggcaagtacaaggaggccgtggcccagtaccagatgatcatcaagaagaaggaggactatgtgcctgccctgaagggcctgggggagtgccacctgatgatggccaaggccgccctggtggactacctggatggcaaggctgtggactacatcgagaaggccctggagtacttcacctgtgccctgcagcacagagcagatgtgtcctgcctgtggaagctggccggagatgcctgcacctgcctgtatgctgtggcccccagcaaggtgaatgtgcacgtgctgggcgtgctgctgggccagaaggagggcaagcaggtgctgaagaagaatgagctgctgcacctgggcggccgctgctacggccgggccctgaagctgatgagcaccagcaacacctggtgtgacctgggcatcaactactaccggcaggcccagcacctggccgagaccggcagcaacatgaatgacctgaaggagctgctggagaagagcctgcactgcctgaagaaggctgtgcggctggacagcaacaaccacctgtactggaatgccctgggcgtggtggcctgctacagcggcatcggcaactatgccctggcccagcactgcttcatcaagagcatccagagcgagcagatcaatgctgtggcctggaccaacctgggcgtgctgtacctgaccaatgaaaatattgagcaggcccacgaggccttcaagatggcccagagcctggaccccagctacctgatgtgctggattggccaggccctgattgctgaggccgtgggcagctatgacaccatggacctcttccgccacaccacagagctgaacatgcacacagaaggagccctgggctacgcctactgggtgtgcaccaccctgcaggacaagagcaaccgggagacagagctgtaccagtacaacatcctgcagatgaatgccatcccagctgcccaggtgatcctgaacaagtatgtggagcgcatccagaactatgccccagccttcaccatgctgggctacctgaatgagcacctgcagctgaagaaggaggccgccaatgcctaccagagggccatcctgctgctgcagacagctgaggaccaggacacctacaacgtggccatccggaactacggccgcctgctgtgcagcactggagaatatgacaaggccatccaggccttcaagagcacccccctggaggtgctggaggacatcattggatttgccctggccctcttcatgaagggcctgtacaaggagagcagcaaggcctatgaaagagccctgagcatcgtggagagcgagcaggacaaggcccacatcctgacagccctggccatcacagagtacaagcagggcaagacagatgtggccaagaccctgctcttcaagtgcagcatcctgaaggagcccaccacagagagcctgcaggccctgtgtgccctgggcctggccatgcaggatgccaccctgagcaaggccgccctgaatgagctgctgaagcacatcaagcacaaggacagcaactaccagcgctgcctgctgaccagcgccatctatgccctgcagggccgctctgtggccgtgcagaagcagatcagcaaggctgtgcacagcaaccctggggaccctgccctgtggagcctgctgagccgggtggtggcccagtatgcccagagaaatgccaagggcggcgtggtggccggaaatgtggcccacatcctggacagcaaccacggcaagaaggccctgctgtacacagctgtgaaccagctggccatgggcagcagcagcgcagaagatgagaagaacacagccctgaagaccatccagaaggccgccctgctgagccctggggaccctgccatctgggccggcctgatggccgcctgccacgcagatgacaagctggccctggtgaacaacacccagcccaagagaattgacctgtacctggccctgctgtctgctgtgtctgccagcatcaaggatgagaagttctttgagaactacaaccagagcctggagaagtggagcctgagccaggccgtgacaggcctgattgacaccggccgcatcagcgaggccgagaccctgtgcaccaagaacctgaagagcaacccagaccagcctgctgtgatcctgctgctgcggcaggtgcagtgcaagcccctgctggagagccagaagcccctgcctgatgctgtgctggaggagctgcagaagacagtgatgagcaacagcacctctgtgcctgcctggcagtggctggcccacgtgtaccagagccagggcatgatgagagctgctgagatgtgctacaggaagagcctgcagctggccagccagaggggctcctggagcggcaagctgagcagcctgctgcggctggccctgctggccctgaaggtgtgcatggccaacatcagcaatgaccactggcccagcctggtgcaggaggccaccacagaggccctgaagctgtgcttctgccccctggccgtgctgctgcaggccctgctgcagttcaagaggaagatgggcgcccgggagacccggcggctgctggagcgggtggtgtaccagcccggctaccccaagagcatcgccagcacagcccgctggtacctgctgcggcacctgtatgccaaggatgattatgagctgattgatgtgctggtgaacaatgccaagacccatggagacacccgggccctggagctgaaccagaggctgagcagccagtag

SEQ ID NO: 181258 - DNA, 288 bp, Artificial Sequence
  derived and/or modified sequence
atgagcagcaaggaggtgaagacagccctgaagagcgccagagatgccatccggaacaaggagtacaaggaggccctgaagcactgcaagacagtgctgaagcaggagaagaacaactacaatgcctgggtgttcatcggcgtggccgctgctgagctggagcagcctgaccaggcccagagcgcctacaagaaggctgctgagctggagccagaccagctgctggcctggcagggcctggccaacctgtatgagaagtacaaccacatcaatgccaaggatgactag

SEQ ID NO: 181259 - DNA, 4695 bp, Artificial Sequence
  derived and/or modified sequence
atgagcagcaaggaggtgaagaccgccctgaagagcgcccgggacgctattcgaaacaaggagtacaaagaagccttaaagcactgtaagactgtgttgaaacaggaaaagaacaattacaatgcatgggtatttatcggcgtggcagccgctgaattagagcagcccgatcaggctcagagtgcatacaaaaaggcggcggagttggagcctgatcagttactggcatggcaggggctcgctaatctgtacgagaaatacaatcatattaatgccaaagatgacctgccaggtgtctaccaaaaactactggacctctatgagtctgtggataagcagaagtggtgcgatgtgtgcaaaaagctggtcgatttgtactatcaggagaagaagcacctggaagtcgcaaggacctggcacaaattgattaagacacggcaggagcaaggcgctgaaaatgaggaactgcaccagttgtggcgcaagctgactcaattcctcgccgagtctacggaagatcagaataacgagacgcagcagctgctatttaccgcattcgagaatgcactgggactgtctgataaaatcccctcggaggaccatcaggttctttaccgtcactttatccaaagcctcagtaagttcccacatgaatcggcccgactgaaaaaagcttgcgaaggaatgattaatatctatccgacggtacagtatcccctggaagtgctgtgtctccacttgatagagtctggcaatctgaccgatgaggggcaacaatactgctgccggctggtcgagatggattcaaagtctggcccaggccttataggcctgggaatcaaagcactccaggataagaaatatgaggacgccgtgcgcaatctgactgagggcctaaaagaaagtcccgtctgtacatcgggctggtatcacctggctgaagcccaggtgaaaatgcacagaccaaaggaggcagttttgtcatgttctcaggccttgaagattgtggataatctaggggccagcggtaactcattataccaacgaaatctctgtcttcatctgaaggccgaagccctgattaagctaagcgactatgattcatcagaagaagctattagaaccctggaccaaatttcagatgccgataacatcccagggcttctggtgcttaaaagccttgcatacagaaataaaggcagtttcgacgaagccgccaagatcatggaagacttgttgtcttcgtatccagacctagccgaagtgcacgcactcgaagccctcatacattttactaaaaaggactatttgcaagccgagaagtgcttccaaagagcactcgaaaaggataccgaggtagccgaatatcattaccagctaggccttacatattggtttatgggggaagagactcgtaaggataagacaaaggccctgacacactttctgaaggccgctcgcttagacacctacatggggaaagtcttttgttacctggggcactactaccgggacgtggtgggggataagaacagggctcgtggttgctaccgtaaggccttcgaattggatgatacagacgcagagtcaggagccgcagccgtggatctgtccgttgagctagaggacatggaaatggctctggctattttaactaccgtgacccagaaggcaagcgcaggcaccgccaagtgggcctggttacggcgcggactttattatttgaaggcaggtcaacatagtcaggcggtcgccgacctacaagctgcactccgagcggatcccaaagactttaactgctgggaaagccttggggaggcctatctgtctcgcggcgggtacactactgcgctcaaatcctttacaaaagcctccgagttgaatcccgagtccatttactcagtattcaaggttgcagcgatccagcagatcttggggaaatacaaggaagctgtggcccagtatcagatgatcattaaaaagaaggaggattatgtacctgccctaaaaggcctgggcgagtgccacctgatgatggccaaagcagctctcgtggattatctggacggcaaggccgtggactacatagaaaaggcactagaatactttacgtgcgccctacagcatcgagcagacgtctcatgcttgtggaaactggccggggacgcatgtacatgcctctacgctgttgctcccagcaaggttaacgtgcatgttctgggagttctcctgggccagaaggaggggaagcaggtactgaagaaaaatgagttgctgcacttagggggaagatgttatggtcgagccctgaagctgatgtcaactagtaacacctggtgcgacctcggcattaactattatcggcaggcccagcacttagccgagacagggtcgaacatgaacgatttgaaagagctcctggagaaaagtctccactgtctgaagaaggctgtgaggctggattcgaacaaccatttgtactggaatgccttgggagtggtggcgtgttactctgggattggtaattacgctttagcccagcactgcttcatcaaaagcattcagtctgagcagatcaacgcagtcgcctggacgaaccttggcgttctctacttaacaaacgagaacatcgagcaggcacacgaggcctttaagatggcacaatccctggatccctcctatcttatgtgctggataggccaagccctgatagccgaagccgttggcagctatgacactatggacctcttcaggcacaccaccgaactgaatatgcatacagagggcgctttagggtatgcatattgggtttgcaccactctccaggataagtcaaaccgggagaccgagctgtaccagtacaatattcttcagatgaacgccataccagcggctcaggtcattcttaataagtacgtggaaagaattcagaattacgcccccgcttttacaatgttggggtatctgaatgagcatttgcaactcaaaaaagaggcggcaaacgcctatcaaagagcgatcctgcttctacaaactgctgaagaccaggacacatataacgtcgccatcaggaactacgggaggctgctatgtagcaccggcgaatacgacaaggctattcaggcatttaagtccactcccctggaggtcctcgaagatataattggcttcgcgctggctctgttcatgaaaggcctttacaaggaatcaagtaaagcctacgaacgggcgttgtctattgtcgagtctgagcaggacaaggcccacatactcacggccctcgccattacagagtataagcagggcaagactgacgtagctaagactcttttatttaaatgcagcatacttaaagaacccaccacagagtctctgcaggcactgtgcgctcttggcctcgccatgcaagacgccactctttcaaaggccgctctgaacgagcttctgaaacacattaagcacaaggactcgaattaccagcgctgcttgttgactagcgctatctatgctttacaagggagatctgttgcagtgcagaagcagattagcaaggctgtgcactccaatcccggcgaccccgcactgtggtccctgctgtctcgggtggtggcgcagtacgcacaacgcaacgcaaagggcggcgtggtggccggaaatgtggcccacatcttggacagtaatcacggaaaaaaagcactcctttatactgctgtgaaccagctggccatgggaagttcaagtgctgaggatgagaagaacacagctcttaagacaattcagaaggcggcactgctgagtcctggggatcccgcgatttgggcaggattaatggctgcgtgccatgccgatgataagttagcactcgtcaacaatactcagccaaaaaggattgatctgtatctcgccctcctctctgccgtttcagcctccatcaaggacgaaaagttctttgaaaattataatcagtctctggaaaagtggtccctgtcacaggctgtaaccggcctgattgatacaggccggatcagtgaggccgagaccctgtgcactaagaatctcaagtccaatcccgaccagcctgcagttatcctcttgttgcgccaggtccagtgcaaacccttgctagaatctcagaagccactgccagacgccgtgctggaggaacttcagaagacagtcatgtccaatagtacaagcgtgccggcatggcagtggttagcccatgtgtatcagtcccagggaatgatgagggcagctgagatgtgttatcggaagagtctgcaactcgccagtcagcgtggtagctggtcaggaaaattgtcaagtttgctgaggcttgcacttctggcactaaaagtgtgcatggccaacatctcaaatgatcactggccatcactagtgcaggaggccaccactgaggctctcaagttgtgcttttgtcccctcgcggtcttgcttcaggccctcttacaatttaagcgtaaaatgggtgcaagggagactcgtagactcttggagcgagtcgtctatcagccgggctaccctaagtccatcgctagtacagcgagatggtacttgttgaggcacctttatgccaaagatgactacgagctgatcgatgtgctagtcaacaacgctaaaacacacggcgacaccagagcacttgagctgaaccagaggctgagttctcagtag

SEQ ID NO: 181260 - DNA, 288 bp, Artificial Sequence
  derived and/or modified sequence
atgagcagcaaggaggtgaagaccgccctgaagagcgcccgggacgctatacgaaacaaggagtataaggaggccctcaagcactgcaaaacggtccttaagcaggaaaagaacaactacaacgcgtgggtgttcattggagttgcagccgccgaactcgaacagcctgatcaggctcagtccgcttacaaaaaagcagcggaattggaacctgaccaactgctcgcctggcagggactggcaaatctgtatgagaagtataatcacatcaacgcaaaggacgattag

SEQ ID NO: 181261 - DNA, 4695 bp, Artificial Sequence
  derived and/or modified sequence
atgtcttccaaggaagtgaagaccgccctcaagtccgctagggatgctatacggaacaaggaatataaggaagcccttaagcactgcaaaacagttctcaagcaggagaagaataattataatgcatgggtgttcattggagtggctgccgcagaattggaacagcctgaccaggcccagtccgcatataaaaaggccgcagaactcgagcccgatcagctactcgcctggcaggggttagccaacctgtacgaaaaatataatcacataaatgccaaggatgacctaccgggagtgtaccagaagcttttggacctgtacgaatccgttgacaagcaaaaatggtgtgatgtctgcaagaaactcgtagacctgtactatcaggagaagaagcaccttgaggttgcccgtacatggcacaagcttatcaagacccgacaggagcaaggagcagagaatgaagaactccatcagttgtggagaaagctaactcaattcctggcagagagcaccgaggaccagaacaacgagacacaacaactactgttcaccgctttcgagaatgcactggggctgtcagacaaaataccttctgaagaccaccaggtactttacagacactttatccagtctctctccaagttcccccacgaatctgccagactgaagaaggcctgcgagggtatgataaatatataccctacagtgcagtacccgctggaagtgctgtgtctgcacctgatcgaaagcggaaacctcacggatgaagggcagcaatactgttgtagactggtggaaatggattcaaagtcaggcccagggctcattggcttaggcataaaggccctccaggataagaagtacgaggatgctgtccggaatctcacggaaggcctgaaagagtcccctgtgtgtacatcaggttggtaccacctagcggaagcccaggtgaaaatgcatcgcccaaaagaggccgtcctgagctgtagtcaagcacttaagatcgtggataacctcggcgctagtggtaatagcctgtatcagcggaatctttgtttgcatttaaaagcagaggccctgatcaagctgtccgattacgattcgtccgaagaagctatccggaccctggaccagattagtgacgccgacaacatacccggactgctcgtgttaaaaagcctcgcctataggaacaaggggtcattcgatgaggctgccaagatcatggaggacctcctgagctcttatccggatctagcagaagtccacgccctcgaggctctcatacactttactaaaaaagattatctacaggcagagaagtgttttcagcgcgctctagagaaggacacggaggtcgcagagtaccactatcagttgggactcacctactggttcatgggtgaagagacaagaaaagacaagaccaaggcactcacacattttttgaaggcagccagactggacacgtatatggggaaggtgttttgctacctgggccattattatagagacgtcgttggtgataagaatcgagctagaggatgctataggaaggcattcgagctggacgacaccgacgctgagtccggcgcagcagcagtggatctgtctgttgagctcgaggacatggagatggctttggccatcctgactactgtgacccaaaaagcgagtgcgggaactgccaagtgggcatggttacggcgtgggctatattatcttaaggctgggcagcattctcaggcggtggctgacctgcaggcagcacttcgggcagacccgaaagacttcaattgctgggaatcgctgggtgaggcttacctgtctcggggagggtacaccactgctctgaagagcttcaccaaggcctcggagttgaatcccgagagcatatactccgtctttaaagtagcagccattcagcaaatactcggaaaatacaaggaggcagtggctcagtatcagatgatcattaagaagaaggaagactatgtccctgccctgaaagggctgggcgagtgtcacctaatgatggccaaggctgccttggtcgactatctggacggcaaagccgtagattatatagagaaggcgctggagtatttcacatgcgcacttcagcaccgcgctgacgtgtcctgcttgtggaagctggctggggatgcctgtacatgcttgtacgcagtggcaccctctaaggtaaacgtacatgtgctgggtgtccttctgggccagaaagagggtaagcaggttctgaagaagaacgagctgctgcatctcggtggccgatgctacggcagagcactaaagttaatgagtacgagtaatacctggtgtgaccttggtattaattattaccgccaggctcaacaccttgcagagacaggctctaacatgaatgacctcaaggaactactggaaaaatccttgcactgtttaaaaaaagcggttaggctcgactctaataaccacctatactggaatgctctgggagtcgtcgcctgttattcagggattggtaactatgctctcgctcagcattgctttataaagtccatccagtctgaacaaattaacgccgtggcctggactaaccttggggtgctttaccttactaacgaaaacattgagcaggctcacgaggcatttaaaatggctcagtctctggatccaagttacctgatgtgctggatcggacaggctctgattgccgaagccgttgggtcgtatgatactatggacctgttcagacatacgaccgagctgaacatgcatacggagggcgcactagggtatgcctattgggtgtgtacaactttgcaagataaatcaaacagagaaaccgagctgtaccaatacaatattctgcagatgaatgctattcctgctgctcaggtcatcctgaacaaatatgtagagcggatccaaaattatgccccagccttcaccatgttggggtatttaaatgagcacctccagctcaaaaaagaggcagccaacgcataccaacgtgccatccttcttttgcagacagcagaggaccaggatacctataacgtggccatccgcaactacggaaggttgttatgctcaacgggcgagtacgacaaggccattcaagcctttaagagcacaccactggaagtgcttgaggacattatcggttttgccctcgcgctgtttatgaagggcctgtacaaggaaagctcaaaggcctacgagcgagccctgagcatcgttgaatccgagcaagacaaggcacatattctgacagcattagccatcacggagtataaacagggcaagactgacgtggctaaaactctgttatttaagtgtagcatcttgaaggagcccaccaccgagagtctgcaggcactctgcgcgcttggtctggctatgcaagacgccacactctcaaaggctgccctaaatgagctgcttaaacatataaaacataaagactccaattatcagcgctgtttgctaacgtctgcaatatatgcactccagggcagaagtgttgccgtgcagaaacagatatctaaagctgttcacagtaaccccggagaccctgccttgtggagcctgttgtctcgtgtggtcgcacagtacgcccaacgcaatgctaaaggaggagttgtcgctggcaacgttgcccacattctggattccaatcacggcaagaaggctctattgtacacagcagtcaatcagctcgcaatgggatcttcctctgccgaagacgagaaaaatactgcgctcaagacgatccaaaaggccgcactgctctcaccaggcgatcccgctatatgggccggactcatggctgcctgccatgcagatgacaagttggcactggtgaacaatacgcagccaaaaagaattgacctctacctggccctcctgagcgccgtgtccgcctctataaaagatgaaaagtttttcgagaattacaaccaatccttagaaaagtggtccctgtctcaggccgtcacagggctcattgatactggtcggatctccgaggcagaaaccctttgcacgaaaaatctgaagagcaatcccgatcagccagcggtgattctcctgttgaggcaggtccagtgcaagcccttactggagtcacagaaacccttacctgacgccgtactggaagaattacagaaaaccgtgatgtcgaattctacctctgtgcccgcatggcaatggctagcccatgtctaccagagtcaaggcatgatgagagcagctgaaatgtgctatcggaagagcctccaattagctagtcagcggggatcttggagtgggaagctttcatcactgctaagactcgctttgctggccctgaaggtgtgcatggctaatatcagtaacgatcactggccttccttagtgcaggaggccacaacggaagcacttaagctgtgcttttgccctctggccgtgcttcttcaagctttactccagttcaaacgaaagatgggggctcgcgaaactcgaaggctcctcgagcgggttgtgtaccaacctggttatccgaagagtatcgccagcacagccaggtggtacctgttgcgccacctgtacgcaaaggatgattacgaattaatcgacgtacttgttaacaatgctaagacccacggggacactagagcactggagctcaatcaaaggctgagctcccagtag

SEQ ID NO: 181262 - DNA, 288 bp, Artificial Sequence
  derived and/or modified sequence
atgagttccaaagaggttaagactgctttgaagagcgccagggacgcgattagaaacaaggagtacaaagaagccctcaaacactgcaaaaccgtgcttaaacaggaaaaaaacaattataacgcttgggtctttatcggggttgccgcagcagagttggagcagcccgaccaggcccagtccgcttacaaaaaggcggctgaactggaacctgatcagctgttggcgtggcaggggttggctaatctgtatgagaaatacaaccacatcaacgcaaaggacgactag

SEQ ID NO: 181263 - DNA, 5706 bp, Artificial Sequence
  derived and/or modified sequence
atgagtcctgggaaaggcgcatgcgctctcattgcagcctcggcgtttgtagaagaggagcatctgctccagatggaaaatgggtaaggaacaatcaaattcaattcgggaagaatatagaggtggtaataattggtaaaagtctgcagggttttttttaaccaaaggaaactggtttgagaaaattgtgaaatcagcattgaaatttgttacctactccaatcaagatttgcaaactacaaaaaaatcattctgaagctttcacctataaatatataccaagataatttcagataagaatgtccagcaaggaagtgaagactgctctaaaaagtgctagagatgcaatcagaaacaaagaatacaaagaagctttgaaacactgtaagacagtgttaaagcaagagaaaaataactataatgcctgggtttttattggcgttgctgcagctgaactagaacaacctgatcaggcccagagtgcctataaaaaagctgctgaattagagccagaccaattactagcttggcaggggttagcaaacttgtatgagaaatataatcacataaatgctaaggatgacttgcctggtgtttaccaaaagctcctggatctttatgagagtgttgacaagcagaagtggtgtgatgtctgcaagaaacttgtggatctatattaccaagaaaagaaacacctagaggtggctcgaacatggcacaagttgataaaaacacggcaggaacaaggtgcagaaaatgaagagcttcatcaactatggagaaaattgactcagttcctggctgaaagtacagaggaccagaataatgaaactcagcaattgctttttactgcttttgagaatgcactgggattatcagataagattcctagtgaagatcaccaagtactttataggcatttcattcagagtttatccaaatttcctcatgagtctgctagattgaagaaggcctgtgaaggaatgataaacatctatcctactgtacagtatccattagaagtgctttgtttgcatttaattgaatcaggaaatcttactgatgaggggcagcagtattgttgtagattagtggaaatggattcaaaaagtggtccaggcctcattggcttaggcattaaagcattacaagacaaaaagtatgaagatgctgttaggaacctaacagaagggttaaaggaaagccctgtctgcacaagtggatggtatcatctggcagaagcccaagtcaaaatgcatagacctaaagaagctgttctttcatgcagtcaagctctgaagatcgtagataatcttggtgcgtctggtaacagtctttatcagaggaatctttgtcttcatttgaaagcagaggctttgattaaactctcagattatgactcttcagaggaagcaattcgtacgcttgatcagatttctgatgcagataatatcccaggacttttggttctcaaaagcttggcctatcggaacaaaggttcatttgatgaagctgcaaagattatggaagaccttctctcttcttaccctgacctagctgaagttcatgcccttgaggctttgattcatttcaccaaaaaggactatctacaagcagaaaaatgttttcagagagctcttgagaaagataccgaagttgcagaatatcattaccaacttggattaacatactggttcatgggtgaagagacaagaaaagataaaacaaaggctcttacccactttctgaaggctgcaagactggatacatatatgggcaaagttttctgctatttaggtcattattatagagacgtagtgggagataaaaacagagctcgtggatgttataggaaagcctttgaattagatgacactgatgctgaatctggagctgcagcagttgacctaagtgtggagcttgaagatatggaaatggctttagctatcctaacaacagtaactcaaaaggcaagtgctggaacggcaaaatgggcctggcttaggcgaggactatactatttgaaagctggtcagcattctcaagcagtggctgatttacaggcagcattaagagcagacccaaaggacttcaattgttgggaatcgttaggagaagcatacttaagcagaggaggctacacaacagccttgaagtccttcacaaaagccagtgagctgaacccagaatccatatacagtgtgtttaaggttgcagcaatacagcaaatcctaggcaaatataaggaggctgtagctcaataccagatgatcattaaaaagaaagaagattatgtgcctgctttaaaaggtttgggtgaatgccatcttatgatggcaaaagcagctctagttgattatcttgatggaaaagccgtagactacatagaaaaagcactggaatattttacttgtgctctacagcatcgagctgatgtgtcctgcctctggaagctagctggggatgcttgtacctgtctgtatgctgtcgcaccatctaaagtgaatgttcatgttttaggagtccttctaggtcagaaagaaggaaaacaagtattaaagaaaaatgagctcctccaccttggaggaaggtgttatggtcgtgcattaaaactgatgtctacatctaatacatggtgtgaccttggaattaattattatcgccaagcacaacatctagcagaaacaggcagcaacatgaatgatcttaaggagttgctggagaaatctttacattgtctgaaaaaagcagtgagactcgacagtaataatcacttatactggaatgctcttggtgtggttgcatgttacagtggtattggaaattatgcccttgctcagcactgtttcatcaaatcaatccagtcagaacaaattaatgctgttgcatggaccaacttgggagtgttatacctcacaaatgaaaacattgagcaagctcatgaggctttcaaaatggctcaatcccttgatccatcttatttaatgtgctggattggacaagctcttattgctgaggcagttggaagttatgacaccatggatctcttcaggcacactacagaactaaatatgcatactgaaggagcattaggttatgcgtattgggtctgcacaacattgcaagataaaagcaacagagaaacagagctgtaccagtacaacatcctccagatgaatgctattccagcagcacaagttattttgaataaatatgtagaaagaattcagaattatgccccagctttcacaatgttgggttacttaaacgaacatctacaactgaaaaaggaagcagcaaatgcataccaaagggcaattttgttgttacagactgcagaagaccaagatacttacaatgttgcaataagaaattacggcagattgttatgttccactggtgaatatgataaagctatccaggcttttaagtcaacaccccttgaagtgttagaagacatcataggttttgcattggctttattcatgaaggggctttataaagagagcagcaaagcctatgagagagccttgtctattgttgaatcggagcaagacaaagcccatatcttgacagctctggcaataactgaatataaacaaggaaaaacggatgtagccaagacattgctatttaaatgctctatcttaaaggaaccaaccacagaaagccttcaagccctgtgtgctctagggttggcaatgcaggatgctacactgtcaaaagcagcacttaatgagttactgaagcacatcaaacacaaagacagtaattatcagaggtgccttcttacatcagcgatttatgcactccaaggccgcagtgtggctgtgcaaaaacaaatatctaaagctgttcacagcaaccctggtgaccctgctctttggtctctgttgtctcgagttgttgcacagtatgctcaacgaaatgcaaagggaggtgttgtagcaggaaatgtggctcatattctggactcaaatcatggaaagaaggcattactgtacactgcggtaaatcagttggctatgggaagcagttcagcagaagatgaaaaaaatactgcactaaagaccattcagaaggcagctctcctttctccaggtgatcctgctatctgggctgggctaatggcagcctgtcacgctgatgataaactggccttagtgaacaacactcagccaaagaggatagatttatacttggcactgttatctgctgtttctgcttcaattaaagacgaaaaattctttgaaaattacaaccagtcccttgaaaagtggtctctctcacaagctgtcactggtctaatagacacaggaagaatatctgaagctgaaactctctgcacaaagaatttaaaaagtaaccctgatcagccagccgttatcttacttttgagacaagttcagtgtaaaccactcctggagtcacaaaagccactcccagatgctgtacttgaagaactacaaaaaacagtcatgtccaactcaacctctgttccagcttggcagtggctggcacatgtgtatcaatcccaaggaatgatgagagctgcagagatgtgttacagaaagagtctacaattggcatcccaacggggcagttggagtgggaagctctcaagtctgttgagactagcactacttgcattaaaagtctgtatggctaacatttccaatgatcactggccatctttggttcaagaggctacaactgaggccttgaagctttgcttttgtccactggctgttcttttacaagctttgttacaattcaaacgcaaaatgggggcaagagagacacggcgtcttttggaaagagtggtatatcagcctgggtatcccaaatctattgcatcaactgcacgttggtacctactgagacacttatatgccaaagatgactatgagcttattgacgtgctggtaaacaatgccaaaactcatggagatacaagagcattggaactgaatcagagattgtcctcacaataacattggattattttatagtaaggaagcaaagaaaaagctgtaagaatgaagcaatgaatcaagacttctacccaaagcaacatttttttaaactatatttattccttttctaaaggaatctagagaagttgaagtttttaagttaggaatgcaattttctgttaactccaaacctgattttaatctgaaaaaaaaaaaatttaatttgggaaaaccagaatgaaaggaaaaccattattgccttggttgcttaacattatttgtaaaccattattttctgcatcttgcatggtgcacaatagaatatcttttactgtaatcccttacaataaagccttaatagccattttctatgtaatatgcaaaagtagattagcacaatgcacaattttcttttgttaaaaatcaaattcaaagatttaattcttgctatgaattctaaagttcggcaaaccaattcatcataaaatccaaataatcttgtaacctatttatctagtgattcatctccaattctgttgaaaaagcataatataaatgttgatgagactagactctaatggatatgtttatataattccaaacactcaggtgtgtgaatgcatttaaaaacattaatggaaaataatgctgataatatttaattgatcatgcaattccttcaattatgatggaaagacttgaactttctgaaataaaacaaaaatacagc

SEQ ID NO: 181264 - DNA, 577 bp, Artificial Sequence
  derived and/or modified sequence
ctgctccaggtgggtttggatttctgtcggttttgcacaagggatcctaaaggcgattgaaatgatggaaaatgggtaaggaacaatcaaattcaattcgggaagaatatagaggtggtaataattggtaaaagtctgcagggttttttttaaccaaaggaaactggtttgagaaaattgtgaaatcagcattgaaatttgttacctactccaatcaagatttgcaaactacaaaaaaatcattctgaagctttcacctataaatatataccaagataatttcagataagaatgtccagcaaggaagtgaagactgctctaaaaagtgctagagatgcaatcagaaacaaagaatacaaagaagctttgaaacactgtaagacagtgttaaagcaagagaaaaataactataatgcctgggtttttattggcgttgctgcagctgaactagaacaacctgatcaggcccagagtgcctataaaaaagctgctgaattagagccagaccaattactagcttggcaggggttagcaaacttgtatgagaaatataatcacataaatgctaaggatgact

SEQ ID NO: 181265 - protein, 1199 aa, Artificial Sequence
  derived and/or modified sequence
MASAGTQHYSIGLRQKNSFKQSGPSGTVPATPPEKPSEGRVWPQAHQQVKPIWKLEKKQVETLSAGLGPGLLGVPPQPAYFFCPSTLCSSGTTAVIAGHSSSCYLHSLPDLFNSTLLYRRSSYRQKPYQQLESFCLRSSPSEKSPFSLPQKSLPVSLTANKATSSMVFSMAQPMASSSTEPYLCLAAAGENPSGKSLASAISGKIPSPLSSSYKPMLNNNSFMWPNSTPVPLLQTTQGLKPVSPPKIQPVSWHHSGGTGDCAPQPVDHKVPKSIGTVPADASAHIALSTASSHDTSTTSVASSWYNRNNLAMRAEPLSCALDDSSDSQDPTKEIRFTEAVRKLTARGFEKMPRQGCQLEQSSFLNPSFQWNVLNRSRRWKPPAVNQQFPQEDAGSVRRVLPGASDTLGLDNTVFCTKRISIHLLASHASGLNHNPACESVIDSSAFGEGKAPGPPFPQTLGIANVATRLSSIQLGQSEKERPEEARELDSSDRDISSATDLQPDQAETEDTEEELVDGLEDCCSRDENEEEEGDSECSSLSAVSPSESVAMISRSCMEILTKPLSNHEKVVRPALIYSLFPNVPPTIYFGTRDERVEKLPWEQRKLLRWKMSTVTPNIVKQTIGRSHFKISKRNDDWLGCWGHHMKSPSFRSIREHQKLNHFPGSFQIGRKDRLWRNLSRMQSRFGKKEFSFFPQSFILPQDAKLLRKAWESSSRQKWIVKPPASARGIGIQVIHKWSQLPKRRPLLVQRYLHKPYLISGSKFDLRIYVYVTSYDPLRIYLFSDGLVRFASCKYSPSMKSLGNKFMHLTNYSVNKKNAEYQANADEMACQGHKWALKALWNYLSQKGVNSDAIWEKIKDVVVKTIISSEPYVTSLLKMYVRRPYSCHELFGFDIMLDENLKPWVLEVNISPSLHSSSPLDISIKGQMIRDLLNLAGFVLPNAEDIISSPSSCSSSTTSLPTSPGDKCRMAPEHVTAQKMKKAYYLTQKIPDQDFYASVLDVLTPDDVRILVEMEDEFSRRGQFERIFPSHISSRYLRFFEQPRYFNILTTQWEQKYHGNKLKGVDLLRSWCYKGFHMGVVSDSAPVWSLPTSLLTISKDDVILNAFSKSETSKLGKQSSCEVSLLLSEDGTTPKSKKTQAGLSPYPQKPSSSKDSEDTSKEPSLSTQTLPVIKCSGQTSRLSASSTFQSISDSLLAVSP

SEQ ID NO: 181266 - protein, 101 aa, Artificial Sequence
  derived and/or modified sequence
MASAGTQHYSIGLRQKNSFKQSGPSGTVPATPPEKPSEGRVWPQAHQQVKPIWKLEKKQVETLSAGLGPGLLGVPPQPAYFFCPSTLCSSGTTAVIAGHSS

SEQ ID NO: 181267 - protein, 100 aa, Artificial Sequence
  derived and/or modified sequence
MASAGTQHYSIGLRQKNSFKQSGPSGTVPATPPEKPSEGRVWPQAHQQVKPIWKLEKKQVETLSAGLGPGLLGVPPQPAYFFCPSTLCSSGTTAVIAGHS

SEQ ID NO: 181268 - protein, 174 aa, Artificial Sequence
  derived and/or modified sequence
MASAGTQHYSIGLRQKNSFKQSGPSGTVPATPPEKPSEGRVWPQAHQQVKPIWKLEKKQVETLSAGLGPGLLGVPPQPAYFFCPSTLCSSGTTAVIAGHSSSCYLHSLPDLFNSTLLYRRSSYRQKPYQQLESFCLRSSPSEKSPFSLPQKSLPVSLTANKATSSMVFSMAQPM

SEQ ID NO: 181269 - DNA, 3600 bp, Artificial Sequence
  derived and/or modified sequence
atggcatccgcaggcacccagcactactccatcggtcttaggcagaaaaactcctttaagcagtctggcccttccggcacggtacctgcgacccctccagaaaagccttccgaagggagggtgtggccccaagcacatcagcaggtaaagccaatttggaaattggaaaagaagcaggtagaaaccctgtcggcgggactcggcccagggttgctgggggtcccaccacaacctgcttactttttctgtcccagtactttatgctcatccgggactacggcggtgatagctggccacagttcttcctgctatcttcacagtttgccggatctctttaactccactctgctgtaccgacgcagcagttatagacagaaaccataccagcagttagaaagcttctgtctccgatccagtccatctgaaaaaagccccttctcactgccgcaaaagagtctgccagtaagcctgactgcaaacaaagctacttccagtatggtgttttccatggctcaacccatggccagcagtagcaccgagccttatctgtgcttggccgcagctggtgagaatccttctggcaagtccctggcctccgcaatttcgggcaagatcccatcaccactcagtagctcatacaagccaatgttgaataacaattcttttatgtggccaaactctactcccgtgccgctcctgcagaccacccagggcctgaaaccggtgagcccacctaaaatccagccggtttcctggcaccactccggcggcaccggagattgcgcaccccaaccagtggaccacaaagtgcccaaatctattggcacggtgccagcagacgcttccgcccacattgcgctgtccacggcttcctcgcatgacacttctactacttccgtggcctctagttggtataatcgcaataatttagctatgagagccgaacctctctcctgcgcgctcgacgacagctcggattctcaagatcccacaaaagagataaggtttactgaggccgttcgcaaacttacagcacgaggcttcgaaaaaatgcccaggcagggatgccagctagagcagtcttccttccttaatccttccttccagtggaacgttctgaaccggtccaggagatggaaacctcccgccgtgaatcagcagtttcctcaagaggatgctggctccgtcaggcgagtcctgcctggagcatccgataccctggggctcgataacactgtgttttgtaccaagaggatctccattcatcttttggcctcgcacgcatcgggactgaaccataaccctgcgtgcgaatcggtgatagacagcagtgccttcggagaggggaaagctccaggaccgcctttcccccagaccctggggattgcaaatgtcgctacccgactgagttccattcagttaggccagtccgaaaaggagaggcccgaggaggcccgtgagttggattcgagtgatagagatatctcctcagccacagatctgcagcctgatcaggcagaaacagaagatacagaagaagaactagtagatggtctggaggactgttgcagccgtgacgagaatgaggaggaggagggcgattcagaatgttctagtctgagtgcagtatcgccgagcgagagcgtggcgatgatttctcgcagctgcatggaaatccttactaagcctctttcaaatcacgaaaaggtggtacgcccagctctgatctacagcttgttcccgaacgtgccacccacgatctatttcggcacccgagatgaacgggtcgagaagctcccttgggagcagcggaagttactcaggtggaaaatgtctactgtgaccccaaacatcgtcaagcagacgatcggcaggtctcacttcaagatctctaagcgaaacgacgactggctcggttgctggggacatcacatgaaaagcccctcctttaggtctataagggaacatcagaagttgaaccatttccctggctcctttcagatcgggcgcaaggatcgcctctggaggaacttatcacgtatgcagagccgcttcggtaaaaaggagttctctttcttcccacaaagtttcatcctgcctcaggatgctaagctcctgaggaaagcttgggaatccagttctcggcagaaatggatcgtgaagccaccggcctccgctcgtggcataggcatacaggtcatccacaagtggtcccaactgccaaagcgaagacctctcctggtgcagagatatctgcacaagccttaccttatctcaggaagtaagtttgacttacggatctacgtttacgtaactagctacgacccactgaggatttatctatttagcgatggcctcgtgcggttcgcctcttgtaaatatagcccatccatgaaaagccttgggaataagttcatgcatctcactaactactccgtgaacaagaagaacgcagaatatcaagcaaatgcggatgaaatggcctgccaaggacataaatgggccctgaaggccctgtggaattacttgagtcagaaaggtgtgaactcagacgcaatttgggagaagatcaaggacgtggtcgtaaagaccattatctctagcgaaccctacgtgacctctctgctcaaaatgtatgtccggcgcccgtatagttgccatgagctctttgggtttgatatcatgctggacgagaatttgaaaccctgggttcttgaagtgaacatttcaccctcactgcattcctcaagtcctctggatatatcgatcaagggacagatgatccgcgatcttctgaatctcgcgggctttgtattaccaaacgcagaagacatcattagcagcccgtcctcctgtagcagctccacaaccagcctgccgacttctcctggcgataagtgccgtatggccccagagcatgtcaccgcccagaagatgaagaaagcttactacttaacgcagaaaatccctgaccaggatttctacgccagcgtgctcgacgtattgactccagatgacgtccgaatactggtggagatggaggacgaattttcccggcgaggtcagttcgaaaggatattcccttcgcacatctcctccagatacctcaggtttttcgagcagccgcgctacttcaacatcctgactacacagtgggagcagaaataccatgggaacaagctgaagggggtggacctcctgagaagctggtgctataaaggatttcatatgggtgtggtcagcgattcagccccggtgtggagcctgccaacatccttgctgactattagcaaggacgacgtgatccttaacgcatttagcaagagcgagacatcaaagttaggcaagcagtcctcctgcgaagtcagcctccttctcagtgaggacgggaccacccccaaatctaagaaaactcaggcaggtcttagtccatatccccagaaacctagttcctcgaaagattccgaggatacaagtaaggagccctctctctccacacagactttaccagtaataaagtgctcaggccagacgagcagactctcagcatcgagtacctttcagtcgatcagtgacagtctgctggctgtttctccatag

SEQ ID NO: 181270 - DNA, 3600 bp, Artificial Sequence
  derived and/or modified sequence
atggccagcgccggtactcagcattatagtatcggactccgacagaaaaattccttcaagcaaagcggacccagcggaaccgtcccagccaccccaccagaaaagccaagcgaaggccgggtgtggccccaggcgcatcaacaggttaagcctatttggaagctagaaaagaaacaagttgagacgctgtccgctgggctcggacccggcttattgggcgtccccccccagccagcttacttcttttgcccatccacgctgtgcagctccggtaccacagcggttatcgctggacatagttcttcctgttacctccattctctgcccgatctgttcaattcgacgctcttgtaccgtcgctcatcgtacaggcagaaaccatatcaacagctcgagagtttttgcctccggtcatccccaagtgagaaaagtccattctcgctccctcagaagtccctgcctgtgtctttaaccgcgaacaaggcaacatcctcaatggtcttctccatggcccaacccatggcgtcatctagtacggaaccatacctttgcctcgccgcggctggcgagaacccatcaggaaaatccctagcatcagccatcagtgggaagattcccagccctctaagttcatcctacaaacccatgctgaacaataactcttttatgtggcccaactcaacccctgtacctttgctgcagaccacccaagggttaaaaccagtgtccccaccaaagatccagcccgttagctggcaccattctggtggcaccggagactgtgcgccacagcctgtcgatcataaggtgcccaagagcatcggcacagttcccgccgatgccagtgcccatatcgcactgtcgaccgcttcctctcacgacacttccactacatctgtggcatcttcctggtataatcgcaacaacctcgctatgcgcgctgaacctctgagctgtgcgctggacgattcaagtgacagtcaggatcccactaaggagatacggttcacagaagccgtccgcaagctgaccgccagggggtttgagaaaatgcccaggcagggctgtcaactagagcagtcctcctttctgaaccctagtttccagtggaatgtgctgaaccgctccagaaggtggaagccgcccgcggtcaatcagcaattcccccaggaggacgcaggctccgttcggcgagtcttgccaggtgcttctgacactttgggactggacaacaccgtgttttgtacaaaaagaatttccattcacctgctggctagtcatgcgtcgggactgaaccataaccctgcgtgtgaatccgttatcgatagcagtgctttcggagagggcaaagccccagggccaccttttccacagacactaggaatagctaacgtggccaccaggctttcatccatccaacttggccagtccgaaaaagaacggcctgaagaggcacgcgagctggactccagtgacagagacatctcttcagccacagatttgcagcccgaccaggctgaaacagaggacactgaagaggagctggtggatggcttagaagactgttgttcgcgggacgaaaatgaggaggaggagggcgactctgaatgttctagtctgagcgctgtaagcccgtccgaaagtgtggctatgatctccagaagctgcatggaaattctgactaaaccattgtcgaatcacgagaaggtggtgagacctgctttgatctattcattgttcccaaatgttcctcccacaatttattttggaaccagagatgagcgggtagagaaattgccatgggagcagcggaaactgctccgctggaaaatgtccaccgtgacgcccaacatcgtaaagcagaccatcggccgatctcattttaagatcagcaaacgtaacgatgattggctgggttgctggggccatcacatgaagtctccctcgtttcgaagtatccgcgaacatcagaaattgaaccactttccaggatcttttcagattggacgaaaagatcgcttatggcgcaacctgtccagaatgcagagtcggttcggaaaaaaggagttttcattctttcctcagagttttatcctgccgcaggacgctaaactcctacgcaaagcatgggaatctagctctcggcagaagtggatagttaaacctccagcgagcgcccgcgggatcggaattcaagtcatccacaagtggagtcagttgcctaagaggaggccactcctggtgcaaagataccttcataagccatacctgatatcaggcagcaaatttgaccttaggatctatgtgtacgtgactagttacgatcctctcagaatctatctcttctcagacggcctcgtgaggtttgcatcttgcaaatattctccgtcaatgaagtcgttgggtaataaattcatgcacctgactaattattcagtcaacaagaagaacgccgaataccaggcaaacgcagatgagatggcctgtcagggccacaagtgggccctgaaagctttgtggaactatctgagccagaagggcgtcaatagcgatgccatctgggaaaagattaaagacgttgtagtgaagactatcatttcgagcgagccttatgtaacttctctcctgaagatgtatgtgcgaagaccgtactcctgccatgaactgttcggcttcgatatcatgctcgacgaaaatcttaaaccatgggtgttggaggtgaacatttctccttccctccattcttcttctccattggatatctcgattaaagggcagatgattcgcgatctccttaatcttgccgggtttgtattgcctaacgccgaagatatcatctcgtcccctagtagctgctccagttccacaacctctctacccacatccccaggagacaagtgtcgaatggccccagagcacgtgactgcccagaagatgaaaaaggcttactacttaacacagaaaattcctgatcaggatttctatgcaagcgtgctcgatgttctgacccccgacgatgtaaggatcctggtagagatggaggacgaattcagcaggagaggacagtttgagcggatcttcccgtcccacatttcctcccgatacctgcggtttttcgagcaacctagatattttaacatcctgacgactcagtgggagcagaaataccatggcaacaaacttaaaggggtcgacctgctgcgttcttggtgttacaaaggatttcatatgggagtagtcagcgattccgcccccgtatggtccctgcccacatcactactgacgatctcaaaagatgatgtgatcctgaacgctttctctaaaagtgaaacatcaaagcttggcaagcagtcctcttgcgaggtctcgctactgctgtctgaggacgggactacacccaagagtaagaaaacccaagccggactgtctccatatcctcaaaaaccatctagtagtaaggatagtgaggacacctctaaggagccttcgctgagcacccaaaccctgccagtgatcaaatgtagtggccaaaccagtaggctgtccgcctcttctaccttccagtccatctccgactcgctactggcggtgtctccttag

SEQ ID NO: 181271 - DNA, 3600 bp, Artificial Sequence
  derived and/or modified sequence
atggccagcgctggcacccagcactacagcatcggcctgcggcagaagaacagcttcaagcagagcggccccagcggcaccgtgcctgccaccccacctgagaagcccagcgagggccgggtgtggccccaggcccaccagcaggtgaagcccatctggaagctggagaagaagcaggtggagaccctgtctgctggcctgggccctggcctgctgggcgtgcccccccagcctgcctacttcttctgccccagcaccctgtgcagcagcggcaccacagctgtgattgctggccacagcagcagctgctacctgcacagcctgcctgacctcttcaacagcaccctgctgtacagaagaagcagctaccggcagaagccctaccagcagctggagagcttctgcctgcggagcagccccagcgagaagagccccttcagcctgccccagaagagcctgcctgtgtccctgacagccaacaaggccaccagctccatggtgttctccatggcccagcccatggccagcagcagcacagagccctacctgtgcctggccgccgccggggagaaccccagcggcaagagcctggccagcgccatcagcggcaagatccccagccccctgagcagcagctacaagcccatgctgaacaacaacagcttcatgtggcccaacagcacccctgtgcccctgctgcagaccacccagggcctgaagcctgtgagcccccccaagatccagcctgtgtcctggcaccacagcggcggcaccggggactgtgccccccagcctgtggaccacaaggtgcccaagagcatcggcaccgtgcctgcagatgccagcgcccacatcgccctgagcacagccagcagccatgacaccagcaccacctctgtggccagctcctggtacaacagaaacaacctggccatgagagctgagcccctgagctgtgccctggatgacagcagtgacagccaggaccccaccaaggagatccgcttcacagaagctgtgaggaagctgacagcccggggctttgagaagatgccccggcagggctgccagctggagcagagcagcttcctgaaccccagcttccagtggaatgtgctgaacagaagccgccgctggaagcccccagctgtgaaccagcagttcccccaggaggatgctggctctgtgagaagagtgctgcccggggccagtgacaccctgggcctggacaacacagtgttctgcaccaagaggatcagcatccacctgctggccagccacgccagcggcctgaaccacaacccagcctgtgagagcgtgattgacagcagcgccttcggggagggcaaggcccctggcccccccttcccccagaccctgggcatcgccaacgtggccacccggctgagcagcatccagctgggccagagcgagaaggagaggcctgaggaggcccgggagctggacagcagtgaccgggacatcagcagcgccacagacctgcagcctgaccaggccgagacagaggacacagaggaggagctggtggatggcctggaggactgctgcagcagagatgaaaatgaggaggaggagggggacagcgagtgcagcagcctgtctgctgtgagccccagcgagagcgtggccatgatcagccgcagctgcatggagatcctgaccaagcccctgagcaaccacgagaaggtggtgcggcctgccctgatctacagcctcttccccaacgtgccccccaccatctacttcggcaccagagatgagcgggtggagaagctgccctgggagcagaggaagctgctgcgctggaagatgagcacagtgacccccaacatcgtgaagcagaccatcggccgcagccacttcaagatcagcaagagaaatgatgactggctgggctgctggggccaccacatgaagagccccagcttccgcagcatccgggagcaccagaagctgaaccacttccctggcagcttccagatcggcaggaaggaccggctgtggaggaacctgagcaggatgcagagcagatttgggaagaaggagttctccttcttcccccagagcttcatcctgccccaggatgccaagctgctgaggaaggcctgggagagcagcagccggcagaagtggatcgtgaagcccccagccagcgcccggggcatcggcatccaggtgatccacaagtggagccagctgcccaagagaagacccctgctggtgcagcgctacctgcacaagccctacctgatcagcggcagcaagtttgacctgcgcatctacgtgtatgtgaccagctatgaccccctgcgcatctacctgttcagtgatggcctggtgcgctttgccagctgcaagtacagccccagcatgaagagcctgggcaacaagttcatgcacctgaccaactacagcgtgaacaagaagaatgctgagtaccaggccaatgctgatgagatggcctgccagggccacaagtgggccctgaaggccctgtggaactacctgagccagaagggcgtgaacagtgatgccatctgggagaagatcaaggatgtggtggtgaagaccatcatcagcagcgagccctacgtgaccagcctgctgaagatgtatgtgagaagaccctacagctgccacgagctgtttggatttgacatcatgctggatgagaacctgaagccctgggtgctggaggtgaacatcagccccagcctgcacagcagcagccccctggacatcagcatcaagggccagatgatccgggacctgctgaacctggccggctttgtgctgcccaatgctgaggacatcatcagcagccccagcagctgcagcagcagcaccaccagcctgcccaccagccctggggacaagtgcaggatggcccctgagcacgtgacagcccagaagatgaagaaggcctactacctgacccagaagatcccagaccaggacttctacgcctctgtgctggatgtgctgaccccagatgatgtgcgcatcctggtggagatggaggatgagttcagcagaagaggccagtttgagcgcatcttccccagccacatcagcagccgctacctgcgcttctttgagcagccccgctacttcaacatcctgaccacccagtgggagcagaagtaccacggcaacaagctgaagggcgtggacctgctgcgctcctggtgctacaagggcttccacatgggcgtggtgtctgattctgcccctgtgtggagcctgcccaccagcctgctgaccatcagcaaggatgatgtgatcctgaatgccttcagcaagtctgagaccagcaagctgggcaagcagagcagctgtgaggtgtccctgctgctgtctgaagatggcaccacccccaagagcaagaagacccaggccggcctgagcccctacccccagaagcccagcagcagcaaggacagcgaggacaccagcaaggagcccagcctgagcacccagaccctgcccgtcatcaagtgcagcggccagaccagccggctgagcgccagcagcaccttccagagcatcagtgacagcctgctggccgtgagcccctag

SEQ ID NO: 181272 - DNA, 4967 bp, Artificial Sequence
  derived and/or modified sequence
gcggtgtgtggcaggcggcagcggcgctggcggccgagtgcgcttgtcacgcgtggcggtgcgtggttgctaggggcgcctgaggctgccgggtagcccagcaggccgagggaggaagtagcgtggagccggtgccgagccggggcgaagctggatcccctagatagactgtcttcaagctcactgatattttcctctgcttgatccattgtgctgttgagagcctctagtaaatttttcagactgacagacttcaaggatgcagctgctactaccggaggtgtgtggcaccttacctcagcaaggccatgagaccgtgtggccatgatgtgggcccctcatggcctcagcaggaacacagcactatagtattggcctccgccagaaaaacagcttcaagcagagtggtccctcaggcacagtacctgccacgccacctgagaaaccctcggagggcagagtctggcctcaggcccatcagcaagtgaagccaatctggaagctggaaaagaagcaagtggagacactgtcagcagggttgggcccaggcctcttgggcgtcccaccccagccagcatatttcttttgccccagcactttatgtagctctgggaccacggctgtcattgcaggccacagcagttcctgttacctacactctctcccggacttgttcaacagcaccctgctataccgccgctccagctataggcaaaaaccgtaccagcaactggagtctttctgcttgcgttcgagcccgtcagaaaaaagccctttttctctccctcaaaagagcctccctgtcagtctcactgccaacaaggccacttcttccatggtcttctccatggcccagcccatggcctcctcatccacagaaccatacctctgcttggcagcggctggggaaaacccttcagggaagagcctggcctctgccatctcagggaagatcccatctccactctcttcctcctataagcccatgctgaataataattccttcatgtggccaaatagcacgccagtgcctttattgcagaccacacagggcctgaagccagtatcgccacccaagatccagcctgtctcctggcatcattcagggggtactggagactgtgcaccgcagcctgttgaccataaggtgcccaaaagcattggcactgtcccagctgatgccagtgcccatatcgccttgtctaccgctagctcccacgacacatccaccaccagtgttgcctcttcctggtataaccggaataacttagccatgagggcagagccactttcctgtgctctggatgacagctctgattcccaggatccaactaaggagattcggttcactgaggccgtgaggaaattgaccgcaagaggctttgagaagatgccgaggcaaggctgccagcttgaacagtctagtttcctgaaccccagcttccagtggaatgtcctcaacaggagcaggcggtggaaacctcctgcggtaaatcagcagtttcctcaggaggatgctggatcggtcaggcgggtcctccctggtgcctcagataccttggggttggacaatacagtcttctgtaccaagcgtatcagcattcacctccttgcctcacatgccagtgggctcaatcacaaccctgcctgtgaatctgtaattgactcctcagcatttggagaaggcaaagctccaggtcccccttttcctcaaactcttggcatagccaacgtggccacccgcctctcttccatccagctgggccagtctgagaaggagagacctgaggaggccagggagctggactcatctgatagggatattagttcagctactgacctccagccagatcaggctgagactgaagatacagaagaagaactagtagatggtttggaagactgttgtagccgtgatgagaatgaagaggaggagggagactcagagtgctcctcattaagtgctgtctcccccagcgaatcggtggccatgatctctagaagctgtatggaaattctgaccaaacccctttccaatcatgagaaagttgtccgaccagccctcatctacagtctctttcccaacgttccccctaccatctattttggcactcgggatgagagagtggagaaacttccctgggaacagaggaagttgctccgatggaagatgagcacagtgacccccaacattgtcaagcagaccattggacggtcccacttcaaaatcagcaaaagaaacgatgactggctgggctgctggggtcaccacatgaagtctcctagtttccgatccattcgagagcatcagaagctaaaccatttcccaggctcattccagattgggaggaaggaccggctatggcggaacctgtcacgtatgcagagccgctttggcaagaaggagttcagtttcttcccccagtcctttatcctgccccaggacgccaagctcctgcgcaaagcgtgggagagcagcagccgccaaaagtggattgtgaagccaccagcatcagctcgaggcattggcatccaggttattcacaagtggagtcagctccccaagcgaaggcccctcctggtacagaggtatctacacaaaccctacctcatcagcggcagcaagtttgacctgcggatctatgtttatgtcacttcctacgatcctctgcggatttacctcttttcagatggactggtccgctttgccagttgcaagtattcgccttccatgaagagccttggcaataagttcatgcacctgaccaactacagtgtcaataaaaagaatgccgagtaccaggccaatgcagatgaaatggcttgccagggccacaaatgggcactgaaggctttgtggaactacctgagccagaagggagtcaatagcgacgccatctgggagaagataaaggatgttgttgtcaaaactatcatctcgtcagagccctatgtgaccagcctgctcaagatgtatgtgcgacggccctatagctgccatgaactctttggttttgacatcatgctagacgaaaacctcaagccctgggtcctggaagtcaacatttccccaagcctccactccagctctccactggatatcagcatcaaaggccagatgattcgtgaccttctgaatctggcaggttttgtcctgcccaatgcagaggatatcatttccagccccagcagctgcagcagctccaccaccagcctgcccacctcccctggggacaaatgtcgaatggctccagagcatgtcactgcacagaagatgaagaaagcctattatctgacccagaaaattcctgatcaggacttctatgcatctgtgctggatgtcctgacaccagatgatgttcggattctggttgagatggaagatgagttttctcgccgtggtcagtttgaacgaatttttccttctcatatctcctctcgctatctccgcttttttgagcagccacgatatttcaacattctcaccacccaatgggaacagaaataccatggcaacaagcttaaaggagtagatctgctccggagttggtgctacaaagggttccacatgggagttgtctctgattctgctccagtgtggtctctcccgacatcacttctgactatctcaaaggatgacgtgatactcaatgccttcagcaaatcagagactagcaagctgggaaaacaaagctcctgtgaggttagcctactactctctgaagacgggaccacgcccaaatccaagaagactcaagctggcctttccccttatccccagaaacccagttcctcaaaggacagtgaggacaccagcaaagagcccagcctttctacccagacgttacctgtgatcaagtgctctgggcagacttcaagactttctgcttcctccactttccagtcaatcagtgactccctcctggctgtgagcccataactggcctctctccaaaagcctctgcccaggagcatgggcatcagctacctcacgggaaccagcctgctgttcagaccagtctgaccccctacccctttcaccctgtccctcctcagagtattttttgaagtggttgcattatagagatgggtatttgtagggccggagggatggtagtgatggggagaaggtgaggaagggtcaccctctgtcacctgtctgcctggctggcacctcatatctcagcagagaagccagtggtggccacgcagccttataaagcaggttttggtttctaccttaagtgagccatgtgtggtttgtctgggggccctggtgtggttgctgagttgtagctcaagaggagaaaacatacagaacatatttggaccggaaatcctttgttctgaatttgagggggtcttctgaggtccttacttccttaggtctttcctcacccctctcccaccgctgtcctgaggagaaacccttgaacttcctcagtagacaggcggagaggccacaacatgccgaacccatttcctgtcatcctagtcttgggtcttcaccgcctccttccaaatacccaccctgccagcagccctaggtcttcctgttctgaccccccatcactgctcgttcagccttctagatgtctctctcgtggacatctgttctttagctgttggctttctctgaggtgtgagagggtctatgaactttgtgaatttcccatggccccagtgaaggagcccagataatcccagtagctgttacctgtctccatgtatcaaaggacacagtccagggggagggtggaaggagatgtggtttctctatagtgcaacaaacatggtttctcaatgttctgctgtgcagcaagcagggtctggcggcttggtaggtgggtttcaggagcagtcactattgtaggatgggcttccaatcaaacctcagactaaactcttgtactgaactgattctacctccctcctctagactcagtaaacagtgactattcaataaa

SEQ ID NO: 181273 - DNA, 3600 bp, Artificial Sequence
  derived and/or modified sequence
atggccagcgccggcacccagcactacagcatcggcctgcggcagaagaattcattcaaacaaagtggccctagtgggactgttcccgcaaccccccctgagaaaccctccgaggggagagtgtggccccaggcccatcagcaggtaaaacccatttggaagcttgaaaagaaacaggtggaaactctgtctgcggggttgggccctgggctacttggcgtgcccccgcagcctgcttatttcttctgcccaagtacgctgtgcagctccggaacaaccgctgtcatcgcaggccatagctcttcttgttacctccatagcctgccagatctcttcaattcaactcttctgtacaggagatcctcttatcgccaaaaaccgtaccagcagctggagtctttttgcctaaggagcagtccaagtgagaaaagtccattcagcctcccccagaagagccttcctgtaagcctgaccgccaataaagcaacatcatccatggttttttccatggctcaaccaatggcttcatccagcacagagccctacctgtgcctggccgctgccggagagaatccatctggaaagtcactcgcgagcgcaattagcgggaagattccatccccactgagctcgagttataagccaatgctaaataacaactcttttatgtggcctaacagcacccctgtccccctgctgcaaactactcagggtcttaaacctgtgtccccacctaagatccagcccgtgtcttggcatcactcaggtgggactggtgactgtgcaccccaacccgtcgatcacaaggttccaaaatctattgggactgtccccgcagatgcctctgcccacattgcacttagtactgcaagtagccatgacacgagcacaactagcgttgcctcatcctggtacaacagaaacaacctcgccatgcgcgccgagcctctgtcttgcgcattagacgactcctcagattcacaggacccaaccaaggaaattagatttactgaggcagtccgcaaacttacagcccgagggtttgagaagatgcctcggcaggggtgtcagcttgagcagtcttccttcctgaaccctagcttccagtggaacgtgctgaaccgctcaagaagatggaaaccacctgcggtgaatcagcagttcccccaggaggatgccggcagtgtgcgccgcgtgttgcctggtgcctccgacacattaggactagataataccgtattctgtactaagcgaatttcaattcatctgctcgcttcccatgcatctggcttgaatcataaccccgcttgtgaaagcgtgatcgatagcagcgctttcggagagggaaaagcaccgggccccccattcccccagaccctgggaatcgccaatgtcgccacaagactgtcttctattcagcttggccagagtgagaaagagaggcccgaagaggcgagggaactcgatagttccgatagagatataagtagcgccacagacctgcagcccgatcaagctgagacagaagatactgaggaggagctggtggacgggttagaggactgctgctctcgggatgagaatgaggaagaagagggagattcagagtgcagtagcctgtctgctgtgtctccatcagagtcagtcgccatgatcagtaggtcttgcatggagatccttacaaaacccctttcaaaccacgagaaagtggttagacccgccctcatctattcgctattccccaacgtgcctcccacaatttacttcggcacgcgagatgaaagagtagagaaactcccctgggaacaacgcaagctgcttcgctggaaaatgagtaccgtgacgcccaacattgttaaacaaacaatcggaagaagccacttcaaaatcagtaaacgcaatgatgattggcttggctgttggggccaccatatgaagagcccgagcttcagatccatccgagaacaccagaaactgaatcatttcccaggctctttccagatcggccgcaaggacaggctgtggaggaacctgagcaggatgcagtcgcgcttcggaaaaaaagaattctctttttttcctcagagcttcattcttcctcaggacgccaaactgctcagaaaagcctgggagagctcatcaaggcagaaatggatcgtcaaacctccagccagtgcacgggggataggcattcaggtgatacataaatggtcccagctgcccaagagacgaccgctgctcgtgcagaggtaccttcacaaaccatatttaatttcgggaagcaaattcgatctgcggatttatgtatatgtaacttcttacgaccccttgcggatttatctgttttccgatggattggtgcgctttgcttcttgtaagtattctccttccatgaaaagtctgggaaacaaatttatgcacctcacaaattactcagtgaataaaaagaacgccgagtaccaagcaaacgcggacgagatggcatgccaggggcacaagtgggccctgaaggccttgtggaattacctctcacagaaaggagtcaatagcgatgctatctgggagaaaatcaaagacgtagtagttaagactattatatccagtgaaccctatgtgacctcccttctgaagatgtatgttaggcgtccttatagctgtcatgagctttttggatttgatataatgctggatgagaacctgaaaccttgggtgcttgaggtaaatatctccccatctctgcattcttcaagccccctggatatcagtataaaggggcagatgattcgggacttgctcaacctggcaggctttgttcttcccaacgccgaagatattatttcaagccccagcagctgcagcagctctaccacaagcctgcctacttcgccaggcgacaaatgcaggatggcccctgaacatgtcacagcccagaaaatgaagaaagcttactatttaactcaaaaaatcccggatcaggacttctacgctagcgtactagatgtgttaacgcctgacgacgttcgcattctggttgagatggaggacgagttcagtcggcgcgggcagtttgaaagaattttccctagccacatttcatcacgttaccttcggttttttgagcagccgcgatattttaatattctcaccacacagtgggagcagaaatatcacggaaacaaattaaagggcgttgacttgttgcggagctggtgttacaaaggcttccacatgggcgttgttagcgattccgctcccgtgtggagcttgcctactagtttacttacaatttctaaggacgatgtgatactgaatgccttctctaaaagcgagaccagcaaactgggtaaacagagctcctgtgaggtgtccctgctgctgtctgaagatggaaccacaccaaaaagtaagaaaacccaggcgggcttgtccccctacccccagaagccctcatcttcaaaggactccgaggacacttcaaaagaaccctctctgtccactcagaccctgccagtgattaagtgttcagggcagacaagtcgcctcagtgcaagcagcacctttcagtccattagtgatagtctgttggccgtcagcccatag

SEQ ID NO: 181274 - DNA, 3600 bp, Artificial Sequence
  derived and/or modified sequence
atggccagcgccggcacccagcactacagcatcggcctgcggcagaaaaattccttcaaacagtccggcccctccgggaccgtacccgccaccccccctgaaaagccttcggaaggcagagtgtggccccaagctcaccagcaggtaaaacccatttggaagctggagaaaaaacaggtcgagaccctgagtgctgggctgggacccggtttgctcggtgtccctcctcagcccgcctacttcttttgcccaagtaccctgtgctccagcggcaccacagccgtcattgctgggcactcgagctcttgctatttacactcccttcccgatttgttcaattctaccctcctctatagacggtcctcctatcgacagaaaccatatcagcagctggagagtttttgtttgcgaagctcaccatccgagaaaagtcccttttctctcccccagaaaagcctacccgtctctcttactgctaacaaagccacatcctctatggtgttctcaatggctcagccaatggcctcctcttctactgaaccatacctgtgtctggctgccgccggagagaacccatcaggcaagtccctcgcctcggctataagcggcaagattcccagcccgctctcttctagctataagcctatgctcaataataattccttcatgtggcccaatagtacccctgtgcctctgctacagaccacccagggtctcaagcctgtctcccctcctaagattcagcccgtctcctggcaccactccggtgggactggcgactgtgctccgcagccagtggaccataaggttcctaagtctattggtacagttccagctgacgctagtgcacatatcgccctatccaccgcgagtagccatgacaccagcaccacttctgtggcaagttcctggtataaccgcaataacttagccatgcgggctgagcctctgtcttgcgccctggacgattcttccgactcacaagacccgacgaaagagattcgatttaccgaagctgtcaggaaactgactgcgagagggttcgagaagatgcctcgccaaggttgccagcttgaacaaagctccttcctcaaccccagttttcagtggaacgtgttaaataggtcacgccgctggaagccaccggccgtgaaccagcagtttcctcaggaggacgccggctccgtgcgcagggtgctgcccggagcgagtgatacgctcgggttagataataccgttttctgtactaagcggatctccatccatctgctcgccagccatgcctcaggccttaaccacaatccggcctgtgagagtgtaatagactcatctgcgttcggcgaggggaaggcacccgggcctcctttccctcagactttgggtattgccaatgtggcaacccgcctgtcttcgatacagctgggccagtccgaaaaagaacgcccagaagaggccagggaactggattcctcagaccgggatatctcatcagcgactgatttacaaccggatcaggcggagaccgaagacaccgaggaggagctagtcgacggactcgaggattgttgctctcgcgatgagaatgaggaagaggaaggcgattcagaatgcagctctctttcagccgtttcaccttccgaaagtgttgccatgatcagtcggtcgtgcatggaaattctgactaagccactgagtaaccatgagaaggtggtcagacctgctcttatctacagtctgtttcccaatgtcccgcccaccatttacttcggcactcgcgatgagagggtggagaaacttccgtgggaacaacgcaagctgctgaggtggaagatgtccacggttacgccaaacatcgtaaaacagacaatcgggaggtcccatttcaagattagtaaaagaaacgatgattggttaggatgttggggccatcacatgaagtcgccttcattccggtcaattcgcgaacatcagaaattgaatcattttccaggaagctttcagattggacgcaaggaccggctctggcgcaatctgagcagaatgcagtcgcggtttggaaaaaaagaattcagtttctttccccaatcctttattctcccgcaggatgccaagctgctaaggaaggcttgggagtcctcgagcaggcagaagtggatagtgaaacccccggcgagtgcacggggaataggcatccaggtgatccataaatggtctcagctccctaaacgtcggcctctgctagtgcaaaggtatttgcacaagccgtatctgatcagtgggtctaagttcgacctgagaatctacgtttacgtgacaagttatgatcccctgaggatttatctcttctccgatgggctggtgagatttgctagttgcaaatacagtccttccatgaaatccctgggcaataagttcatgcacttaacaaactattccgtaaacaagaagaatgccgaatatcaggccaacgctgacgagatggcttgccagggacacaagtgggcccttaaagctctttggaactaccttagccagaaaggcgtgaacagtgacgccatttgggaaaaaattaaggatgtggtggtgaaaactatcatctccagcgagccctacgtgacttctttattaaaaatgtatgtccgccgtccttatagttgccacgagctgtttggcttcgatataatgctggatgagaatctgaaaccatgggttctggaggtgaatattagtccatccctgcatagttctagtccactggatatttcaatcaagggacagatgattagagatctgttaaacctcgcaggctttgtccttccgaatgcagaggacattattagtagcccatcttcctgtagctcatcaacaacatccttgcccacctcccctggggataaatgtcgcatggctcccgaacacgtcactgcacagaagatgaagaaagcctactacctgactcaaaagattccagatcaggacttctatgcctctgtgctggacgtgctcaccccagacgatgtccgcatcttagtggaaatggaggatgagttctcccggaggggccaattcgagagaatcttcccctcccacatctcttctcggtacctgcgattcttcgagcagccccgttactttaacatcctgacgacacagtgggaacaaaagtaccacggcaacaaactcaagggagtggatctcctaagatcttggtgttacaaggggtttcacatgggagtggtgagcgatagtgcacccgtctggagtcttccaacatctctcctcaccatctccaaggatgatgtcatcctgaacgcatttagcaaaagtgaaacctcgaagctgggcaaacagtcttcttgcgaggtcagcttgctgctttccgaggacggaacaacacctaagagtaagaagacccaagccggattatctccctatccacagaagccatcatcttccaaagacagcgaagacacctcaaaggagcccagcctgagtacccagaccctcccggttattaagtgtagtggccagaccagcaggctttccgctagcagtacttttcagagcatctcagattccctgctggccgtttcgccatag

SEQ ID NO: 181275 - DNA, 3600 bp, Artificial Sequence
  derived and/or modified sequence
atggcctccgccggaacacagcattactcaattggcttgaggcagaagaattctttcaaacaaagcggtccaagcggaaccgttccagccacgccacctgagaagccgtctgaagggcgagtatggccccaggcgcatcagcaagtgaagcctatttggaaactagaaaaaaagcaggtggagacactctccgctggtctgggtccgggactccttggtgtcccgccacagcccgcttactttttctgtcccagtaccctgtgctcatctgggaccaccgctgtgattgcaggacatagttcttcttgctatctgcatagtctgcctgatctgttcaactcaacactcctgtaccggaggtcaagctacaggcagaagccgtatcagcagctggaatcattttgtctccgatcctccccttccgaaaaatctcccttcagcctgcctcagaaatcactgcccgtgagccttaccgccaacaaagctacatcatcaatggtgttcagcatggcccagcccatggcctcgagctcaacagagccgtacctgtgtctggcagccgctggcgaaaacccaagcgggaagagcctagcatcagctatctctggtaaaataccatctcccctctcaagcagctataaacctatgctgaataataattcattcatgtggccaaattctactcctgtgcccctgctgcaaaccactcagggtcttaaacctgtttcaccacccaaaatccagcctgtgtcttggcaccacagtggtgggactggggattgtgctccccagcccgtggatcacaaggttcccaaaagcatcggtacagtgcccgctgacgcttccgcacacatagctcttagcacggcatcgtcccacgatacgagcacaaccagcgtggcatcctcttggtacaaccggaataacctcgcaatgcgggcagagcccctcagctgtgccctcgatgactccagcgacagtcaggatccgacaaaggaaatacggtttacagaagccgtacgcaagctaactgccagaggcttcgagaagatgccccgtcaggggtgccagctagagcagtcctctttcctcaatccaagcttccagtggaacgtcctgaatcggagccgccgttggaaaccccctgctgtaaaccaacaattcccacaggaggacgcgggttctgtgaggcgggtgttacccggagcgagcgatacccttggcctggacaacaccgtgttctgtactaaacggatcagtatacatctgttggcctctcatgcttccggtctcaaccacaatcctgcttgtgagtcagtgatagattcaagcgcattcggtgagggaaaagcccctggccctcccttcccccagactctcggcattgcaaacgtcgccacccggctcagtagcatccagctgggacaatccgagaaagaaaggcccgaggaggcaagagaattggactccagcgaccgggatatttcttccgccaccgacctccaaccagaccaggccgagacagaggatacggaggaggaactggtggatggtcttgaggactgttgttcccgggacgaaaatgaagaggaagaaggggactcagagtgttcatctctgtcagcagtttctccaagcgaaagcgtcgcgatgattagcagatcctgtatggaaatcctcaccaagcctttgtccaatcacgaaaaagtcgtcaggcccgcattgatatactccttgttccctaatgtacctccgaccatctactttggaacgagagacgaacgggtggagaaactcccatgggaacagaggaagctacttcgctggaagatgagcactgtgactcctaacattgttaagcagacaattggtagatctcattttaaaattagcaaaaggaatgacgattggctgggttgttggggacatcacatgaagtcaccatcctttagatccatccgagagcatcagaagctcaatcatttccctggtagctttcagatcggtagaaaagaccgcctgtggcggaatctgtcaaggatgcaaagcaggtttgggaagaaggaattctcattttttccgcagagtttcattctgcctcaagacgctaaactgctgcgtaaagcatgggagagctcctccagacagaagtggattgtgaagccacccgcatctgctcggggtatcgggattcaagtgattcacaaatggagccagttaccaaaacgccgacccctgttggtgcagcgctaccttcacaaaccatacctgattagtggtagtaaattcgacctgaggatttatgtgtacgtgacaagttatgaccctctacgcatatacctcttttctgacggactggtgcggttcgcatcatgcaaatattcccctagcatgaagtctctggggaataaatttatgcatttgactaattatagcgttaataagaagaatgctgagtatcaggccaacgctgatgaaatggcctgtcagggacataagtgggcactaaaggcgctctggaactacttatctcagaaaggagtcaactctgatgcgatctgggagaaaatcaaggacgtcgtggtgaagactatcatctctagcgagccatacgtgacctctctgctgaagatgtatgtccgtagaccctacagttgtcacgaactcttcggttttgatatcatgctggacgaaaacctgaagccttgggttttggaagtgaatatctccccctccctccactcttcctcgccattggatatttcaatcaaaggccagatgatccgggatctcctgaatttggcgggatttgttcttcccaatgcagaagatatcatttcctcaccatcaagttgttcttcatctacaacatctctgcccactagcccaggggataaatgtagaatggcaccggaacatgtgactgcacagaagatgaaaaaagcgtattatctcacacagaagatacccgaccaggacttctatgcaagcgtactggatgtcctcactcccgacgacgtgaggatcctggtggagatggaagacgagttttccaggagaggtcagttcgagcggatattcccttcccacatctcttcccgatacctgagattcttcgagcagccgcgttattttaacattctgaccacgcaatgggagcagaaatatcacgggaataagctgaaaggagttgatcttctgagatcctggtgttacaagggattccacatgggcgtcgtgtcagattcagcccctgtctggagcttacccacttcattgctgactatctcaaaggatgacgtgattcttaatgcgttttcgaaatcagaaacctctaaacttggcaaacagtccagctgcgaggtttctctcctgctcagtgaagacggcacaacccccaagagtaagaagacccaggccggactgtcaccctatccccaaaagccaagcagcagcaaagattcagaggatacctccaaagaaccaagtctatctacccagaccctccccgtaataaaatgtagcggacagaccagcagacttagtgctagtagcacatttcaatcaatctccgactcccttctggcagtctcaccctag

SEQ ID NO: 181276 - DNA, 3600 bp, Artificial Sequence
  derived and/or modified sequence
atggcatccgccggaactcagcactacagtatcggactgagacagaaaaattcctttaagcagagcggtccatccggaaccgtacccgctacacccccagagaagcctagtgaaggaagggtatggccccaagcccatcagcaagtcaagcctatttggaaactcgagaaaaagcaggtggagacattatctgcaggactggggcctgggctcctcggcgtgccccctcaacccgcatactttttttgtccgtccacattgtgtagctcaggcacaaccgccgtgattgccggtcattccagttcttgttatctgcatagtctccccgatctcttcaattctactttactgtatagacggagctcttaccggcaaaagccctatcagcagctggaatcattttgcctgcgatcatctccatccgagaagagccctttttctttacctcagaaaagtcttcccgtcagcttgaccgccaacaaggctacaagcagtatggtcttctcaatggctcaacccatggccagtagctcaacagagccttacctgtgcctggctgcggctggtgagaatccaagcggcaagtcgttggcttcggctatctctggcaaaataccttctcccctgtcctcgagctacaaacccatgttgaataacaactccttcatgtggccaaactcaacacccgtgcctctactccaaactacacaagggttgaagccggtgtctccaccaaaaatccagcccgtgagctggcaccacagtgggggtaccggtgactgcgctccacagcccgtagatcacaaggtcccgaaaagtattggcactgtacctgctgacgcctcggctcacatagctctgtccacagcgtcttctcatgacactagcacaacaagtgtggcctcgtcctggtataacagaaacaacctggccatgcgggcagagcccctcagctgcgctttggatgatagctcagactcccaggaccccacaaaggagatccgctttacggaagcggtgagaaaactcactgctcgcggatttgagaagatgccgagacagggttgccagctggagcagtcaagcttcctcaatccatctttccagtggaacgtgctgaatagatctcgccgttggaagcctccagccgtgaatcagcagtttccccaagaggacgccggttcagtaaggagagttctcccaggagccagcgataccttaggactggacaacacagtattttgcacaaagagaatttccattcatttgttagcgtctcacgcgtctggtttgaaccacaatcccgcttgcgagagcgtgatcgacagctctgccttcggcgaggggaaggctccgggaccgccttttcctcagacgctgggcatcgcaaacgttgctacccgtctgtcgtcgatccagctgggccaaagcgaaaaggaacggcctgaagaggcccgagaactggattccagcgatcgggatatttcgtctgctacggaccttcagcctgaccaggccgagaccgaagataccgaggaggaactggtggatgggctggaggactgctgctcccgcgatgagaacgaggaggaagaaggcgattccgaatgcagttccctgtcagcagtgtccccgagcgagagtgtggccatgatctcccggagctgcatggaaatcctcaccaagcccctcagtaaccacgaaaaggtcgttagaccagccctgatctactccctgttccccaatgtgccaccgacaatctattttgggacccgagatgagcgagtggaaaagctgccctgggaacagaggaaacttctgcgctggaaaatgagtaccgtgacgcccaatatcgtaaaacaaacaataggccgtagccattttaaaatctccaaaaggaacgacgactggctcggctgctggggccatcatatgaagagccctagcttccgcagtattcgggagcatcaaaagctcaatcacttcccaggttcctttcaaatcggcaggaaggatcgcctgtggaggaacctatctcgcatgcaatcgcgatttggtaaaaaagaattttctttcttcccccaatcttttatcctcccgcaagatgccaaattactgcgaaaggcttgggaatcgtcatcacgccagaagtggattgtcaaacctccggcttctgctagggggataggaatccaagttatccataagtggtcacaactacctaaacgccgacccctgctggttcagagatacttgcataaaccatacctgattagcggaagtaaattcgacctgcgcatctacgtatatgtaacatcctacgaccctctcagaatctatctgttttctgacggactcgttcggtttgctagctgcaagtattccccaagtatgaaaagtctcgggaataaattcatgcatcttaccaattattctgtaaacaagaagaacgccgaatatcaggctaacgccgacgagatggcatgccaggggcataagtgggctttgaaagccctttggaactacctctcccagaagggcgtgaactctgacgcaatatgggaaaaaatcaaggatgttgttgtgaaaaccattatctctagtgaaccttatgtcaccagcctgcttaagatgtacgtgaggcgaccttacagctgccacgaactctttggctttgacattatgttagacgaaaatctcaagccgtgggtacttgaggtgaatatcagtccctccctgcacagctcttcccctctggatatctcaatcaaagggcagatgatccgtgatctgttaaatctggccggattcgtgttgccgaacgccgaggatattatttcatcgccatcttcgtgcagtagtagtaccacctctctacccacgtcgcccggtgacaaatgccgcatggcccctgaacacgtaactgctcagaagatgaaaaaagcgtattacctcacacagaaaatacctgaccaggatttctatgcttccgtcttggatgttctgacaccagatgacgtcagaattctggtagaaatggaagacgaattctcccggagaggccagtttgagagaatctttcctagccacatatcctcccgatacttgcggttctttgagcagcctaggtactttaacattctgacgacccaatgggagcaaaagtaccacgggaataagttaaaaggcgttgatttacttaggtcttggtgctataaaggatttcacatgggcgtggtctccgacagcgctcccgtgtggagcctgccaaccagtcttctgacaatcagtaaagacgatgtgattttaaatgcatttagtaagagtgaaacctccaaattaggaaaacagtcttcctgcgaagtgtcgctgctcctctctgaggatggtacaacacctaagtccaaaaaaacccaagctggcctgtcaccttatccacagaagccctcttctagcaaggatagcgaggatacaagcaaggaaccttccctcagtacacaaacccttcctgttattaagtgttctgggcagacatcaaggttatctgcaagcagcacttttcagtctatttccgatagccttcttgcggtcagtccatag

SEQ ID NO: 181277 - DNA, 4730 bp, Artificial Sequence
  derived and/or modified sequence
ttcagactgacagacttcaaggatgcagctgctactaccggaggtgtgtggcaccttacctcagcaaggccatgagaccgtgtggccatgatgtgggcccctcatggcctcagcaggaacacagcactatagtattggcctccgccagaaaaacagcttcaagcagagtggtccctcaggcacagtacctgccacgccacctgagaaaccctcggagggcagagtctggcctcaggcccatcagcaagtgaagccaatctggaagctggaaaagaagcaagtggagacactgtcagcagggttgggcccaggcctcttgggcgtcccaccccagccagcatatttcttttgccccagcactttatgtagctctgggaccacggctgtcattgcaggccacagcagttcctgttacctacactctctcccggacttgttcaacagcaccctgctataccgccgctccagctataggcaaaaaccgtaccagcaactggagtctttctgcttgcgttcgagcccgtcagaaaaaagccctttttctctccctcaaaagagcctccctgtcagtctcactgccaacaaggccacttcttccatggtcttctccatggcccagcccatggcctcctcatccacagaaccatacctctgcttggcagcggctggggaaaacccttcagggaagagcctggcctctgccatctcagggaagatcccatctccactctcttcctcctataagcccatgctgaataataattccttcatgtggccaaatagcacgccagtgcctttattgcagaccacacagggcctgaagccagtatcgccacccaagatccagcctgtctcctggcatcattcagggggtactggagactgtgcaccgcagcctgttgaccataaggtgcccaaaagcattggcactgtcccagctgatgccagtgcccatatcgccttgtctaccgctagctcccacgacacatccaccaccagtgttgcctcttcctggtataaccggaataacttagccatgagggcagagccactttcctgtgctctggatgacagctctgattcccaggatccaactaaggagattcggttcactgaggccgtgaggaaattgaccgcaagaggctttgagaagatgccgaggcaaggctgccagcttgaacagtctagtttcctgaaccccagcttccagtggaatgtcctcaacaggagcaggcggtggaaacctcctgcggtaaatcagcagtttcctcaggaggatgctggatcggtcaggcgggtcctccctggtgcctcagataccttggggttggacaatacagtcttctgtaccaagcgtatcagcattcacctccttgcctcacatgccagtgggctcaatcacaaccctgcctgtgaatctgtaattgactcctcagcatttggagaaggcaaagctccaggtcccccttttcctcaaactcttggcatagccaacgtggccacccgcctctcttccatccagctgggccagtctgagaaggagagacctgaggaggccagggagctggactcatctgatagggatattagttcagctactgacctccagccagatcaggctgagactgaagatacagaagaagaactagtagatggtttggaagactgttgtagccgtgatgagaatgaagaggaggagggagactcagagtgctcctcattaagtgctgtctcccccagcgaatcggtggccatgatctctagaagctgtatggaaattctgaccaaacccctttccaatcatgagaaagttgtccgaccagccctcatctacagtctctttcccaacgttccccctaccatctattttggcactcgggatgagagagtggagaaacttccctgggaacagaggaagttgctccgatggaagatgagcacagtgacccccaacattgtcaagcagaccattggacggtcccacttcaaaatcagcaaaagaaacgatgactggctgggctgctggggtcaccacatgaagtctcctagtttccgatccattcgagagcatcagaagctaaaccatttcccaggctcattccagattgggaggaaggaccggctatggcggaacctgtcacgtatgcagagccgctttggcaagaaggagttcagtttcttcccccagtcctttatcctgccccaggacgccaagctcctgcgcaaagcgtgggagagcagcagccgccaaaagtggattgtgaagccaccagcatcagctcgaggcattggcatccaggttattcacaagtggagtcagctccccaagcgaaggcccctcctggtacagaggtatctacacaaaccctacctcatcagcggcagcaagtttgacctgcggatctatgtttatgtcacttcctacgatcctctgcggatttacctcttttcagatggactggtccgctttgccagttgcaagtattcgccttccatgaagagccttggcaataagttcatgcacctgaccaactacagtgtcaataaaaagaatgccgagtaccaggccaatgcagatgaaatggcttgccagggccacaaatgggcactgaaggctttgtggaactacctgagccagaagggagtcaatagcgacgccatctgggagaagataaaggatgttgttgtcaaaactatcatctcgtcagagccctatgtgaccagcctgctcaagatgtatgtgcgacggccctatagctgccatgaactctttggttttgacatcatgctagacgaaaacctcaagccctgggtcctggaagtcaacatttccccaagcctccactccagctctccactggatatcagcatcaaaggccagatgattcgtgaccttctgaatctggcaggttttgtcctgcccaatgcagaggatatcatttccagccccagcagctgcagcagctccaccaccagcctgcccacctcccctggggacaaatgtcgaatggctccagagcatgtcactgcacagaagatgaagaaagcctattatctgacccagaaaattcctgatcaggacttctatgcatctgtgctggatgtcctgacaccagatgatgttcggattctggttgagatggaagatgagttttctcgccgtggtcagtttgaacgaatttttccttctcatatctcctctcgctatctccgcttttttgagcagccacgatatttcaacattctcaccacccaatgggaacagaaataccatggcaacaagcttaaaggagtagatctgctccggagttggtgctacaaagggttccacatgggagttgtctctgattctgctccagtgtggtctctcccgacatcacttctgactatctcaaaggatgacgtgatactcaatgccttcagcaaatcagagactagcaagctgggaaaacaaagctcctgtgaggttagcctactactctctgaagacgggaccacgcccaaatccaagaagactcaagctggcctttccccttatccccagaaacccagttcctcaaaggacagtgaggacaccagcaaagagcccagcctttctacccagacgttacctgtgatcaagtgctctgggcagacttcaagactttctgcttcctccactttccagtcaatcagtgactccctcctggctgtgagcccataactggcctctctccaaaagcctctgcccaggagcatgggcatcagctacctcacgggaaccagcctgctgttcagaccagtctgaccccctacccctttcaccctgtccctcctcagagtattttttgaagtggttgcattatagagatgggtatttgtagggccggagggatggtagtgatggggagaaggtgaggaagggtcaccctctgtcacctgtctgcctggctggcacctcatatctcagcagagaagccagtggtggccacgcagccttataaagcaggttttggtttctaccttaagtgagccatgtgtggtttgtctgggggccctggtgtggttgctgagttgtagctcaagaggagaaaacatacagaacatatttggaccggaaatcctttgttctgaatttgagggggtcttctgaggtccttacttccttaggtctttcctcacccctctcccaccgctgtcctgaggagaaacccttgaacttcctcagtagacaggcggagaggccacaacatgccgaacccatttcctgtcatcctagtcttgggtcttcaccgcctccttccaaatacccaccctgccagcagccctaggtcttcctgttctgaccccccatcactgctcgttcagccttctagatgtctctctcgtggacatctgttctttagctgttggctttctctgaggtgtgagagggtctatgaactttgtgaatttcccatggccccagtgaaggagcccagataatcccagtagctgttacctgtctccatgtatcaaaggacacagtccagggggagggtggaaggagatgtggtttctctatagtgcaacaaacatggtttctcaatgttctgctgtgcagcaagcagggtctggcggcttggtaggtgggtttcaggagcagtcactattgtaggatgggcttccaatcaaacctcagactaaactcttgtactgaactgattctacctccctcctctagactcagtaaacagtgactattcaataaa

SEQ ID NO: 181278 - DNA, 3600 bp, Artificial Sequence
  derived and/or modified sequence
atggccagcgccggcacccagcactacagcatcggcctgagacagaagaacagcttcaagcagagcggccccagcggcaccgtgcccgccaccccccccgagaagcccagcgagggcagagtgtggccccaggcccaccagcaggtgaagcccatctggaagctggagaagaagcaggtggagaccctgagcgccggcctgggccccggcctgctgggcgtgcccccccagcccgcctacttcttctgccccagcaccctgtgcagcagcggcaccaccgccgtgatcgccggccacagcagcagctgctacctgcacagcctgcccgacctgttcaacagcaccctgctgtacagaagaagcagctacagacagaagccctaccagcagctggagagcttctgcctgagaagcagccccagcgagaagagccccttcagcctgccccagaagagcctgcccgtgagcctgaccgccaacaaggccaccagcagcatggtgttcagcatggcccagcccatggccagcagcagcaccgagccctacctgtgcctggccgccgccggcgagaaccccagcggcaagagcctggccagcgccatcagcggcaagatccccagccccctgagcagcagctacaagcccatgctgaacaacaacagcttcatgtggcccaacagcacccccgtgcccctgctgcagaccacccagggcctgaagcccgtgagcccccccaagatccagcccgtgagctggcaccacagcggcggcaccggcgactgcgccccccagcccgtggaccacaaggtgcccaagagcatcggcaccgtgcccgccgacgccagcgcccacatcgccctgagcaccgccagcagccacgacaccagcaccaccagcgtggccagcagctggtacaacagaaacaacctggccatgagagccgagcccctgagctgcgccctggacgacagcagcgacagccaggaccccaccaaggagatcagattcaccgaggccgtgagaaagctgaccgccagaggcttcgagaagatgcccagacagggctgccagctggagcagagcagcttcctgaaccccagcttccagtggaacgtgctgaacagaagcagaagatggaagccccccgccgtgaaccagcagttcccccaggaggacgccggcagcgtgagaagagtgctgcccggcgccagcgacaccctgggcctggacaacaccgtgttctgcaccaagagaatcagcatccacctgctggccagccacgccagcggcctgaaccacaaccccgcctgcgagagcgtgatcgacagcagcgccttcggcgagggcaaggcccccggcccccccttcccccagaccctgggcatcgccaacgtggccaccagactgagcagcatccagctgggccagagcgagaaggagagacccgaggaggccagagagctggacagcagcgacagagacatcagcagcgccaccgacctgcagcccgaccaggccgagaccgaggacaccgaggaggagctggtggacggcctggaggactgctgcagcagagacgagaacgaggaggaggagggcgacagcgagtgcagcagcctgagcgccgtgagccccagcgagagcgtggccatgatcagcagaagctgcatggagatcctgaccaagcccctgagcaaccacgagaaggtggtgagacccgccctgatctacagcctgttccccaacgtgccccccaccatctacttcggcaccagagacgagagagtggagaagctgccctgggagcagagaaagctgctgagatggaagatgagcaccgtgacccccaacatcgtgaagcagaccatcggcagaagccacttcaagatcagcaagagaaacgacgactggctgggctgctggggccaccacatgaagagccccagcttcagaagcatcagagagcaccagaagctgaaccacttccccggcagcttccagatcggcagaaaggacagactgtggagaaacctgagcagaatgcagagcagattcggcaagaaggagttcagcttcttcccccagagcttcatcctgccccaggacgccaagctgctgagaaaggcctgggagagcagcagcagacagaagtggatcgtgaagccccccgccagcgccagaggcatcggcatccaggtgatccacaagtggagccagctgcccaagagaagacccctgctggtgcagagatacctgcacaagccctacctgatcagcggcagcaagttcgacctgagaatctacgtgtacgtgaccagctacgaccccctgagaatctacctgttcagcgacggcctggtgagattcgccagctgcaagtacagccccagcatgaagagcctgggcaacaagttcatgcacctgaccaactacagcgtgaacaagaagaacgccgagtaccaggccaacgccgacgagatggcctgccagggccacaagtgggccctgaaggccctgtggaactacctgagccagaagggcgtgaacagcgacgccatctgggagaagatcaaggacgtggtggtgaagaccatcatcagcagcgagccctacgtgaccagcctgctgaagatgtacgtgagaagaccctacagctgccacgagctgttcggcttcgacatcatgctggacgagaacctgaagccctgggtgctggaggtgaacatcagccccagcctgcacagcagcagccccctggacatcagcatcaagggccagatgatcagagacctgctgaacctggccggcttcgtgctgcccaacgccgaggacatcatcagcagccccagcagctgcagcagcagcaccaccagcctgcccaccagccccggcgacaagtgcagaatggcccccgagcacgtgaccgcccagaagatgaagaaggcctactacctgacccagaagatccccgaccaggacttctacgccagcgtgctggacgtgctgacccccgacgacgtgagaatcctggtggagatggaggacgagttcagcagaagaggccagttcgagagaatcttccccagccacatcagcagcagatacctgagattcttcgagcagcccagatacttcaacatcctgaccacccagtgggagcagaagtaccacggcaacaagctgaagggcgtggacctgctgagaagctggtgctacaagggcttccacatgggcgtggtgagcgacagcgcccccgtgtggagcctgcccaccagcctgctgaccatcagcaaggacgacgtgatcctgaacgccttcagcaagagcgagaccagcaagctgggcaagcagagcagctgcgaggtgagcctgctgctgagcgaggacggcaccacccccaagagcaagaagacccaggccggcctgagcccctacccccagaagcccagcagcagcaaggacagcgaggacaccagcaaggagcccagcctgagcacccagaccctgcccgtgatcaagtgcagcggccagaccagcagactgagcgccagcagcaccttccagagcatcagcgacagcctgctggccgtgagcccctag

SEQ ID NO: 181279 - protein, 2089 aa, Artificial Sequence
  derived and/or modified sequence
MEDTQAIDWDVEEEEETEQSSESLRCNVEPVGRLHIFSGAHGPEKDFPLHLGKNVVGRMPDCSVALPFPSISKQHAEIEILAWDKAPILRDCGSLNGTQILRPPKVLSPGVSHRLRDQELILFADLLCQYHRLDVSLPFVSRGPLTVEETPRVQGETQPQRLLLAEDSEEEVDFLSERRMVKKSRTTSSSVIVPESDEEGHSPVLGGLGPPFAFNLNSDTDVEEGQQPATEEASSAARRGATVEAKQSEAEVVTEIQLEKDQPLVKERDNDTKVKRGAGNGVVPAGVILERSQPPGEDSDTDVDDDSRPPGRPAEVHLERAQPFGFIDSDTDAEEERIPATPVVIPMKKRKIFHGVGTRGPGAPGLAHLQESQAGSDTDVEEGKAPQAVPLEKSQASMVINSDTDDEEEVSAALTLAHLKESQPAIWNRDAEEDMPQRVVLLQRSQTTTERDSDTDVEEEELPVENREAVLKDHTKIRALVRAHSEKDQPPFGDSDDSVEADKSSPGIHLERSQASTTVDINTQVEKEVPPGSAIIHIKKHQVSVEGTNQTDVKAVGGPAKLLVVSLEEAWPLHGDCETDAEEGTSLTASVVADVRKSQLPAEGDAGAEWAAAVLKQERAHEVGAQGGPPVAQVEQDLPISRENLTDLVVDTDTLGESTQPQREGAQVPTGREREQHVGGTKDSEDNYGDSEDLDLQATQCFLENQGLEAVQSMEDEPTQAFMLTPPQELGPSHCSFQTTGTLDEPWEVLATQPFCLRESEDSETQPFDTHLEAYGPCLSPPRAIPGDQHPESPVHTEPMGIQGRGRQTVDKVMGIPKETAERVGPERGPLERETEKLLPERQTDVTGEEELTKGKQDREQKQLLARDTQRQESDKNGESASPERDRESLKVEIETSEEIQEKQVQKQTLPSKAFEREVERPVANRECDPAELEEKVPKVILERDTQRGEPEGGSQDQKGQASSPTPEPGVGAGDLPGPTSAPVPSGSQSGGRGSPVSPRRHQKGLLNCKMPPAEKASRIRAAEKVSRGDQESPDACLPPTVPEAPAPPQKPLNSQSQKHLAPPPLLSPLLPSIKPTVRKTRQDGSQEAPEAPLSSELEPFHPKPKIRTRKSSRMTPFPATSAAPEPHPSTSTAQPVTPKPTSQATRSRTNRSSVKTPEPVVPTAPELQPSTSTDQPVTSEPTSQVTRGRKSRSSVKTPETVVPTALELQPSTSTDRPVTSEPTSQATRGRKNRSSVKTPEPVVPTAPELQPSTSTDQPVTSEPTYQATRGRKNRSSVKTPEPVVPTAPELRPSTSTDRPVTPKPTSRTTRSRTNMSSVKTPETVVPTAPELQISTSTDQPVTPKPTSRTTRSRTNMSSVKNPESTVPIAPELPPSTSTEQPVTPEPTSRATRGRKNRSSGKTPETLVPTAPKLEPSTSTDQPVTPEPTSQATRGRTNRSSVKTPETVVPTAPELQPSTSTDQPVTPEPTSQATRGRTDRSSVKTPETVVPTAPELQASASTDQPVTSEPTSRTTRGRKNRSSVKTPETVVPAAPELQPSTSTDQPVTPEPTSRATRGRTNRSSVKTPESIVPIAPELQPSTSRNQLVTPEPTSRATRCRTNRSSVKTPEPVVPTAPEPHPTTSTDQPVTPKLTSRATRRKTNRSSVKTPKPVEPAASDLEPFTPTDQSVTPEAIAQGGQSKTLRSSTVRAMPVPTTPEFQSPVTTDQPISPEPITQPSCIKRQRAAGNPGSLAAPIDHKPCSAPLEPKSQASRNQRWGAVRAAESLTAIPEPASPQLLETPIHASQIQKVEPAGRSRFTPELQPKASQSRKRSLATMDSPPHQKQPQRGEVSQKTVIIKEEEEDTAEKPGKEEDVVTPKPGKRKRDQAEEEPNRIPSRSLRRTKLNQESTAPKVLFTGVVDARGERAVLALGGSLAGSAAEASHLVTDRIRRTVKFLCALGRGIPILSLDWLHQSRKAGFFLPPDEYVVTDPEQEKNFGFSLQDALSRARERRLLEGYEIYVTPGVQPPPPQMGEIISCCGGTYLPSMPRSYKPQRVVITCPQDFPHCSIPLRVGLPLLSPEFLLTGVLKQEAKPEAFVLSPLEMSST

SEQ ID NO: 181280 - protein, 1802 aa, Artificial Sequence
  derived and/or modified sequence
MEDTQAIDWDVEEEEETEQSSESLRCNVEPVGRLHIFSGAHGPEKDFPLHLGKNVVGRMPDCSVALPFPSISKQHAEIEILAWDKAPILRDCGSLNGTQILRPPKVLSPGVSHRLRDQELILFADLLCQYHRLDVSLPFVSRGPLTVEETPRVQGETQPQRLLLAEDSEEEVDFLSERRMVKKSRTTSSSVIVPESDEEGHSPVLGGLGPPFAFNLNSDTDVEEGQQPATEEASSAARRGATVEAKQSEAEVVTEIQLEKDQPLVKERDNDTKVKRGAGNGVVPAGVILERSQPPGEDSDTDVDDDSRPPGRPAEVHLERAQPFGFIDSDTDAEEERIPATPVVIPMKKRKIFHGVGTRGPGAPGLAHLQESQAGSDTDVEEGKAPQAVPLEKSQASMVINSDTDDEEEVSAALTLAHLKESQPAIWNRDAEEDMPQRVVLLQRSQTTTERDSDTDVEEEELPVENREAVLKDHTKIRALVRAHSEKDQPPFGDSDDSVEADKSSPGIHLERSQASTTVDINTQVEKEVPPGSAIIHIKKHQVSVEGTNQTDVKAVGGPAKLLVVSLEEAWPLHGDCETDAEEGTSLTASVVADVRKSQLPAEGDAGAEWAAAVLKQERAHEVGAQGGPPVAQVEQDLPISRENLTDLVVDTDTLGESTQPQREGAQVPTGREREQHVGGTKDSEDNYGDSEDLDLQATQCFLENQGLEAVQSMEDEPTQAFMLTPPQELGPSHCSFQTTGTLDEPWEVLATQPFCLRESEDSETQPFDTHLEAYGPCLSPPRAIPGDQHPESPVHTEPMGIQGRGRQTVDKVMGIPKETAERVGPERGPLERETEKLLPERQTDVTGEEELTKGKQDREQKQLLARDTQRQESDKNGESASPERDRESLKVEIETSEEIQEKQVQKQTLPSKAFEREVERPVANRECDPAELEEKVPKVILERDTQRGEPEGGSQDQKGQASSPTPEPGVGAGDLPGPTSAPVPSGSQSGGRGSPVSPRRHQKGLLNCKMPPAEKASRIRAAEKVSRGDQESPDACLPPTVPEAPAPPQKPLNSQSQKHLAPPPLLSPLLPSIKPTVRKTRQDGSQEAPEAPLSSELEPFHPKPKIRTRKSSRMTPFPATSAAPKLEPSTSTDQPVTPEPTSQATRGRTNRSSVKTPETVVPTAPELQPSTSTDQPVTPEPTSQATRGRTDRSSVKTPETVVPTAPELQASASTDQPVTSEPTSRTTRGRKNRSSVKTPETVVPAAPELQPSTSTDQPVTPEPTSRATRGRTNRSSVKTPESIVPIAPELQPSTSRNQLVTPEPTSRATRCRTNRSSVKTPEPVVPTAPEPHPTTSTDQPVTPKLTSRATRRKTNRSSVKTPKPVEPAASDLEPFTPTDQSVTPEAIAQGGQSKTLRSSTVRAMPVPTTPEFQSPVTTDQPISPEPITQPSCIKRQRAAGNPGSLAAPIDHKPCSAPLEPKSQASRNQRWGAVRAAESLTAIPEPASPQLLETPIHASQIQKVEPAGRSRFTPELQPKASQSRKRSLATMDSPPHQKQPQRGEVSQKTVIIKEEEEDTAEKPGKEEDVVTPKPGKRKRDQAEEEPNRIPSRSLRRTKLNQESTAPKVLFTGVVDARGERAVLALGGSLAGSAAEASHLVTDRIRRTVKFLCALGRGIPILSLDWLHQSRKAGFFLPPDEYVVTDPEQEKNFGFSLQDALSRARERRLLEGYEIYVTPGVQPPPPQMGEIISCCGGTYLPSMPRSYKPQRVVITCPQDFPHCSIPLRVGLPLLSPEFLLTGVLKQEAKPEAFVLSPLEMSST

SEQ ID NO: 181281 - DNA, 3751 bp, Artificial Sequence
  derived and/or modified sequence
caccatgtctaggaggaccgaggaaaggcgctctggccttaccagacacgtcggacgtctatgacacagcccctctatccgttgccggcagctggcgccagactctctggtcgcggtttggaactgcgcgggaagtgggtggtgggcgggcaagcggtagtgggttgtcccttggagctgcccaatcgacgtgcattattctgttggcgcacggcggccttcaattaccgtctcattaactgatctcagcagcctgggagacaccacctatttgaactctaagggggcggggctttgggtgtgcctccgctcgactggctgcggttgtgaaagacagcggcagaagccaatcagcaaataagctctttttcggcacacgcagtcgctccacccgggtcgcgaccgttactggtggcgcgcgcggggacttaaagtagatcatggaggacacccaggctattgactgggatgttgaagaagaggaggagacagagcaatccagtgaatccttgaggtgtaacgtggagccagtagggcggctacatatctttagtggtgcccatggaccagaaaaagatttcccactacacctcgggaagaatgtggtaggccgaatgcctgactgctctgtggccctgccctttccatctatctccaaacaacatgcagagattgaaatcttagcctgggacaaggcacctatcctccgagactgtgggagccttaatggtactcaaatcctgagacctcctaaggttttgagccctggggtgagtcaccgtctgagggaccaggaattgattctctttgctgacttgctctgccagtaccatcgcctggatgtctctctgccctttgtctcccggggccctctgacagtagaagagacacccagagtacagggagaaactcaaccccagaggcttctgttggctgaggactcggaggaggaagtagattttctttctgaaaggcgtatggtaaaaaaatcaaggaccacatcttcctctgtgatagttccagagagtgatgaagaggggcattccccggtcctgggcggccttgggccgccttttgccttcaatttgaacagtgacacagatgtggaagaaggtcagcaaccagccacagaggaggcctcctcagctgccagaagaggtgccactgtagaggcaaagcagtctgaagctgaagttgtaactgaaatccagcttgaaaaggatcagcctttagtgaaggagaaggacaatgatacaaaagtcaagaggggtgcagggaatggggtggttccagctggggtgattctggagaggagccaacctcctggagaggacagtgacacagatgtggatgatgacagcaggcctcctggaaggccagctgaggtccatttggaaagggctcagccttttggcttcatcgacagaccaacctgtcacccctaagcccacatctcggaccactaggagcaggacaaatatgtcctctgtgaagaaccctgaatcaactgtccctatagcccctgagctcccaccttccacctccacagagcagcctgtcacccctgagcccacatctcgggctactaggggaagaaaaaatagatcctctggcaagacccctgaaacacttgtccccacagcccctaagctcgagccttccacttccacagaccaacctgtcactcctgagcccacatctcaggccaccaggggcaggacaaataggtcctctgtgaagacccctgaaacagttgtccccacagcccctgagctccagccttccacctccacagaccagcctgttacccctgagcctacgtctcaggctactaggggaagaacagatagatcctctgtcaagactcctgaaacagttgtccccacagcccctgagctacaggcttccgcctccacagaccagcctgtcacctctgagcccacatctcggaccactaggggaagaaaaaatcggtcctctgtcaagacccctgaaacagttgtgcccgcagcccctgagctccagccttccacctccacagaccaacctgtcacccctgagcccacatctcgggccactaggggcaggacaaataggtcctctgtcaagacccctgaatcaattgtccctatagcccctgagcttcagccttccacctccagaaaccagcttgtcacccctgagcccacatctcgggccactaggtgcaggacaaataggtcctctgtcaagacccctgagccagttgtccccacagcccctgagccccatcctaccacctccacagaccagcctgtcacccccaagctcacatctagggccactaggagaaagacaaataggtcctctgtcaagactcccaaaccagttgaaccagcagcctctgatcttgagccttttacccccacagaccagtccgtcacccctgaggccatagctcagggtggtcagagcaaaacactgaggtcttccacagtaagagctatgccggttcctaccacccctgaattccaatctcctgtcaccacagaccagcctatttcccctgagcctattactcaacccagttgcatcaagaggcagagagccgctgggaaccctggctccctcgcagctcccattgaccataagccttgctctgcacccttggaacctaaatcccaggcctcaaggaaccaaagatggggagcagtgagagcagctgaatcccttacagccattcctgagcctgcctctccccagcttcttgagacaccaattcatgcctcccagatccaaaaggtggaaccagcaggtagatctaggttcaccccggagctccagcctaaggcctctcaaagccgcaagaggtctttagctaccatggattcaccaccacatcaaaaacagccccaaagaggggaagtctcccagaagacagtgattatcaaggaagaggaagaagatactgcagagaagccagggaaggaagaggatgtcgtgactccaaaaccaggcaagagaaagagagaccaggcagaggaggagcccaacagaataccaagccgcagcctccgacggaccaaacttaaccaagaatcaacagcccccaaagtgctcttcacaggagtggtggatgctcggggagagcgggctgtgctggcactggggggaagtctggctggttcagcggcagaggcttcccacctggtcactgatcgcatccgccggacagtcaagttcctgtgtgccctggggcggggaatccccattctgtccctggactggctgcatcagtcccgcaaggctggtttcttcttacccccggatgaatatgtggtgaccgaccctgagcaagagaagaactttggctttagccttcaagacgcactgagcagggctcgggagcgaaggctgctagagggctatgagatctatgtgacccctggagtccagccaccaccacctcagatgggagagattattagctgctgtggaggcacatacctacccagcatgcctcggtcctataagcctcagagagttgtgatcacatgccctcaggacttccctcattgctccattccactacgggttgggctgcccctcctctcgcctgagttcctgctgactggagtgctgaagcaggaagccaagccagaggcctttgtcctctcccctttggagatgtcatccacctgagaactccactacccttttccctcccagaccacgaattagaagatatgtggaagaaagaactcagggcgtt

SEQ ID NO: 181282 - DNA, 6270 bp, Artificial Sequence
  derived and/or modified sequence
atggaggatacacaggcaatcgactgggacgttgaagaggaagaagagacggagcagtcttcggaaagtctcaggtgtaacgtcgaaccagtgggccgtttgcatattttttctggtgctcacggacctgagaaggacttccccctgcatctcggcaagaacgtggtcgggcgcatgcctgattgttcagttgcgcttccttttcccagcattagtaagcagcacgccgagatcgagatcttggcttgggataaggctcccattctccgggattgcgggtccctgaatggaacccagattttgagaccccctaaggtcctgtcacctggggtgagccatcggttgcgtgatcaggaactgatcttattcgctgatctcctgtgccagtaccacaggctggacgtatcccttcccttcgtgtcccgtggacctcttacagtggaagagactccccgcgtacaaggcgaaacccagcctcagcggcttctgttggctgaggattccgaggaggaagttgatttcctgagtgagcggaggatggtaaagaaatcaaggaccaccagttcttccgtgatagtgccagagtccgacgaagaaggtcattccccagtcctgggaggtctgggtccgccttttgcattcaacctgaacagcgatacagatgtcgaggagggacagcagcccgccactgaagaggccagctccgctgccagacgtggagctacggtagaagccaagcaatcagaagctgaagttgtcacagagatacagctcgaaaaagaccagcccctggtgaaggagagagataatgacacgaaggtcaagcgcggggcaggaaacggcgttgtgccagctggagtgatacttgagcgaagccagcctcccggagaggacagtgatactgacgtcgacgatgatagccgcccccccgggcggccagctgaggtgcatttggaacgcgctcagccctttggattcatcgattctgatacagacgctgaagaagagagaatccccgctactccagttgtgatccccatgaagaagcggaagatctttcacggcgtaggaacacggggccccggcgcccctggattggcgcatctgcaggagtcccaagccggcagcgatacagacgtggaagagggcaaagctcctcaggcagtacctctagaaaaatcccaggcctccatggtgatcaattcagatacagacgatgaagaggaggttagtgcagctctgaccctggcccatctgaaagaaagccaacctgccatttggaacagagacgctgaggaggatatgccgcaacgtgtcgtgctgctgcaaagaagtcagactaccacggagcgggatagcgataccgacgtagaggaggaagagctgccagtggagaacagagaagcagtgctcaaggaccacacaaagatcagggccttagttcgcgcccactcagagaaagatcagccaccctttggtgattcagatgattccgtggaagccgacaagtcttcgcctggcattcatttggaaaggagtcaagcaagtaccaccgtagatatcaatactcaggttgaaaaggaagtcccccccggcagtgcaatcattcacatcaagaaacatcaggtgtcagtggagggtactaaccagaccgatgtgaaagccgtgggagggcccgcaaaactcctggtggtctccttagaggaggcctggccacttcacggcgactgtgagaccgacgcagaggagggcacctccctcacagccagcgtggtcgcagatgtgcggaaatcacagctgcccgccgaaggggacgcaggagccgaatgggccgcggcagtgctgaagcaggaaagagcccacgaggtgggagcacagggcggtccacctgtggcacaggttgaacaggacctgccaatctctagagaaaacctgaccgacctggtcgtggatacagacactctgggtgagagcacccagccccagcgggaaggagcacaggtccctacaggcagagagcgagaacaacacgtgggcggaacaaaggactctgaggacaactatggcgactctgaagatctggacttgcaggctactcagtgctttctggagaaccagggattagaggcggtgcagtcaatggaggatgagcccactcaggcatttatgcttacacccccgcaggagttgggccccagccactgcagttttcagaccacaggaaccttggacgagccttgggaggtacttgccactcagcctttttgtcttcgtgaaagtgaagattctgagacccagcctttcgacactcatttagaggcttacgggccctgtctctccccaccaagagctattccaggcgatcaacaccctgaatctcccgttcacacggagcctatgggcatccagggaagaggccggcaaacggtcgacaaggtgatgggaattcccaaagaaaccgcagagagggtcggaccagagaggggtccgttggagcgagagacagagaagctgctcccggagagacagactgacgtgactggggaggaagagcttacaaagggaaagcaagatagagaacagaagcaactcctggcacgggacacacagcgccaggagtctgacaagaacggtgagagcgcatcacccgagagggatagggagagtttgaaggtggaaatcgagacatcagaagagatacaggagaaacaggtccagaagcagacgctgcccagcaaggccttcgaaagagaggttgagaggcccgtggctaatcgggagtgtgatccggcagaacttgaagaaaaagtccctaaagtcatcctcgagcgtgacactcagaggggtgaacctgaaggaggttctcaggatcagaaaggacaggcatcgtctccaacgccagaacccggagtgggggccggagacttaccggggcctaccagcgcgcccgtaccaagtgggagccaaagcggtggcaggggatctcccgtgtcaccaaggcggcatcagaagggactgctcaattgcaagatgcctccagctgaaaaagcctcacgcattcgggcagcagagaaagtgtcacgtggcgatcaggagagccctgacgcctgtctgcccccgacagtccctgaggcccccgcaccacctcagaagccactcaatagccagagtcagaagcatctggcccctcctcctctgctgagccctctgcttccatcaattaagccaactgtgcgcaagacccggcaggatgggtcccaggaagccccagaagccccgctgagctcagagctggagccattccacccaaagcccaagataagaacccgcaagtcgtctaggatgacaccgttcccggccacttcagcagctccagagccccacccatccaccagcactgcccagccagtcacacctaaacccacctcccaggccacacgctcccgcacaaatcgaagttcagtgaagacacctgagcccgtggtccctactgcccctgagttacaaccaagcacctctactgatcagcctgtgacctccgagccgacctcacaagtcacccgcggtaggaagtccagatctagtgtgaagacgcccgaaactgtggttccaacggccctggagttgcaaccttctactagtacagatagacctgtgacaagtgagcctacaagccaggcaacgagaggtaggaagaacaggtcttctgtcaaaacaccagaacccgtggtgcccaccgctcccgagcttcagcccagtacttcgaccgaccaacctgtcacatcagaacctacctatcaggccacaagaggacggaaaaatcgatcctccgtcaagactccggaacccgtggtgcctaccgcccctgaactgcggccttcaacaagcaccgaccgcccagttacaccgaaacctacctcccggactacgcgaagtagaacaaacatgtccagcgtgaagactcctgagaccgtggtgccaacagctcccgagctgcagatttctacaagtaccgaccagcctgtgacgccaaagccgaccagcaggaccacacggagccggacaaatatgtcgagcgttaaaaatcctgaatcaacggtgcccattgctcctgaactgccaccaagtacaagcaccgagcaacccgtcacaccagagccaacaagccgcgcgaccagggggcggaagaataggtcatcgggcaagactccagagactctcgtgcccacagccccaaagctcgagccaagtacaagcacagaccagccggtgacccccgagcctacatcccaggcaacacgaggccgaactaatcgctcgtccgtgaaaacgccagaaacagtggttccaaccgcccccgagcttcaacctagcacctcaacagatcaacctgtgacaccagagcctacgtcccaggccactcgagggcgcaccgaccgaagcagcgtgaagacgccggaaactgttgtccccacagccccagagctgcaggccagtgccagtaccgaccagccagtaacctcagagcccactagcagaactacgcgagggcgtaaaaaccggagtagcgtcaagactcctgagaccgtcgttcccgctgcccccgagctgcaaccctccacgtccactgatcaacccgttacgcccgagcctacatcccgcgcaactcgtgggcgcacaaataggtcaagcgttaagacaccggagtcgatagtgccgatagcccctgagctgcaaccttccacatcgagaaatcaactagtaaccccagaacccacctcaagggccacacggtgccgtaccaaccgctccagcgtgaaaactcctgaacccgtagtgcccactgctcccgaacctcatccaaccacatcaacggatcagcccgtgaccccaaagttaacctctcgggccacccggcgtaagacaaacagatcttccgtgaagacacctaaacctgtcgagcctgccgcctctgacctggagccgtttactcctaccgaccaatcagttactccagaggccatcgctcaggggggccagtctaagacacttaggtccagtaccgtgcgcgccatgccagtccccactacaccagaatttcagagcccggttaccaccgatcagcctatatcacccgagccgataacccagcccagctgtataaaacgccagcgcgccgcaggtaaccccggtagtctggccgcacccattgaccacaagccgtgctcggccccactggaacctaagtctcaggcttccaggaatcagaggtggggcgctgtgagagcagctgagagtctgacagctatccccgaacctgcctcaccacagctgctcgagaccccaatacacgccagccaaattcagaaggtcgaaccagctgggcgctccaggttcacgccggaactgcagcctaaggccagccagtcaagaaagcgctctctggcgaccatggactctcctcctcatcagaagcagccccagcgaggtgaagtgagtcagaaaaccgtcatcattaaagaggaggaggaggacaccgccgagaagcccggaaaggaagaggacgttgtcacccctaaacccggaaaacgaaagagggaccaggctgaagaagagccaaacaggatcccttcgcgaagcttgcggcgcaccaagctgaaccaggagtcaacggctccaaaagtcctgttcactggcgtggttgacgctaggggagaacgcgcagtcctggctttggggggtagcctggccggttccgctgctgaggcctcccacctggttactgatcgcatccggcgaaccgtgaagtttctctgtgcgttaggtcggggtataccgatcttaagcctggactggctgcaccaaagtcgtaaagccggtttcttcctaccgcccgatgagtacgtggtgactgatccagagcaggagaagaatttcggcttttccctgcaagatgctttgtcgcgagccagagagcgtcgcctgctggagggctacgagatttacgtcacacccggggtgcaacctccgcctcctcagatgggcgagattatctcctgttgtggaggcacatatctcccctccatgccaagatcatataagccccagcgagtggtgatcacatgtcctcaggatttcccacattgctctatccctctcagggtgggtttacctctgttgagtcctgagttccttttgacaggggtcttgaagcaggaggcaaaacctgaggccttcgtgctgtcccctctcgaaatgtcttctacctag

SEQ ID NO: 181283 - DNA, 6270 bp, Artificial Sequence
  derived and/or modified sequence
atggaggacacacaggcaattgattgggacgtggaagaagaagaagagaccgagcagtcctccgagtcacttcggtgtaacgtagaaccggttggtaggcttcacatattctctggcgcccacggtccggaaaaagattttccattgcacttgggtaagaacgtcgtgggaagaatgccagactgctcagtggctctgccttttccgagcatatcaaagcagcatgccgaaattgagatactggcgtgggacaaggcccccatcttaagagactgcggctccctgaacggcactcagatcctgcggcctccgaaggtgctgagtcctggagtgtctcatcgccttcgggaccaggaactgatactattcgccgacctcctgtgccagtaccataggttggacgtgagtctgccttttgtttcccggggtcccctgactgttgaggagactcctcgcgtgcaaggcgaaacccagccccaacgcttattacttgcggaggatagtgaagaggaagtggatttcctgtctgaaaggagaatggtgaaaaagtctcgaactacctcttcatctgtgatcgtacccgaaagtgacgaagagggtcactctcctgttcttggtgggttggggcccccctttgcatttaatctgaactcagatactgacgtggaagagggacaacagcccgccaccgaagaagcttccagtgccgctagacggggagcaactgtcgaggcaaagcaaagtgaagccgaagttgtcacggaaattcaactggagaaagatcagcctctggtgaaggaacgggataatgacacgaaagtgaagcgtggggcaggcaatggcgtggtgcctgctggcgttatacttgagcggagccagcctccgggagaggactccgacacagacgtcgacgatgacagcagaccgccaggacggccagcagaggtacacctcgagagggcgcagccatttgggttcatagattctgacactgatgcggaggaagagcggatccccgcaacaccagtggtgatccccatgaagaagcggaagatattccacggagtggggactaggggccccggtgctcctggcttggcacacttgcaggagagccaggccggcagtgatacggatgtggaggaaggaaaagcaccccaggccgtgcctcttgagaagtcccaggctagcatggtgattaactctgataccgacgacgaggaggaagtctccgccgctctaacccttgctcacctgaaagaatctcaacctgccatctggaatcgcgacgctgaagaggatatgccacagcgcgtggtgctccttcagagaagtcagacgactacagagagggacagtgataccgatgtagaggaagaagagctccccgtagagaatagagaagccgtcctgaaggatcacaccaagatccgagccctggttagggctcatagcgagaaagatcagcctccctttggtgattctgacgacagcgtcgaagcagacaagagcagccccggcatccatttggaacgctctcaggcttcaaccaccgtggacatcaacacccaggtcgaaaaagaggttccgcctgggagtgcaatcattcatattaagaagcatcaggtatcagtcgaagggacaaaccagacggatgtgaaagctgtgggcggccctgctaaactattggtggtaagcctggaagaagcctggccgctccacggcgactgtgaaactgatgcggaggagggcacctcgctcactgcatctgtggtcgcagatgtgaggaagagccagttgccggcggagggagatgccggagccgagtgggcagcagccgtcttgaagcaggaacgcgcccatgaagtaggggcccagggagggcctccggtcgctcaagtggaacaagacctgccaatttcccgagagaatttgactgatctggtggtggataccgacacactgggagaatccacacaaccccagagagagggcgctcaagtgcccactggcagggaacgggagcaacacgttggcggaaccaaagactcggaggacaattacggggattccgaggacctggacctccaggctacccagtgttttctggagaatcagggtctggaagccgtccaatccatggaagatgagcctacacaagcgtttatgctcactccccctcaggagctgggccccagccactgtagtttccagacaaccgggacattggatgaaccatgggaggtgcttgccactcagccattttgcctgagggagagcgaagactccgaaacccagccctttgacacccacctggaggcatatggcccctgtctatccccacctcgtgccattccgggtgatcagcacccagagagtcccgtacatactgagcccatgggaatccagggcagaggccgtcagacagtggataaggtgatgggcattccgaaggagactgccgaacgtgtaggtcccgaacgaggcccgctcgaacgcgagactgagaaactgctgcctgagcgtcagacagacgtaacgggtgaggaagagctgactaaggggaaacaggaccgagagcagaagcagttactggcgcgggacactcaaaggcaggaatccgacaaaaatggagagagcgcatcccccgaacgggatagagagagcttgaaggtagagatcgagacatcggaggagatccaggaaaaacaggtgcaaaagcagactctcccaagcaaagctttcgaacgcgaagtcgagaggcccgtggccaacagggaatgtgatcctgctgagctggaggaaaaagtgcctaaagtgatcctcgaacgggacacccaaagaggtgagcccgagggaggctctcaggatcagaaagggcaggcgtcctcccctacccccgaaccaggggtcggagccggcgacttgccaggtccaacgtccgcccctgtgccttcaggatcgcagagtggtggcagaggctctcccgtgagcccaagaagacatcagaaaggcctactgaattgcaaaatgcccccggccgagaaggcgtcccggatcagagcagccgagaaggtgagccgcggagatcaggagtcacccgatgcctgcctgccacccacagtcccagaggcccctgctcccccacagaagcccctcaacagccagagccagaaacatttagcacccccccctctgctcagtccattgcttccgagcatcaagccaaccgttaggaagacccgacaggacggcagtcaggaggcgccggaggccccactctctagcgagctcgagccctttcatcccaagccaaaaataaggacacggaagagctctcggatgacaccctttcccgcgacttccgcggccccagaaccacacccaagcaccagcactgcacagcccgtgacccccaagccaacttcccaggcaactaggagccggactaaccggtctagcgtgaagacccccgaacccgtggtccctactgcacctgaattgcagccgagtacatcaaccgaccagcctgtgaccagcgagcctacctctcaggtaaccagaggaaggaaatctcgcagttcagtcaagactcctgagaccgtagtgcccaccgcccttgaactgcaaccttcaacctcaacagatagaccagtcacaagtgaacccacaagtcaggcgaccaggggtaggaaaaaccgttcatcagtgaaaacacctgagccggtggtccctacagcacccgaactccagccgagcaccagtaccgatcagcccgtgacaagcgagccgacctatcaggctacgaggggccgcaagaatcgatcgagtgtaaaaacgccagaacccgtggttcccactgcccccgagcttagaccatctacaagcaccgaccggcctgtgacacccaaaccaacttcaaggacaacacggtcacggaccaatatgtccagcgtgaagacacctgaaacagttgtgcctacggctccagagctgcagattagcacatcgacagatcagcctgtcacccccaaacccacctctcgcacgacacgatcaagaaccaacatgagttccgtaaaaaatccggagagtacagttccaattgcccctgaacttcctccctcgacaagcactgaacagcctgtgacacctgaacccacttcacgcgcaacccggggccggaaaaaccggtctagtgggaagacacccgagaccctggtccccactgctcctaagctggaaccgtcaactagcaccgaccaacccgtgacgccagagccaactagtcaggcaacaagaggacggaccaacagatcgagcgttaagacccctgagacagtagttcctaccgcacctgagctgcagccttccacttctaccgatcagcccgttacgcccgagccaacctcacaggctacccgggggagaacagatagatctagcgtgaagacgcccgaaaccgtcgtgccaacagccccggagttgcaagcttcggctagtacagatcagcctgtgacgtccgaaccaacttccaggaccactcgggggagaaagaaccggtcgtcagttaaaacaccagagaccgtagttccagctgcccccgagttacagcccagtacatccaccgatcaaccagtgacccctgagcccacaagtagggccacccggggacgaaccaataggagtagcgtgaagacccctgaatcgattgtgcccattgccccagagctgcagccctctaccagcagaaatcaacttgtgacccctgagcccactagccgcgcaaccagatgcaggaccaaccggagtagtgtcaaaaccccagaacccgtcgtgccgaccgctcccgagccccatcctaccacctctaccgaccagccggtgacccctaaactcacaagcagggccacccgccgcaaaaccaataggagttcagttaaaacccctaagcccgtggaaccagcagcaagtgatctcgaacctttcacacctactgaccagagcgtgacccctgaagctattgcgcaggggggccaaagcaaaaccctcaggtcttccacagtccgtgccatgcctgtgccgactacccctgaatttcagagtcctgttactacagatcaacccatcagcccggaacctatcactcagcccagctgcatcaagcggcaacgcgcagctggaaaccctggcagcctggcagcgcctatcgatcacaagccttgcagtgcaccactggagccgaaatcacaagcgagtaggaaccagcgctggggggctgttcgtgcggcagagtccctcacagctatcccggaaccagcttctccccagctgctcgaaacacctattcacgcctcacagattcaaaaggtcgaacccgccggcaggtcacggttcaccccggaacttcagccaaaggccagccagtccaggaagagatctctggcaacgatggacagcccccctcatcagaagcagcctcagcggggagaagttagccaaaaaaccgtcattatcaaggaggaggaagaagacacggcagaaaaaccagggaaggaggaagacgtggtaacccctaagcctgggaaacggaagcgagatcaggcggaggaagaaccaaaccggataccctccagatccttgcggcggactaagcttaaccaggaatcaactgcccctaaggtgctgtttactggagttgtcgacgcaagaggggaaagggcagtcctcgccctcggcggcagcctcgcagggagtgctgccgaggcatcacacttagtcacagataggatcagacgtaccgtgaaattcctctgtgctctggggcgtggaatccccatactatccctggattggctgcatcagagtaggaaggccggatttttcctgcctcccgatgagtacgtggtgactgacccagagcaagaaaagaacttcggcttcagcttacaggacgctctcagcagagctagggaacggcgtctgttggagggatacgagatttatgtgaccccaggcgttcagccgcctcccccccagatgggcgaaatcatcagctgctgcggtgggacctacctgccaagcatgccaagatcctataagccccagcgcgtcgttatcacgtgtccccaggattttccccattgcagcatcccccttagagtagggctgccacttttgtccccagaatttttgttaaccggggtgttgaagcaagaagcgaaacccgaagcctttgtgctaagtcccctcgaaatgtccagtacctag
